United States Patent Application Publication US 2015/0376612 A1 - sequence listing, part 3

SEQ ID NO: 5183 - DNA, 1030 bp, Homo sapiens
aagttagttattttcaggcactggctaattacaataatgtgaatcccactgtcaccccagctttctactgtggtatttattagaccactgcacggtaatgtggagcccaagcagagtacagtggtcttgctaagctaaggaggtagagagtggagtttggttctgccaaagtggctggaatttgcagagcagagtataggagagaaggaggccatgtaggctggggagtgctcaggggttaatgtgagcactccttttcatccttgactaagaccttggtcatgaacatgcaataaaagaccatgagaggctcagcagagagtggctactgtgggaacgaaagctgagcagaggtatcagaggtgtatgtgctgagagacattggagtttcggccttgccaatgtggatggatcctgtgaacaccttgggcgtttagttaagaccccagaaaggacacagtttaaaagtaagaccatactttacagtaaggcccacaacctaggactaagaacaatttctaaatagactgccctaacaaagaataaaactaagtctaaaggattaagtggatctgctagtgatttgactacctgtcaaaactcattaccctttaaagaaaggcaaaataacctatactctttaattactagagaagtaaatgccatcgtttgaatgtgttcccctcaaaatgaatgtgttggaaatggaatcctcagtgcacatatgttgggaggtggagcctaacaggaagtgtttaatggcagagccctcatgaatggattcatgccgttataaaaagggctttggggagtggcctctcttgcccttccagcttccgtcatgtgaggcagcagtcagaaggctcacatcagacgctggcaccttgatctcagacttcccagcctccaaaataaatttctgttctttttttttttttgagacagggtcttgctctcttgcctacactgggtgatgagtgagaccccatctcctaaaaacaaacaaacaaacaaacaaaaagctagatac

SEQ ID NO: 5184 - DNA, 1954 bp, Homo sapiens
gaatggtcttggtttgagctctcgctccaagctccatgggcaatcagtttctccttccatgtctataaagtggaaacaattctactttctgcctcttggagtgatcgtgaggattcaataaaatactctatgtgaaaagtactttgtaagctttaaacaggaatcaaatattaattattatagattattttatctgtgaaaatttaaagttttacagattctaaaagaaaactcccatcccactaaaaaccaaaccaaaaggaattttgcagattctatttcataaacctcacattccttttggaagtatgtggaggatactcctaataaagacctctctctcccctcaggattcagactggcagccgcaggctttgagaacaatttcttaaaacatgctttgagcagctgccagatagacttgtccagtttattttgtatctgccctctgttcctctcatcttctctgacagtcaccttaaattttaaaaactcagaacttcggtactctactcaaattatatcccttggatatctcatggaggagaaaaagattacaaatacaaaaaataccaacctatttgtattaagaggttgaaaatatttttaaaagtaaacaaatgcaaacggtttcacttttaacattgttactgtaaagccaggtttaggaacatggatggggctctttggggtatttgaaaatgagaatttttcagaaaagagaaactaactacaaattgcacaagaactgaaattcagtttgatttgctttagatctgcatgataagaacctagaaacagtgctttcattttgagcattaaaagcccctcagcaaactagtcctaccaagttatttggtactctgtccttttcaccatgctcataagcacagcatcagcaagtataatagatgggaactcttgctttgcatttttatagatccactgtctgaggaggttagagtagttacttactgactccttcatcccaacggcatctccatgaggtatagaaggagtggagggtgtccctgttacacagattggaaaactgagtcggtagtgaaacggctgaattaataaatgaactttgtctaggtttttctgtttctcttgttaaccgcagagacaagtattaaatggaccagtgagtttgagctatctttatatcctaaaggtggtctctcttggccaacagcaatttagaaattaattgagtgggtgattgcttatttactatatgatgtaatacgttagaagtatattaggcaatattacattacaaattttacaactatctaatccaggggttatatcaggcattttggatcttcccagggaaacaacaaaaacttttctattgaattccattgttttatctatgttgtaaggatatttcacaaaccatgcgtcccaagcaccatcagtcttcactttgagagttttctgagagtgttctcttagttacaaggaacagccctagggtggtggttgcctgtcaactagtaagaaagatggggactgaaaatggtgggatggcatttgccaagcaaattaattcagagccagttcatatgcttagagattgattcattcaaacgtagtttctttgttcccaacgccttaaaatcttgattctactatgtcccctctttggcagaatgaggtagagagctgtgcagtgattagacaggaaccccgaaaccaaagactcttaaaagctgaagagaaatcagactttgaagaactgtggcgtccaagcatgctgtaagtggagtgggcagccccctgggcgtctccacctagctgtccacaagcactccagacttaacacgccccgatgggctcgttattccctcctgccccaccccatccccacctgcagctgccctttctcctgtacttccttacttggttaatgttcttgccacccacccaagctcttcagcttaaa

SEQ ID NO: 5185 - DNA, 1825 bp, Homo sapiens
aggttgtcttttatcatcagagtggcatttatgattgccacaattatttctgtggcttatagtactttaaataacaattttctgtgccaaagaaaatatattaaaagagtctcagcataacacattttaatgttaatctgtggcataattattctgggaatatccagtatgataaaatgctagtaccagaaatttctctaacagattattaccataatactatttgagataaatttttttgtagttgagacagagtgcttaaattaaacctttgtttttctcacaatcgcttttcttaaaaaactcccaactgtttgaatgagtagtataagcacttaaccaatatatagtgtcatgaaatgtttcctttaaagccaaaaagggcagaggatgaattgagattttttttctctaccagccaaaaattaggaaatgttcacatatctaatgaatactattttatttttccccccactctcctttttgtaggactatgcaacagcccatgaagactttcagcagtccttagaactgaacaaaaaccagcctatagctatgctatacaaaggtttaactttctttcacagaggacttctgaaggtgaaagtgttgtgcatatgtgtaccatatgatgactctgcttctcttttgtgggtgggaggaatttcgtttgattgatggctggtatttattatttattgagctcctactctttgatgggttcttggagggagatacagaaagggaaaggatcaaaggttaataagtggaagaaatgatactttacctttatagaggatacagtttgcaaagctttttccacatataatttatcatatggtaaacatactcaagaatgtaatataaacaaagtgctttgaaaatgtagataagaaagattcattggaactgcagagttagagaaagttccaaagaacaggtggactttgtcctggagctggaagactgagtaggattagggggtggaggtgggagaagaaaagcccttcaggcagagaggagagcgtgggtgatgacttggggagatggaaatatgggcagttcacagagtgggaagtagttgggtatggtttaagggagatgaagctggaaggtcggtggagggcaggtccttatcctggagtactgtgctaagcattttgacttaaatttgcagaccagaggatctataaattctaggttgccaaaatgcatagattccagcactgagaccaaatctgtaatttaggaagtagattctgacagtgtggtggctgaggagatgagggacagaaggactgactaggtgacattggttgggtctaggtcagtgggcatgaaacttgacccagctccttgagagaccacaggaacaggttgggagacccttctttgattgactgtattagtattgcttgagaactgcctgactgctgggcagaggaggtagagggaaacaggaaagctatctgaactgactgaaagtatgggcagaaacgtggcctccagcctggcccttcctcctgcctgggcactcgattccatgttccgagtctgtgcggggaacccactgtgagaaggcttgtgacaggagccgggggcctggaacctgacggggagctgcctctctcacctgggcctccttagtgccgctcaaggcctggcacacagtaggtgctctcacacaggacatatccaagctacctgatggaagacagacgggcctgagaacgaaacagaggcagcctgcacagccaaaaagcaattcattctgacaggagccccagaaggtggtacttaacaagaactttgaaggctgtgaaga

SEQ ID NO: 5186 - DNA, 1027 bp, Homo sapiens
aagaacaaaaggtttttttaggcatgtaaaatttatctttatttgttatattttatactttttgcatatggcgtaatatctttgtagctgtaatcaaattattccccttatttctctgaggaaggctggagaaggactataataatcatattttacacaaacaaaggtactatggtataaaaatgaagactcctgaaattatatagtaaatcacgaaatggtgtaagttcagctttccaaatttttagtctaggacattatatgcaaactttttctattgtcttattgtatactaaaaatatttgtgtgaaattgtgctttgagagaaatgccacttttgcaacttttacattaaaatattaaaaatgtttaacatttttattttattacaatttataaaatattacaattaatattatactaaccttgtgctggcctattggagaaactttgtgtatttgtatactttgagacatagaggactgagaatgaatttagaattgggaatgatggaagtgcttaggaaggaaatgatattttactcagagcatcaatgaatgaccaggttgaagttgcagtagtaaagttcagagctgcctcttcctaattctcatcttttaaaattatatatcttgagattaaatttgcatgtatatttaataaaaagttgcacatgcatttttaatgtaaaaataatgtgcaaatgttaaagagaatgtacctaaacttcttaaggtatagatttataggcttatgtttttgatagacactgtcttgacccatttctgttcccctgttgccacaggtcagcctcatttcatgtgctggtatccacatactcatccattgagattcgttgattccatgtttaagtagattaagtttagataatatcctgccatctgtggaatttgtgataggtagccgggtctaacatgttattgttgagtaagtaggtagacttgagtgagttaaataattataatatcatgactgatttgacatggcacatctcttacatagaagt

SEQ ID NO: 5187 - DNA, 2194 bp, Homo sapiens
aggtggaacttgcagtgagccaagatcgcgccactgcagtccagcctgggcgacagcgagacttcgtctcaaaaataaaaaataaaaaaaaaaggaaagaataaattgaatagagaaaacctaaatactttacagataagcacagtaatcaattcagtgctgtagtaatgatgagaccatggggtgacttgaggggaggcccgtgcgagggcctctgtgtggggcacacatccaatcctgcagtcaagatgatgatggctacctttaggaagttgtcagtgttcggatatttcagctgttgcaaatttttgaatggctgttttttttttttaatttaaaatttttattactataaaaatgttccagctgcaagagctggagggccaccatacgtcattcactgtggcacatctgtcatagagctttgccttcctgttaccctggatcgggctcttgttttccattgacctgcaccccactattattagccatgttgtcctgcttgcttccctttgggaagaataggcttagcagagctgactttgatctgataggcaaatctttgtcttctgtgttggtttttgcttgctattcctagtatgtggcaagaatagcatgactttgcatggtattcctagcacatggaacctgagatagctaacagtaggccctgagtaaataattgtggaatgaatggctgacatccatacagtgaacagtgggaataaaggagaaggagcatatttattttccaggggcgtctggaaggaatccaaaggtggtgtttgaactgagacttaagggatcaaaggaatttcttggggaccgaggcaatgggtgagtgtttcagacagaggggatagcatttgcaaatgcactgcatttgggaaagcatcttgtatgtagggaattattaaatgattctgatttctagggtatgaagtgaagctgggtgtggtggctcacgcctgtaaccccagcactttgggaggttgaagcaggaggattgcttgaacccaggagcttgagaccagcctgggcaataaagtgagacccccatctcaacaaaaaaattttaaaattagcctggtgtgatcgtgcactcctatagcctcaggtacttgaaaggctgaggtgggagtttgagcccaggagtttgaggctgtagtgagctaggcttgcaccactgtactctagcatgggtgacagagtgagaccctgtctttatgaaaagaaaaaaaaaaaagaggaaggagatgaggctgaacagtaagcaggaaaatgattaatattttctgcagagccatttagatgttaccttttttttttttttttgtattgtgagttgctaccctttagtgggtcctgaaattaattggcaagtcaagattagcacttttttttttaagtgaaatatgctggactagaaaatatcagattccattgtgtataggaagtcctaggtataacctactgaaactgttttctgatacatgtgtgtatatattgtgcacatgtgtatgtgtgtactggattgtaatgtaaaatgtatttcagtgatttggagtttaaaaagtttgaatgtcactgtattaggtgttggggagtcactgaataatttcagttagggaaatgatatgatgagactttagtgttagaaagataactcttggtgtatatctggagaatagataggaagaaatgggaacaggtaaggtgatcacagtatcctaggtgagagaggaaggcttagaatagggcagtggctgatggagtgggtgggaggatgctgatctgttcaggaggtgagatggccaggatttggtgaggggtgtgtgacctggagagcaggaggatgccagagcaccagccccggccacgggtgtgcggggatgccagttgtatttgtagaataactgcttatttacatctttttctgattcacctcttggtcatctggagtaaacttttttctgttaggagaaaagcagcttggataatatattttgaaccataacaaatctgagcataggtttggttcttcctggagatgtatgttatcctaaagcaagcttgtccaacccatgggccacatgcagcccaggatggctttgaatgtggctcaacacagctttgtaaagtttcttaaaacattatgatatttttttttttttagctcattagttatcattag

SEQ ID NO: 5188 - DNA, 1005 bp, Homo sapiens
acaaatcataatttgcataaattattctctttaaattatgtatcacacacatgattattctctaaatctaattactcttttcttttttgtttgtttttttcttttgttggcaagtgtagtgataaaatttcttgcagtatgaaatacatttttatctcaataatactttttcatatccagtatttcagcatagtgatgaagcttttcttcaagcctacacagatgttgctctactacttttcattcttcacgttgcacctgagctaaatatcacttgagaaccatttttctctgtatatgctaataagtttttacctgttccttgcaggaccttctagatatgcaaaaatgcagtatttttaagccagtaaatgtcctttgacaaatctacaaagtggtagctattcatgtacagaatttttggttttcttgagttcattaactcttggcaatcttttttttttttttagacagctcatgagctccagtatgaagcagcagagcatggaatattattctgtttatagaagcaggcaacaaatggggactcaggggcttggattttattagaatcactgttttgataagctcatttaatatgattttcaaatctacatataaagggtattttaactccagaatgactttttgatataaagctcttatacctttcctgttgtcttggtttcaccatcaggttacaaacctgggaaatatttccataatcctcggtgtttcaaagtgtttattggaatgtttattccctgtggtttgattttcctttacagaagtatcaaggtttctaactgagcacaatgacagggtttaatagatgttggtctgcattggaaactcttgatttttaaagcttataagttagtgttgcttctatgccaatgccctgaagtcatttccatgtgtgtcagtgcatcagtaatagtgttcttgagttgaaaagtagaactttttcctgatttctgtgctgctttggtcctcatgcaggga

SEQ ID NO: 5189 - DNA, 1071 bp, Homo sapiens
tttttttgcaataatctatcaaggtgaaatgttttaatataaaattaaccattttagagcaaacagttcagtggcattcaccatgtgcaaccaccccaagttgttttcaacactccaaaataaaaccccttactcattaagcagtttctccctagtccctccttcccctatccccggcaatcaccaatctgcattttgtctctatggattcacctattctggacatttcatatagatggagtcatatgataagtgaccctttgtgtctggcttcttccatttagcataatgttttggaagttcttccacgttgcagtgtgtatcagtagttcatttttttatggtcgaatagtattctactctgtatacaccaaaatttgtttattcattcatctgttgatggacacttggaccatttctcccttttggctactgtgattagcgctactatgaacatgtatatacaatacttgtttgagtcccttttcaattttgggggtatatacctaggagaagaattgctgcatcatatggaaattctgattcgctttttaaggaactattttccataactggtgtaccattttacactcccaccagcaatgcacaagggttccaatttttctacattcttgctactgcttgttgttttctgctttttggttatagccatcctagtgtgtgtgtgtgaagaggtaccttattgtggtttgatttacatttccctaagtagtaattagtaatgatgttgagcaacttttcatgtgctcaatgcctatacaggtcctttgcctgtttttaaaattgtgttgttttagttgggttgtaagagctatttatatattttgcatactggactcatagtgtgtatcatttttttttttttgagtcagagttttgctcttgttgcccaggctggagtgcaatggcacagtctcggctcacggcaacctctgcctcccgggttcaagcgattctcctgcctcagcctcccaagtagctgggattacaggcacctgccaccacgcctggctaatttttgtattttagtagacacagggttttgccatg

SEQ ID NO: 5190 - DNA, 1095 bp, Homo sapiens
tacaagttgataccacacagccacctggccttcaggtagttctttcagccacaagaattctgtcttctcttcgcaggtttaccctatacctggggttaggattgtcaataaatatctggcactctacttttaagttgtagctcatccaagggaaaagcccagtcatccttattttcaagtagctcagtgtgctgtctgttataactaggtggtcgagtgataagtgctacccagcagctgttgatttccttataaattggccatgggtttgccacttataagctttcagtcagttttctcacacacatggatgtgtgagaaatacatgctactgccaatgccaccttctctccttccttggaggtgacgactgtcatcttatttgactaagaagcagtgagaaaacaacttccttgctccccaccaccccagctactggcctgcccgcagatggactggtagattttgccttctgtcctgttgtggtggatgagtggccggtgcctctgcctagttcagctctctgttcactggctctcatttcctcttgtcttccgtcagcatacagatggtcttaataaaactaccatcctgaaaatacaagcaactaagatgaccacacacccctccagccactgccccatccctctgcctccttttacagcagaattcctcaaaggagatgttcatatggactgcctccaccactccactctctcttggaccttctatggttagcttttgtcctcgtcaatgtgctgaaactgctcttcttaaggtcagttgtgtgtgaggtttaggaggagaggaaagaagtttcaagacactgctatacctaaactgttcattactaggacccagcattggcagaaggagttgtgacaaatgtaccatgttcttcattgctgtggcaagacccggctgtgctatgtctttgttttgtgaccttaaacatgttcattaacattgagtttatttccccatgtgtacagtgggcacagtgtgccttgtatctaccttggaggatggagaatcaaaagaaatgaggtttatgaaggtatttggaagctgggaagtactgtgaaggccaagata

SEQ ID NO: 5191 - DNA, 1045 bp, Homo sapiens
gctttgactttgtataaaataatcgtattggtttggagaggagtgcagtggtttggaaggtcctccttttggggtttgaggtaagatatcccaagtcttttcctatttgagagtttcccttcctcatgaggcagtgtcactggcacgttgtcaccctgcctgactatgctggctgtcttctgagcgaaggtgaccatctggttccttctcatgtaccacctcagtgctggattgggagaggagcgggaggaacacagtgggatggggcgcttctgttttcagagcctggctgtacctgctgctccttcctgaggtgagtctgcccactagcagagtggaaaagaaaccatggaaatactaacaatgagaatagaggctattgattttttttttttttttttaggagctgagcaatttatccacagtttctcagctggtgagtggcggagccaagatctgaacccaggcagggaggtaggcaggttccagagcctgcacttttaattctgtgctcttctgcttggctggcctgaaattccaggcttacaggataataaatataagtggcccaggaaaatcagaaagatatttgtgtcaagatcactggttctttgctggaactgagcatcagcatcatctgggtactttttgtattatttatttattttttcaatagaaaattcctaaactgactgacttttctttccctccttctctcccttccttcctttcttccttctttctttccctgtctctcctttttttaatagaaaattcccaaactatggataatttttaaaacacaaatgccagatatgctgtttccctccctcttgacagacacacatcctttcgaactctaatcaagaaaaagagcaagcagtggtgtctgccttagggtgtggtggcctgggcatctcttaagttgcccattgcttgcctattcaaggtatgcttttgagatgccattgaataaagtttgctcctgagtacagtactggaaactgtctgtctttcgcttgcagttcatttaggacagagaagc

SEQ ID NO: 5192 - DNA, 1022 bp, Homo sapiens
agcctgaagaacagtcagaccagatggtggagtgctgcctacggatcttccacctccctctagaaaatgttaagtgtcgctgtttaaacagccacagctgaggaagaggggcccgggctaggaagtctggtttactgtgcagtgacttaccttatgtcctccgagctgatttagaggatttctggtaaatcaggaagtttagtctggtgcctgaagacagtggcattgagaggctgggaggtgtgtaggcgtgtgtgtgcgtgtgcatatgtatgtgtgtgcgtctaatccttgttaaatccgtctgaacttttgccatgtgtcgggttgtgtaataggtgtgtgcggggctgcgctgtattcctaggcggtcaggattcctttctaggccagtgttccacctgacgacaaggcagctttgtgagtcatctgggtgctacagtgcagaagtgtccagggagagatcctctttgctttcgactccctgccgggtgcatcacctcggtgggcctgggaataccttggaaatggcactgtcaggagaaaagcctggagccacgtgtctggctggaatggggtcatggggagtcagagcctttgaaacctagaagcgttcaggctcctgtgtttacctgggccgacctcaaaccatcccaggaaggagaaaagcagacctgctctgataccagggtgcccactgctacttaggtgtttttccattattcattcctggggtaagaaatcgagtcttgggtttacccaccctactggtgtcagagggactcagcaggagagtagatctaggattccagatgatcttcttccatggtttttgagcacatactatgtgaccccgagagagtgtggctttctcgattaaagttattatttcttttatgaaatcctagcaaagatagggacgtcagagctggccgagtcagactcctgggggcatgttgatggcatccagatgcaattctgcagaggaatcctggaaaacaggagtaagtctagaggaaagg

SEQ ID NO: 5193 - DNA, 1030 bp, Homo sapiens
tggtatggtcagtagatccattaggaataagagcgttgggtaagccttgctgttttttggaccctgtgccacacacttatcacactttatccagttatatcgtaataacccccctgtgaattaagtgcagagttcctcatcatctgaagagtcatttcatagggagtcagaagccatcatctatgaaaacatgcagtgactgactgtctgaacccacacaccttaaatacagtggtgggggctggggtgggggatgaggaaccaggctaagcagaagcacagctcccgtttggagaaggagagagcaagtggactccattgtggctgcctcatggactgtgtagttgcagggtggactaccaccattggtggtcaatggcacatggtgccgttgtgataggcacctcttggcaggtagggcaggagatagggtgatataaagagtcacatattttgggggcatttgcagcaacatcattttctgttaggaattataaaccaaatctctgccatgctaggaatctgatatttctgaaagaactgtttagcccattacactagtggccagatgggagggaagaaagaaataattacttgaatatagcagttttaccctctaaattttacatctaaaattcctgctcacagccatccttttctaaaccttcccagcaagcagaattttctgtgtgtgatgtgtgagattcaggcagtgctctcttaccagcttttctttttttctcagtttctcatcattacttttataagctttgagaccctaaaaagtattgtctccatttttcttctgttagttgttctttaggattttgagcaacatgcttgtattacttttgacagttggccatctgggccagtttcaaggtttctttctgttttccatttttttaattgtggtaaaatatacatgaatgtaaaattgaccattttagccatttttaagtgtgcagttcagtggtgttaagctcattcatggtgttgtgccaccctcattaccatccatcttcagaac

SEQ ID NO: 5194 - DNA, 1181 bp, Homo sapiens
tttacagattttctttgactaatttttttcacataactttaggattttcgaaagttgtaaccataactggatatcttagctgagcaaaggcggttataatttgtctttttaagatcactggaaattgataaaattttgtgataattatgattattctgtgccatttacagtttctaatactatactgtatgaaatatgtataaatatatgatgctgagtctgtggaatgatacttctgaaatcaaaattcctcataaggcatgaagttgtaaaaacttgaatgtgtatagttagatatttaaatggttgcttcttcatagaattgtctgctttttaaaactggaagtacaggattttcttcaggtaaaatctgtgtgttccaattacagttgtagctgaaggaagtatgctttggtgagtcaattagtatgggaacttgactaaagacccccagtgttgtaacgtacctttgtacccagacaaaacaattatgttacattcctcaaagtggcatgggctttcttctctaattcttctgttttattagacccaagacaagttctaaaaattgaatgcaatgagagattgtccagaaatgtaatatatactaaaatataccacttaagcattgattgccttttcttgtttgcttcaagaatataaaacttgttacttgagcttggaatcatgggcttgattgaattaattactcttggggaaaaaagacaccttgtggcattaagtcttgctttggttaaagccttatttcacataattgctaaaaactcatttttgtttaatatactacctatagtttaattatcggcacttgtattttgtaacttgatatcttacctaggattgggaatttgggacatgacatgtactataaaagtcagtctatgtacatactgcttattgatgtgctgtgatatgagggaatctgaaatgtttcataaaaataaagcttaaaaattgtcttacactggataaaagtgatattaagatattatatctattgctcttctttagttggtattcaatatttttatattcttgttactgaaatattctttgaagaccctagttttttgttttatttatgtggggaggatacttaggaagctgtttgctaaattaagtaagtgttctgcttaccgtcagaattgtgaataaatcag

SEQ ID NO: 5195 - DNA, 1054 bp, Homo sapiens
ggttaggagtttgagaccagtctggccaacaaggtgaaacccccatctctactaaaaatacaaaaattagccaggtgtggtggcgctcgcctttaatcccagctacttgggaggctgaggcaggagaattgcttgaaccccggaggcggaggttgcagtgagccgagattgtgccactgcactccagcctgggccacagagcaagattccatctcaaaaaacaaaacaaaaacccaaaacccaccgttttataaaaacagaatctagaccccatgtccccacagcagggggatagcatttaaggattgagccagaattaccagctctgcttctaagttgggaagttggctttaaaagggaaaatctaaacagaaacaaaactatgtctctattatgaatgacatatttgggggaatatcagaatttttagggtgcaaattttctcaagtgtttaacagatgtagtaaggcttatttcaaattgagttccattttctcaactatttccatcattccctagaacctgaaaccaactcctgactttactacctgtttctcaaaaaattgtctcttcctctccctccctgccactacccttccccctcttatctatgctgtccccagaaaaatccattggaaacacttctcaacatgtcctcgactggcttataagcctttccaagccccaccttaattaagagatgcttattagcaggtatcacacaaaccagacataaagtgaggaacatgagatccctggcctcaaacttgtactacttagctagatctgtcctatctgccatctctcctttggccattttgcccctcacattttactctattcacttggaatagcattcagttccctcggaacatgactttgtgttccttcttccctttgaaaggttcttccccacccttctttaaccaggctaactcgactcactctacatgattcaactttggatgttgtctcctccaagaaacatcccccgaagtcctgggcagagctaatttttcttcctacagtttacccacagcacccagcaaaaacc

SEQ ID NO: 5196 - DNA, 1030 bp, Homo sapiens
tgttaaggcatttcccagatgtgatgccagccttcttacctgtactgaaagatgcttagcttagaaaaaaacaaaacagatgcaaaatcagataattttattttgtttcatgggttttcttatttactttttaaacaaggaaggaatattagaaaatcacacaaggcctcacatacatgttatttaaagaatgaattgggacggatgtcttagacttcactttcctaggctttttagcaaaacctaaagggtggtatccatattttgcgtgaattatgggtgtaagaccttgcccacttaggttttctatctctgtccttgatcttctttgccaaaatgtgagtatacagaaattttctgtatatttcaacttaagacatttttagcatctgtatagtttgtattcaatttgagaccttttctatgggaagctcagtaatttttattaaaagattgccattgctattcatgtaaaacatggaaaaaaattgtgtagtgaagccaacagtggacttaggatgggattgaatgttcagtatagtgatctcacttaggagaatttgcaggagaaagtgatagtttattgttttttcctcgcccatattcagttttgttctacttcctccccttccttccagatgataacatcacatctctacagtaagtgcctctgccagcccaacccaggagcgcaagttgtctttgccatctggtctatagtacagtgcgcggcgttaggccacaactcaaaagcattatcttttttagggttagtagaaattgttttatgttgatgggaggtttgtttgattgtcaaaatgtacagccacagccttttaatttgggagcccctgttgtcattcaaatgtgtacctctacagttgtaaaaagtattagattctactatctgtgggttgtgcttgccagacaggtcttaaattgtatattttttggaaaagtttatatactctcttaggaatcattgtgaaaagatcaagaaatcaggatggccatttatttaatatccatt

SEQ ID NO: 5197 - DNA, 1194 bp, Homo sapiens
acctgaagatcctttaattatgccagttccccttctcttccacttatggactgcctctccaagagcagggggtctgtttcccatctgatggaccacttaccttcttttctttaactctactttctatctccaaaaatccactgagtattcacattactgattagctgtgttttccagagccattgctaatcgcacgtcgaccttacataaaaatggaatattcatgcattttctatgtatttttaaagccattatttgtggcacaagctcagtgtgctttcagagacactgaacactctgttgaagaaactcaaatggcttttaaaataaaaagacaaaatcattatctctgtgtagaggatggttttatccttgaaggtttactatttgaaacctcatcacaatagaatgctgagggaagtttttggaagtacaagcgtgatagttctcagatgatgtttgcaaagttgaaatattgtccatactcttaggaattcagtggaatgcagtagcagaagctctctggtgcttagtgaatgaatgaaaattttttttttttttaccttgcaggtgaaaaaggtgtgagggttgaactcaataaaccttcagattcggtcggtaaagacgtcttctagagcctttgatccagcaataccccacttcacctacaatattgttaactatttgttaacttgtgaatacgaataaatgggataaagaaaaatagacaaccagttcgcattttaataaggaaacagaaacaactttttgtgttgcatcaaacagaagattttgactgctgtgactttgtactgcatgatcaacttcaaatctgtgattgcttacaggaggaagataagctactaattgaaaatggtttttacatctggatatgaaataagtgccctgtgtagaatttttttcattcttatattttgccagatctgttatctagctgagttcatttcatctctcccttttttatatcaagtttgaatttgggataatttttctatattaggtacaatttatctaaactgaattgagaaaaaattacagtattattcctcaaaataacatcaatctatttttgtaaacctgttcatactattaaattttgccctaaaagacctcttaataatgattgttgccagtgactgatgattaattttattttacttaaaataagaaaag

SEQ ID NO: 5198 - DNA, 1081 bp, Homo sapiens
aataattacactgtttgtgccaaaataacttaaggaatttaaatcgtaactcttctagaccctggaattgaaacagatgttttacttttaatctctgtatcctcatgcctagtgcagtacctgctcagtgagcctcaagaagtgccagaatgtatgtttgtaatgtcaagcagctaagtgttttgttctgtttgtatttttgtttttaatgccgaattgcagactcttccaacgaattatattaataatatagcaagtttgccatagctgtcagaatatctgtcttaacagtgatacttccttgcatgggctagaatgaggttgtataattccctgggtggggatcaagctgagacctgctcaggatccccagtctccttgtggagagaggttgctctgtcttcctcatgaagtttgcagtgggagtggtgtgtgtgatataaatacagagccctgcttgggaatctaagaaagagttgtgcagtgctggtaagattatagctgaggttaacaaattgtagatctctgttctgacagcagagctagacagctcaaaatataatgtgtttcaccagatgaatttcttatttgtaaagcataactttatcaattcttcactaaaagggaaatgaaagctcagagagtactaaggcatcatgacatatctctagattatactgtcgggagcatcatacttaagttgatttttaagtgtatatttaagtttttttaatcatgggctagaattagagcctaataaggaaagtagtttggtgttagattattaaacaattcataattcttgggccacttggagagtgatttggatcaatgctatttcttcttcaataatctttcattgtttttctgtatttttcatatttctatgaacatgggaagaatcttggatttttaaaaactttacattgataattaatataattatattctgccttcctgtaccgataataaaaactttgtattaacatactcttccacacaagcagagtaaaaaggttgaaattgttgttgtgtcatatgacagcggttaacaaccaaagagctcttaaaaatcagtagg

SEQ ID NO: 5199 - DNA, 1050 bp, Homo sapiens
tctttgtttagtctttgtaataatagtttcaaaatcttatctagtatttctataaacgcttttttataaaaagctaatagtgtgtttttaaggcttgtattttcaaaataatttattctgaggttgtcctgtttacttattcaaattggttattcacaaaaataaaaagatagtctcatgtgctcttatttttaagatgcgtattttaagcattaaaaccatatgttttgtaacagagtttgagtttttagactaataaaagttaccgagtaccattttattttggttttcatgatttggggctctgcggtgccaattatatttttttaatcctgtctgaaatgtctgatctgtgtcgtcataaaggaagcagtgcaggattggaaatcaggagacccctttttgtcctttgggattcccctctctaaagagtttgggccagacctttatgatcttttccacttttaaaattctagtgtttttattttaaatctctgctagatcagaagcactgccttatggatgtatagtcttagagctagattggaagatagcatagtccaggttccttattttaaagatataccagctgggcatggtggctcacacctgtaatcccaggacttggggaggccaagatgggaggatcacttgagcccatgagtttgagaccagcctgggcaacagaatgagttccctgtctcacacacacacacacacacacacacacacacacacacacacaaaaaaaaaacagaatgagttccctgtctcacacacacacgcgtcggtcgtggtgaatcagttcctgtctacacgcacactagccgggcatggtggcttgcgtctgtagtcccagctactcaggagactggggcaggagtattgcttgagctcaggagtttgacgttgcggtgagctatgatcacgccactgatctccagcctgggggacagagaccttgtctcttaaaaaaaaaaaaaattaataatagtaaagataatccaggcccaaatgatagcgtctaagatctcaccatcatttagaagt

SEQ ID NO: 5200 - DNA, 1024 bp, Homo sapiens
atgagtctttcccttattgaagtaatttcagaaatgcaccattggaatgttgtttaatttcaacaggtacaaactcacactcaaggaaaaacccagccattcactcaaaggaacattattttgatagtattcagatatcgtatacaaatcttttgagcaggttagttttttcatgtaaatcataacatatggtattggtcaagtagtaaagttcatattaaccttaaacatttactaagatactgttttcaagtaactcaggcaatgtatgcagagggtgtcatagtttctgtaagtatataagttttggatcaagatcacattaatgccagggccccactacagatcttctgaatcagagattctgaatctgaggtgaagactcatagctccttaaaattccatggagaaaatatatatatacctactattttcccacgaaaataaaaaatttaaagacaatttcctggagattctaattcacatttgggtctgagaattcttgtgtagggcatactctccattgttaaaggatactaaaaagttacatcctatatctcagatacccaaaggacatttattaagtcttatatacacctctcacaacctataagcttgcaaagcaaaaaggccttctaataccccaaattggtttatattttcttgatagttttaaccctatagattaatattctcttacctttttccccaaggcttctaaaagtagatgatactatctgtctttatgtgatagttgcttgtttgttaacttctttatgacatgtgccttcaagtgatgttctaaaactaaacttttgaaagttgttattccccttgtaaaagggtctgcccttttccctctcctgtgtttttctccttaaccatttcgtagtgcccacaggtagcgtggtatatattggtcaagaatgtaggatgcaaaggggggttgcctagatttaaaacccagctctgccattggctggttgtatgatgctagcaagttatctgccttctcatatttatt

SEQ ID NO: 5201 - DNA, 1024 bp, Homo sapiens
gtctataacttaataggtagcagtaaaaacaaaataataaaagttatttattttcctcctaaaataatggggggtatttatggcttatttacccttaataatgtcttttaagtggccattataaaatatgtagaattactttggtgtctgtgctgtcaaatttggctcatgtagtaattgtgctcgtagtaaaaagtgtattttaagcagcctgtgttgtccttaagaaatttcatgtaggttccacacttttttctaaaattaattattcttaacatttttaacagtcaaaacttgaaaccattaagatgtgaactgctgtatgtattataatagggagtagcttttttagtgttgacattgtataaaattagttatttacaaagatagtaaagcttattgtttgaaaataaggaattgaggaaatgaagttaaacaacatgtattcatacctatgtttttcttatagaaatatataatatctaggtatgtagaaatgtaaacactttgaattatacaatactttgaataatttaataacaatatagcttaaatacttgtagtgttatcttttcagtttgggaattgcatatatattttaactgtaaaaatctttttttttttttttttttttttttgagatggagtctggctctgttgaccatgctggagtgcagtggctcactgcaacctccacctcttcccaggttcaagcgattctcctgcctcagcctcccaagtagctgagtgccaagtacaggcacgcaccactgggcctggctaatttttgtatttttagtagagacagggtttcgccatgttagccaggctggtcttgaactcccaacctcaggtgatccacctcccttggcctctgaaagttctgggatagcaagcatgagccactgcacccagcctgtaaaaatcttacatgtcatgggaaagaggctgctgctttgtttatgactttatatagtttctgattataaaaataatacagtgctccaaagtagatgaagcaaaa

SEQ ID NO: 5202 - DNA, 1044 bp, Homo sapiens
atagtgacttgaatgaagtgggaaattagttatgtggatatgtggaagaggagcattttcaggaatggtattaaatagcaaatacagaggccctaacttgaaatgtgtttggtgtgttcagaaaacagcaagcacggcactttgggaggtcgaggtgggcggatcacttgaggtcaggagttcgagaccagcctggccaacatggtgaaacctcacctctactaaaaatacaaaaattagccaggcgtgatgacatccgcctgtagtcccagctactctggaggctgaggcaggagaattacttgaacccaggaggtggagcttgcagtgagccaagatgatgccaccgcactccaacctgggcagcagcgtgagactctgtctcaaaaaaagaaacagaaaacagcaaggaaaccactgtggttttagtggaaggagtaaaggatatgtgattgatgtagtaggataggaaatgagatcagtttgtgtaggatatattctggatatattttgaaagtagaatcaaatgagatttgctgatacattagatgtggggtatgaaagaatggaagagtcatgaatgacttaaagggttttggcttgagcgattggaaggaaattattgttttattttgacctaagtcttctgcttttcttctcttgcccccactttttcagtgttgccatttatgatagcttgctgacacttacttcccagccaagcaacaagaaaaaagttatatgttctatattttcacattccttcaaattggctgtgctagctactactactgttgaccttctagccccatcctttcttctctagaggttttaaggtttctctgtgcagtatgcttgtatcagctctaccagtggaaccgccttcaggaattattgcaggaaaccttgcaacacttttagtgttgtctataagtatgtctgtgcttccttgcatgaaccactcattcaagatggcttgtgaatccacgtaaaaagaaatatacgaagtttgaactttaggggaacattagagaaaattgaatg

SEQ ID NO: 5203 - DNA, 1028 bp, Homo sapiens
tcagagtatttttttttttttttttggagacagggtcttgctttgttgccctggctggagtacaagggtgtaagcatggcccactgcagcttccacctcctggactcaagctatcctgccatctcagcttccgagtagctgggactgtaggcacacaccaccatacttggccaaatgaaaaaaaattttttttgtagagtcagggtcttgctgatcatttgatctcgaactcctcggctcaggggatcctcctgccttgtcctcccaaagtactgtggttacagacttgaaccacctcacctggccacaataatcttaattctgtgaagtgagtagtgttattcctaatttacatttgagggattttcagctcagacttggcagaggtctaccacttactataaccctggctggtgttcaaacttaagtcattcagatatcaaacccatgctcttttttaactacgctagttataggtagaacattaaatgagatgtagattatttagcacactgctggaactgcaatttgatacatatattttgttgaaagtgggtgaatagcactagctttatatgtgagtaatcatactctatggttgggctgtgtaaaactttttattaggtgactgtacaatgtttatttcagatagtggcttaaaagccacttttgtatttatccacctgaattatgcgcctgtcagtatactgttaacagatgtcagaatatggtttttttatgtgattgcagagggagacttcaattcagaattttatccttcataacattatagtgattttaaaagttatatgcagcaaatgtgtagtatttttctcatttcaactttcacagcagtaggcaggtggttgtatccctttttttatagattagaaaagtgggactcaggaaaagttagttcacttgttggaaattctgcagcatattaggacttaaattcaggttttctgactaagaatctgatgttcttttttatttacatcatgtatattgcatgctctttatgtcag

SEQ ID NO: 5204 - DNA, 1050 bp, Homo sapiens
ggcccggccccgccgagtgcggaggagcgcaggcagcccccgcccctcggccctccccccggccctcccggccctccctccgccccctccgccctcgcgcgccgcccgcccgggtcgccgcggggccgtggtgtacgtgcagagcgcgcagagcgagtggcgcccgtatgccctgcgctcctccacagcctgggccgggccgcccgggacgctgaggcggcggcggcggccgagggggccggtcttgcgctccccaggcccgcgcgcctgagcccaggttgccattcgccgcacaggccctattctctcagccctcggcggcgatgaggcgctgaggcggctgccggcgctgcgccggagcttaggactcggaagcggccgggccgagggcgtggggtgccggcctccctgaggcgagggtagcgggtgcatggcgcagtaacggcccctatctctctccccgctccccagcctcgggcgaggccgtccggccgctacccctcctgctcggccgccgcagtcgccgtcgccgccgccgccgccgccatggccaatgacagcggcgggcccggcgggccgagcccgagcgagcgagaccggcagtactgcgagctgtgcgggaagatggagaacctgctgcgctgcagccgctgccgcagctccttctactgctgcaaggagcaccagcgtcaggactggaagaagcacaagctcgtgtgccagggcagcgagggcgccctcggccacggagtgggcccacaccagcattccggccccgcgccgccggctgcagtgccgccgcccagggccggggcccgggagcccaggaaggcagcggcgcgccgggacaacgcctccggggacgcggccaagggaaaagtaaaggccaagcccccggccgacccagcggcggccgcgtcgccgtgtcgtgcggccgccggcggccagggctcggcggtggctgccgaagccgagcccggcaaggaggagccgccggcccgctcatcgctgttccaggagaaggcgaacctgtaccccccaagcaacacg

SEQ ID NO: 5205 - DNA, 1052 bp, Homo sapiens
acaaagaaaaggaatgaagtaagttgtaaaaaaaaaagcaactggcaattgaaattacactgcaatttataaataaaactaacaacctgagtttttctttgaatattgataaaccaatagcaaatttgatccaaaatataaaaaagtacaaatgaaccatgttagaaaggaggttaagttaacatgagaagaagacagtgggaccaaaatgacctgtgcagaactgtgccatctccctgcagaggacagtgggttctgccttacccctcaaaccccagatacctctaggataggaatgttattacctctccctggcttggattatggagacctcgtgatcttttggggtcttgcactccccaccataatgcaaaccaggccagcctgaaccataaaatctggtcaagacgagaccctgtccttactaaagaacttggtttcctgtaaatctaaatatgtaaatgtacagtattagctgtagaggcagaaggaaacctgtcaaagggcaatctagagatgcaagctcagaacaccctccttaattcactgtagcacatacacactgcctgcccagcttggctgatcccagttgtggggctctttatttacccagaaaatttcttttctgtctttaatggtataagatgatgcacttgatcacttaattttctgcaaaccttggcaggctacttggctggttccttctgcacaaaatactggtataccaccctaacccctagcttctggccccaagtggatctcagtcctctatattttctaattaatatgttctctgggtgacattttaaaaaagagacatagagatttttttaattactaaggaacgtcaagtagctatataggaatacatttggtggataaggtacttagattatttcttgcaagaaaacgttgcagggagcataagaaacggtcaaaggcccaggtgtggaaggcattgaaaaagtcacccaggaatatccccaaataccaaatatattacctgaaaataataagtttacagttaattgttttcagagtttcaaagagta

SEQ ID NO: 5206 - DNA, 1026 bp, Homo sapiens
aatggctatcatccggctgctttttctgaccctctggttaaaccagatcccacaatttcagatgcttttagcttctctggcggggctgagctgacaatttgcattttcatttgccagaaaaccagctcctggatagggctttccctcgcatagcctacttggaagccagcactcccgtgtgcatgctggcaggtggcacggttgagaaaggacaggctcaactctgtgttcttttcaggtgccagtcccctctactgctcgaacaccagggctcaggccctttggaatgtgacggagccagggagagggaagacaccatggaagcaagcaggcacccgggtaataaggaactcctggaaattgacctcccttgctccccctttccccctctctgccccctcctctcccatcacttcattttattcattcactcattcaacctatgtgcaccaagttgaggtgatcagctgggtctccagatgcaggagggggtgtggtcatggttggttgtggttgtggcacctgcagaaagtgaacactttatggtggtggttctgtatacttttgtgacatatccattggtaagaccagaaagtcccagaaccacaagcctgttcatgtttaccaaaccacttgtctgactcctggttttctttactcttttggtaatactggaaattggaaattcaactcctctctttttatgtgacagaaaccaaatggcatggcccaccttccaaagtcctgggttcctataaagaaagagctctgcagaaagatggaagttgcaaagattcccccaataagctttctcacgtaagtcctttgttcataagcccttcactggcctagccaggactgatctgtctcagcacacagtggtacagcctgattcctggggatgctcaagagcacattacctcacagggctcttagaggtgaggttaaaaaaggaaactatcttcctgatttataaaggacctcaaagaaaggttgcacagcaaattagtggcaaagccaaaatta

SEQ ID NO: 5207 - DNA, 1034 bp, Homo sapiens
tagaagtaaacaaagcaaaatctagttcacaagagtagttgctgtaaaagtgtcacataataacaaaattagtttgattttaaaataaaaccattcttttgagaatagctaatttttattagggcaaaagaatgccagttcttagtattttaaaagacctttcctatatgactttctgcacaaggttggagataaaataattccacccagattctctcttcaacttaatggattgcacagatttttgccagcattctctcaaaatatgagtcatgattatgcatttatattacatgtttctttccaagcctcaagctaaattatagtgtcttataaagactacagtctatgggcatgaattaagtaggccacactactcagccatctgtcttctctttcttttttcctcttaaaaaccataccaaacaaacttgaaggccaaacaagcactggaaatgcaaagatgtctttgggttcacaagattcaaggttcacgttcctttcattcaacatataactccaggatctgtaacttcaatggtagtcagttacagttcctgatgtgcactactcaggcagctggaacctgtgagacaccaaagcctggtgttcacctgaacatccagtgacgcttagagcatcgatttgagtggaagacaaaagtaggttttcttcatgttttattatctactgtcatatctgacccttgatttctgattaggtctttggctatggggatgaatcagtagccctagggatgtggtatcttaataaacagaaaacacttggaagcaatataaatccatgaacaaaacttatagagccttggcattttataagaaaatgatgcaacccaatgtaatttgcatttactcagtttgaccaataatgtaactgttaaactcagtaaatccagagtaacttaaactaaataagagaggtgaattttactttcaggaagggaaacagagttaaaataaaggataagaactaacctttactgatgcacagagaaatcactacctcatgttcta

SEQ ID NO: 5208 - DNA, 1028 bp, Homo sapiens
tcccataaaagtatttatgttcaacctaaagccacctgtgttttgaagtcccatttgccagcctaagggaggtgacagtctagcttgtccctcagcgtgaagggaagtcagagccatttttagttttccttgtggagttgcagggaacactgagcagggagaatcccccttgagggacacttattaactgatctcgtgctgggattggatcctggagtgaattcatatacattgggaatgagtggcaagaagcagtttgggaatagtactcttcaaatggaaatgaggtttgaaaggggaaccagggtgtttctcaagcagacagtctctgtggcaaagatgaagagttgctggggccagaaatgcttaattaagatctgtcttgtttttgcaagggataatttacagccaccggtatggccctggcctctggccttcaaaggtgactgacattctatcagtgtcatttgaaggaaagcatatcaacctaaaaggcggatataaaggaagtaacaactcatcagaattatgcatgagttgttatataatgtgagtgaatttagtaaatatgtccaataaaaatggaaatgaaattccttgctgcagtgcatctgtttttttgtgatttttttcatactttgttgacatactatccaaggcatttttctatataatgcaaaacagtggaaattttctcatgttatcatgagtctaaattattattctctcatcattctataaaaattaaaactttatgttctcatctcctgttttgctgtctgttgcctggtcattcaactccctgaagtatgcagagaggagagtatggaaatagaaggaaaactcaattttgtcagtttaacagtttttatttttagatgtatatctacacacatacatatataaaataaatggtgggctgaaatctggactcaagtgagccttctttttttaaaaattttttccatgctttatcccatttattattcattacaaagcagacttttttttcttcccagcttttaggt

SEQ ID NO: 5209 - DNA, 1056 bp, Homo sapiens
tggcctggggcaactcacacactctctctaagtctcacttactctctgtaagatgggattattatatcgcctacctcctatgatttcaatgaagatgaaataaagtaacacatgtaaagcacttagaaccttctagcataattgccccacacatttaatttagaaaaataaaactttaggggctgggcgctatggctcacacctgtaatcccagcactttgggaggtcgaggtgggcagatcgcttgagcccaggagtttgagagcagcctggacaacatggcaaaaccccatctcttcaaaaaatacaaaaattagccaggtgcagtagtgtgcacctgtagtcccagctactcagaaggggaaggtaggaggatcccttgagcctgggaggtcgaggctgcactgagctgagatcgtgcctctgtacgccagcatgggtggcagagtgagactgcatctcaaataataataataaataaaactttagcatattcattttaatttctttcatatgaaaaaataaattctgattatccaaagatagtaggattgttgggtctactttctggacttactaacctaggtcatactctctcctttctctgtttcctttcttcctcctttaagccagcactctccattagcactttctacagtgatctgtgtctgtaccgttcagagcagtagccacaaaccacatgtggctattacgtacatgaactgtagtgcaacttaggaaacgaatttttccttttaattaatttacatttaattggccacgtgttgctagtggctgccatattggatagatcagctaaaccatgatctccttttaggaaaaaaagccacttacactgtcttcctctatggttaatgtgcaaaatcttgcaaaaatctttctctattagttatcttagcatttgcctccagcctcactttctgtggccttgtttcctgtatttgcccagtgtgtttataaaataaggatttaagaaactaagttttctctgtagagtatcagtcccgtgttaagatgtttcttattgccttgcct

SEQ ID NO: 5210 - DNA, 1044 bp, Homo sapiens
gacaggcctagtggaggagaggcagcccataagcacagagggtctgtctgctgcctgccagagcaccatcctacacacttgccttgtgaacagatggccaaggagtctggctggcctgcccccaccatggatctgagtggtcctcaccactcaggcaagcataggcagttgtctgtcctcaagagaaggaccctaggggacagaacactccacagtatgtccctagggctggtgcgtagagaacatttagagttttcctaaagctctgactttctgccactgcccttcctgaacctcagagtgggctcttaagcgttagctttcaagtgctttggggtgtttttctttgcttgggatgaataaattgtctcatggtttttagtgcttgctggttgaaacttgtaatggtccacaaagtctttacaggttttccattgcaaaaatccatctagaacgatgggatttatatgcttaaaagtcaagtcaatttacctaataaaggaaaaacgggaattatctgagcccatctgaagctctcaagctctgggtcagtgacatctaagaaagcaggacacctgtatcaagaacagatatgacttagaatgaagaatgaaaccattgctttgcttctgttattttctttgcacttgatgcaaatgttaattgtgatcagctctgaacttaaatgtgtccttgtcctgtcacttggacagtttgaggaaaaggcagagagagacaggctgggctgcgagggcccaagggagagggctggcatggaggcccatacgtgcacctttggcagagccccatggcagcttgggcaggaagggcatctctaacagtctccttcccccttagatagtgacgagaggctgcgagactgtggaaatgaccctgaggaggaacgggctgggccagcttggcttccatgtgaattttgaaggaattgtcgcagatgtggaaccttttggctttgcctggaaggctggccttcgccaagggagccgcctcgtggagatctgcaaagtagccgtggccactctg

SEQ ID NO: 5211 - DNA, 1075 bp, Homo sapiens
agttttatgtacctgacttcatttcactgaaactagccttgaaaaaattgtatgcgcaaaaatcaggacagcaaagcagtgaaaatgtagatgcaactgggggatagaggaggatgtgtgtgtgttaaacttccccaactggaaagtaaaagaaaagtccctgtaagttgaggctatacattccaaactcgagaaagctgggatttgtatctgttttgttccctgaagtgtccctgtgtgcccagaacagtatccagaacatggtaagaagtcaacaaacatttgttgaatgaataatgaatgaatgagtgaacctttcttaggagatagagaattaggcaaattaatgcatgtaaagcacttaaaatagttccaggcatggaactaagttttagttgttactgttttataattcattagatatagagccagtcatattttggatgacctaatttgcattttattttcctgtctccagtcctaaagatctattatgaaaaactaagactctgaatggttaagaaagtgagagactaaatttatcaattatttcagaaaattattttttgacatttaatattttgcaatcacaggttgtcatcagaatgttctgtttgtggataaataatgccacttgcaatctggggacatgtgttttccaaatttgttaatgagttgtattgactccatttctctcaccctcaccatccatgcccacaaattatgttaataccaaaggtagaaatgtctgaaatgaccagctgggttcatgagtgcaatttgaagccacaggacttagcaaagttaactggcccctacatgaattgtgcctgtaaccttggcttcttacactacagttggtgaccatttaactggtccagactcgtccacatcagatctaatttcttgtgttccttcttgtaataaatcaagctggatgccaattccaagatgtattaaaagtcttcagagagtttaccacagttgcaaaagagctttaatctttggaatggtctctgactcttgcgtagaaaaactcaccagaccaaaagaatgataagaaaccctgctcttg

SEQ ID NO: 5212 - DNA, 1885 bp, Homo sapiens
agccaagagaattaaaatggaatgttactttctaagaagtcctttgaaaataacatatatgtgtttaataaatagttaaaaggaatttttttttggcggggctgatttatatataactttttggatgaatattctctccatctgtaaattaatttattggtaactatatgtaaacactaagtattcgccttattcatgaaaatgccttttatgaatgtcttttggagcatctaagaactctataggatattttttctaaagagttttcaggtctgtttctgaattggatatgaatattagaaagacatactacagggttcagaaagaatataataagtccgtgaaggttgaatgttttcgtgtttttaaagtaaaaatttagatttttagattaaaaaaagattaacttaaaatgactacttagaggtttccccaacaaacacaatggaataaatgatgttaacaacactgtttcttgttgcttaaaaagtagagaaataagactgtatagatcaagaattgacaaagaaattgaattccatttacattttcctttttgtatatctttttgtcttcattatccatgtgcaaaaagtcattcagaactttactccaaaattacttaactattttatagtcagcaggttagtttcaatgtgtgaaactcaatctgagatactcttattgataatacagatggagtttgaatttacaaagaatcattctccttttcaaaagatgaacagttttatgattaataggggttcaaatgtcatagttttttaacatatatgtcactggataatattctgtaagtgatcacattcattctccatattcttcattcatgggatgtatcaatgtacttcctgttgaaagaaaaaaattaattacattcagggaaagacatattcaaaataacattttttgttctcatttccatattcaatcaatcctatttcatttttctgggttctggaagatcaagtgccaagaataactaagaattaactgtaaaaacacacacacacacacacacacacacacacacacacacgcacacacacacacagatgcggccaggccatctgccagtttgtcacgcccttcagataattgcacccagacctggaccagcttctcttctccactgctcacctgtgcacttggtggcaaaaacacttcgctttcagtggatcacctaaatccacactgtgagggcaagaacagagaagaaaagcgaggaaactaaaggtgcagtagaaagcggtggggaaggaaaggagcctctcagtccacagtcctggagcgggagtggtagaaacagtgcttgatgaaagctggatgggcagcatccagatactggttgggtagagcttggtgttttttgttttttgtttttgcaacagtaaccttttaaatatcgaagcactaattttgtagcagcttaccttgcttctgtaattcatctttgttttcagctgattccacgggcacgcactctctctataccacatacaaagactacgaactcatgttccacgtgtcaaccctgcttccctacatgcccaacaacagacaacaggtatgtcctccccagcctggagctttttacgctgagtatgaaatctgaggtgggcccactgatgatattgatgcatgtagaacttgcaaagaatcagtgagggtttttcttgaatagcattaatcatctttgactctttgatcatttggaagtatttgggctttaaagggcgtattgttgcacttttttcgtataaaacttagaaactcttctgcactcagatctattgcttgctaagcaaaatcttttctcaggagaaacttgtctcaactatatgttaattacgaaaaggccaaccgt

SEQ ID NO: 5213 - DNA, 1074 bp, Homo sapiens
taaaaatctcttatggcccttttcctgaaccaacatttattcttgtctactatgtggaaggcatcatgctgacagatgggtgtgaacagcaagcgttaggaagattgaagctgactaagacctagtccctggcctatgaggacagtaagactaagagcagaaaggcctctccaaggcagaatctggtaagagatcttggagaggtgtaaatgtagtgagtaccttggggaaagaagaaataacatctggctgggcaactctcctgaagaggtggcattttaactaggcctttggacttggatagaattctaagagggagacatgagtagttgctgttttaggaactatgactagtttctttacaaagagaagagaggtggtgaggtggggtggggtaggggaagtaagacgagactagaacaaatgagacctggtatgctaggccaaggagattgcccttgattcaggaggcagtggggagccattgaaggttttccattaggatgtgacgtgatcagagctgtattttaggaagattattctggtagaagggaattgtacaggccgccgaagatagagactgatggctatgtggagatcaattatgtgattattgacattgtccaggagagagttaatgatgaacaggattgagatggtggttcagaatatggaaaaaaggtctttaagtttcaggtgcaaaataactcatagaggaaactgagcagtacatgctcaagtgcatgcaacttattttaaaccagtggatttgtttgtaaagccatgattttaaaaagacagtgacaatgtatatttttagaatttcccaagtaggattcttctgcatgttttagagggaatatgaggtatttcttggttgaccaaataatactgtggttaaagttgaatatttggcaccgcagatggctagaattctaaaagtgatgaaactaattggtctaacaagttaacactgcattattagcaaaaagaagcagatattgtaacactcagaatgaataatcttgagatctgtctcaggaatgaaagctgacatattaaaaaaaaaaaacc

SEQ ID NO: 5214 - DNA, 1033 bp, Homo sapiens
gaacatgtgtacccctgttcatcttatctagtacgtaggtgtcccagtgacctaggctctattctaggtataagtgagataaagcccctctcctaaagtgacatattttaagttatagacctatgctgttcagttcagtagtcactagccacaggtggctacttaaattaaatttaaatacttaatttaatttaaatgttaaatttaaaataactgaacaaaattagaaatccttttccttagtgacattagtgatttcgagtgtttaatagttgatgtggctaggggctcctgtattagtatagatagagaacattgtcctcgttgcagatagttctgttgtccagtgttatggaacattatgcaaacgttaggtatccttatgactgccatcaccccagctcctggtgttagtagtctaaggactcttaccagagtcagagagaggttggattagaaccagttctcttgatttatggttctggggttttctctctcatcatattagatcttaggcacgtgctccaaatattcattgcatgtttctgtggtgaatttgaggacatctaaaaagtcatgagacaaaatttagtggcaattttctcagccctgaatcaccctgcccatggataccactggctgctgctcccctgttcagcctcgggaatggtcattatggaaaattaaatgtaagataagaaagggagtggaagaaaagaagatggagagatgggagaaagggaggatggaagaagggtgatcatggtcaggtccaggatcatcatgtctggtttcctctctgtgtgaaccttctcatgtgggttcagagttgtaggaatgtcctaattttcatagcattgctctgccttgcttcttctcattcttaggcatacatctgctcatttccattccgcctggcttgttcctgatctttgtatactgttactgtttaaagactccttgagtgttgattttgtttccttaaatggaacactgtcgcccctttcactacactcagaaagagccttgcttc

SEQ ID NO: 5215 - DNA, 1522 bp, Homo sapiens
ccttgtctctgacctagcagccaaatctcttctcaccagattccttggcaggtcctcagtatgccttcccaggcagtgtgtgccctttgctctgtcaaccactggaatccaagtttcagagaattctcacctgttttagctacagaacatatccctaaggagaaagtcacttgagactctaacatttctaactttgatggaacattaaatctcttttatgagcagtctgcctcacttatatttctgttttaatatgtaaaaaatcagtaggcctaataaaaatgactaatgccaattttttgttgcttttcaacattcataatacatacctcacaaagtaacttgttaaaagacatcaatgatagagtacagaattccttactgtgaggcacggtgcatttgatgtgaactgaatgtctggcattcagttgcatttggacataggctcatggtatatattcatattcaagttaaatgtaatttctttagatgtgtagcaattaatattaataatgacttggcagattattcttttagaacctgggatagcatttgtaactgaaaacttttctagagaattttacttttctttttgcttaatttctagacatttggcttgagaaaactgcgattttggttttgtagtgaaaccattttgccaatgaagaacattaaaattccggcttctgtttgtgtcatatttcagactaaagacattttacaatcaaaccaggaacatgtgaaaatagagatttataatggaaatgttgattcaatttgagctgaagccagacattcatgaaggaaaattagattaaacagtagatgtttagagagactttaaattatgacagctttaaaaaaaaacatatgttgtggatgtttcttaggcatacgcgtactttctctggcagactgggaacctagctccttgatgtttcagccgtttattaaattcccttttatctttctttggactagtggactcagaacttacacagcttagagtctggtgattgggaattgtatcttgtacattactgtaggatcaaaacctgatgttgtcagtggaagtaattctgtcctgtcatagcgtattacatttatgagtagaaattgccattttagattgtgagtataaagctaccagttacaactgatttattccatttgtcaaagcctaacagatactccatgcaaataatttattttcatatactgttcagatagcgagggaagtgcttgaaattgtgaagaactgggatctgtgtcaggggagcagtgttaacgggaggattcatgaggctggatgtagatgctggaatgatgagtctccccagaggtccagcaccaaaggactcacccttgctagagtcagcaagaccccgccatggtggtgatatcccagcctcaggcaggcatttggggccagtgggacacagtgtgctgctgacactcctgcttatcagatacatggtttacaaatatgttctcccattccatgggctgccttttcactttg

SEQ ID NO: 5216 - DNA, 1043 bp, Homo sapiens
attacaaacattaagagaattatatgcgaattagaaaactagaaggctgtgtatatcaaacggttaataatggttgagaaaagtgttttccttctctagactgtttgaatttttaaaaaacaattatgtttatcagagtaaaaagctatgaatttttcagcttgttagtaggaaaaacagcccaagaacaagaggttagaagaaatagacaaaacttgtagcttctgtaagggtggtagtattacgtgtgattacatatttattcttcagtcctatagttttgtaatgtaagtagattactttcataattaaaaacaaaccaagccaaccatggttcttctagagcacttaggcgcccacacggagcctcatagatacatgagtcaagtgcttgaattcaaagttttaagccagatatgaaaaacaagtaatgtgtataatagaaagttagaaatcatatagtcagtaagtgtagcttgtttgtggccaggtttaagtccatgtgaaggctgtgctttttccgtgctatgctacagggaaccttgtagaagagtttacgcttacggcattgctgagtagtctggtaaaaattaaggcattaaagttgctatcagatttttttaattttaaaaaatattcttacaaattgaaatatcttattttagtatgaggttggctcctctggtacttctgtaaccatccaccgctttgcctggttttttcctcaggaagaaaaggcatgaaaatgagcagacagttgtgtcactgggcctgtcccgtttacaggtgtataattcctgttaacgcctttaaaaagaattcatatgctggattcagagtgtggtagtctttgtgcccatatacagtgaccccctgctttagagaagaggggatctgctttcggagcttttttgattgtgatataacaatgataaagttttaggcacctggtgcttatctgtctttttgtgcaagaagacttggctgtgttgtgcgttaggtatcttttatttgctagtaaaataggtggctgcagggcaggg

SEQ ID NO: 5217 - DNA, 1389 bp, Homo sapiens
gatgtgttgtggggttaagatagtgaatgatttgcatagaaagaaacacacaaggagtttttttgtaacctttgaccaaagttaaacacctacccctgctgtatgtggcttccactattgaaaagcgcctgaactctcaagagtccgttatggcttatcttaatagagagactgataaccacattatggggtgccttaggtagaagcgaatgccagaaatggagcccaacccctggcaggcgttcactgtatgttatatcttcctatttgtcctgtacgcctgctgaatttgtgatagcaatgagaccggatccacaaacattgtcaccataacctactgtggattacacaggcgctgtgcagtgtcagcctctcacctcctatcagtattttattgagctgccttcatgagtttttgttaatcctcttttgctcacgggacacaggtaaaaatttacttttgttgggtgtgggatttcttccacatggcttctctctccattcttgactgttgtcccagagctggcctgtgtctcctggtccaacggattgcctccatcctgaaaatctcaaagactgcaaaatccttgagattttgatatctgaatctaaaaaatagagggaaattaaatgagctttccaagaagtgtgctttaacttttcctgggtaaattgtcttatctttttgcagacttcagtctgaccccagtgttcactaccttggagctcttccattttttttttttttaactgtttgtatgagaggataagatccctagttttacaaagcaaagttcaaagattctcaagtgtgattgataacagctcccgaagacacataatttcttttggttttatcttgtttctgtctctgtttgtttttcccggatgacacacttatctgtctggtttctccatatctgaacggggtttatgtgccattgatagctgccttttgaattgcgtggattttgtttccatccttgtctgtgcagcatcagagcacatttgtagaattatcagctggtgtgttaaactgcactatggccataccttatcgctaaagggagagaagaagttttgggttcactttttcttttaaaaatgtaattgagataattatttggttatctttaacttaagcaacagcagcagcagcaacaacagaaaacctgacatgccaacagatgagatagatgttgggtaaatttgaggggcaggggctgccagcaaaacccttgatgagagaagcttagttgagttcagttcattcctctgtaagttttgtaacagacagaaaggtaagcttttatcacagtgtacacattaaacttctttaaacagcttagtggatcctgagttcttgctacagatacttcagaatgtgtg

SEQ ID NO: 5218 - DNA, 1026 bp, Homo sapiens
ttctgggatacaagcacagaacgtgccggtttattacataggtatacatgtgccatggtggtttgctacacctatcaacccgtcatctaggttttaagccccgcatgcattagctatttgtcctgatgctctccctcctctcatcccccaccctgagacaggcctcagtgtgtgtcattcccctccctatgtccatgtgttctcgttgttcaggtcccacttatgagagagaacatgtgtacacttattatttattacttctcccatctatattaatatgtattaatttattaatacttctgggagaagagtaatacttctgccatcctgtccccacaataaaaacccagagtaagaatctcttttcagataaatatattgaaaaaaggaaaagtaaacgctaaattaaaattggggtttgaggagtgttaacatgtagcttttaactttgtactttcttatgatctcatctgatggtttcttgtagctgcctattgtggcctgattttcattctgtccaggagtgctctctagaagggtggcactcctggcctcttggtggcccatcccttgcaggcaggcttcatgcttgatagtgaccccctccctcctggtttttgttttctgcctctgtggcctgagcagtcgacctgatggggtctaaaaaacctttcttggccaggagcagtggctgatgcctgtaagaagttgcagcgagccaagatcgcaccattgcactccagcctgggcaacaagagcaaaactccatcatacacacacacacacacacacacacacacacacacacacacacacacgaaaaaaaaaaaaacctttgtcgttcagtctggccaacatgatgaaacacacacacacacacacacacacacacacacacacacacgaaaaaaaaaaaaaacaaccttcgtcgttcagtctggccaacatgatgaaaccttccttggccaggagcagtggctgatgcctgtaagaagttgcagcgagccaagatcacaccattgcact

SEQ ID NO: 5219 - DNA, 1039 bp, Homo sapiens
agagaattagcctgtcctttaaagctttgaatccaggcattgacttcccctctctagctgtgaaagccctataggacgtcttctaatagaaggctgtttgatttacatagaacatttgctgtttagtgtagctctccttgtacctcacaaaccagcctctgctacctgcagacttttcttctgcagcctcctcacctctctcagccttcattgaattgaagagtattagggcctttctctgaactaggctttggcttaaggaaatgtggctggtttcatcttctatccagaacactcaaactttccccgtatcagcaacgagattgttttgctttcttatcatttgtgtgttcactgaagtaccacttttaatttccttcaagaacttttcctttgtattcgcgacttggctgtttggcgcaagaggcttagctttcggcctgttttggcttttgacatgtcttccccattgagcttaattgcttctggttttttatttaaagtgagttgtttgactcttacttgaatacggagaggctgttgtatggttattaattggcctacgttcaatattgttgtgtctcagggaatcgggaggtctgaggagagagagagaaatgggggaggctggtcggtggagccatcagaacacaatatttatggattaaatacactgttttatatgaatgtggctcatgccaccctagaacagttacactagttccatccaagatcgctgatcacaggtcaccataacaaacataaaagtaatgacgaagttcgaagtattgtgagaatcacagtgtgacacagaaacaccaaatgagcacttaaaaaatggtgccgatagacttgctccatgcagggttgccacaaacctccagtctataaaagacacagtgtctgcaaagcactgtaacatgaggttcaccttatacctagtactgtgtctgagtccctgacggtactagacgtccactgatgttacgtagattgagactgttgtgcaaccatcaccatcatccattttcagacctct

SEQ ID NO: 5220 - DNA, 1024 bp, Homo sapiens
agactgggcagtttacaaaagaaagaggtttaatggacccacagtaccacatggctggggaggcctcacaatcatggtggaaggtgaaaggcacgtctcacatggcggcagataagagaagagtgagagccaagtggaagggatttccccttctaaaaccatcagatcttgtgagacttattcactgccacaagaacagtatgggggaaaccgccaccatggtttagttatctcgcactgggtccctcccacaacacgagggaattatgggagctacagttcgagatgagatttgggtggggacacagccaaatcatatcatccatcaaggacaataagtgaggtgactgatctcttcatttattttaactgcagttatgtggtaagatgacagctagtaagtacagtgtggggccactgccttgctgtgtagtaaggtacacacatttttacatgctgttgctcttgtactgttgatgctgtacaaaaaggcaaataacagctttagaattctagtttgacctcacagatccagttgaagagccttggggatcctaaggggcccgtggttcatactttttgagaaccacgactttaagacatacaggaaaggtgctaaatgagacagaactagacttgactcgttatgaacttagtattacagaaatgggtcagatacctcatacgtgtggtgatagacgtgtggggccatgtgggagggatgtgtaagagagttcctggagtgtggcactttgactggggctgttgactcctgtgtcctgaacatctaaatctgtacctggtgtatcagttcatactttatgtagcagtttgaataattagggcaagtgtaatggctgcataaattcattagtttttaaaaagtcaaatgggttttgtgttcataataaagattagtcaaggtaatctttttgtagtataaaagtaataaagttgtgaaatatagctgcacagcccctcccatcccaccttcctgtgataccgtcatcctcagtctccctac

SEQ ID NO: 5221 - DNA, 1049 bp, Homo sapiens
cttaaattccaaatattcctaaaaccctaaaaagggtttcattttcgaatgagcattggaagaaaatggtcatttgtagcacagactctacctaaacatagtccaccattccctccctattgaaagttagacagttcatatgaaagtcaggaatctgaaatcctctttggttgggggagcacaaaagatgacttttgcagacccagagcagagtttgagtcgggtggaatgagattagtgtgctggggggaacgtccggacccctggccttctctcctttgtgaggaatgtgacagctgaaaggagtcagaagccgcccggtgcagcagtgacagcccagcagtgacagcccagcacaaagggtggtgtgctttccgacctctggccgccctttgctagaccttcaattgtagtttggggcccagactttgcatttttctcttttatggcttaatttaattttatttcaaccagtttattagagtgaaggccttctttgttgccccgaggctttgtgcccattggactggaaattagatgagctgggggtaagtattctttgtatgcatgagagagttggtgactgggaagacactgagggccagacctcactagccagtggaccaatgatttcaacctagcaacatcacttattactaagggaaggggcagttgaaaagtggtaagcaaggtaagtcatcactagcagctagccacggttgtgtagctgttcctgttcctccgaatgggcaccttggctgtgtttcttttgtgccctctcaaacttggctccatattggaatcactgggagcattgacaacaacaacaaaaacagatgcctgggcccctgcagagcttctggtttaattggaatgggtgcagcctgggtgtgggcgctgcagatcttcaggtgatggtacagtgtagccgcagtggaacaccactggcctgcctgagacctgaggtgcttgggcattacctgcaggctttataaaaaagttaaatggtgttagaatatttcaggggaggttctgattagatctaagaa

SEQ ID NO: 5222 - DNA, 1029 bp, Homo sapiens
ctcaaactcctcagcttaatcagcaatccttccactttgtcttcccaagtagcagggactacaggtgcgcaccagcacacccggctgattttttttttttttttttaacagacagggtttcactatgttgcccaggctagtctcaaactcctgggctcaagcaatcctcctgtcttggcctcccaaagtgtcaggattacaggcatgagccacagagcctggcctacaggctgtctttaaaaggaacattgactaagcagagcaagcttctctttgggagccagataatgaaaattaagagatcatggccaggctgaggatgaggacacaattattggcaagcttttgttagtttcacattcagtcttggctcacatgcaggtgtgccttcctttaagaaaatgtggagaacaggttttaaaagtgaggtgtgtatttcactttcgaagtgttctttcgggtgcctcagactcagcctgtctaaaaggaattcctgtgtggggttctgattccacctctgaaattgctcaggtctccactgtcactacagggccaagatcagcctctcttgcctggatcacagtaggggcctgagtgattcttctgagtccagatcaaatcttgttacttttttttttttttttttttttttttgagacagagtttcgctctgtcgcccaggctggagtgcagtggcgcaaactcggctcactgcaacctctgcctcctgggttcatgccattctcctgcctcagcctcctgagtagctgggactacagacgcccgccatcacgcccggctaatttttttttttttttttggtattttttagtagagacggggtttcaccgtgttagccaggatggtctcgatctcctgaccttgtgatccgcccaccttggcctcccaaagtgctgggattacaggtgtgagccaccgcgcccggccaaatcttgttacttctttaggttgatgttcaggcccctgagtcccaccatagaggctgctgtcacctggcctctaccagtt

SEQ ID NO: 5223 - DNA, 1029 bp, Homo sapiens
ctcacctctcatccaggttggctttgctgcttctctgcctgtgcacaagctcttcttgttgcttggaatgcccacctccttgtcttcagtcttgcctgcactttctctctggtagtgacttcccctccttgccttgtagcatttgtttactaggccaccttctccatgcgagggcttttctcaagggcatggtcttcaaaggtttttgtctttgcaccctctgaaataatttttaaaaaacatatactccttcacatgcttgtaaggtgacatcccatattttaaatcataaataatagtatgtttttgttaatagcaagtaggaattgttaaacatattatgagatgaaaataatatgaagattgacttagtttgatataccttttacaatagaatttgagataattgattttatctacctggttgaaaaatgtactgtaaagaatacaagtaaaattgttacctttgacatttctgtaacttggcttgaacattttggcgtttggtgtgttgggggtgtggaatttcagaaacatttaagagcatctatgccattaaacctgtatgtcttcagtttttctgaatccagaacatccccaaatgggccaaatttcacccataacagaaatgtgttgaagacacataaaaactggaagccatatggattcaagggaccatgggctataattaatcatcaaagaagacatcttgatgatcagtgttttgagttatcctttgtttggtgccctgaggtgttttaaactttggaagaatgccccatagtaagatttcagggagagtggagctgttgcaaagacaggaatgcccgtctgttttcagaaagagttacatagggaaggtgagggtctcaaaattgattctgtaggaggattgcttgggcccaggagattgagactagcctgggcaacataggtgttagctattagctctccttgaactgggcacataggctttttgagtccctaaagttgaatgtctctgttggactactgcaactgtaggatgag

SEQ ID NO: 5224 - DNA, 1060 bp, Homo sapiens
tataaaacatcactgttttaacaccatcctaatgatcttaattagtcatgtgactcaccatacaagttcaacaacatccaaactggtttatggctagttcgatgtgggtgattatcccaaattaccttttagagagacaaaattaaattgtggaaaacaaactattagaaaagaggttactttttttttttcttttttcacagctaattcttttctaaaggaggggatgtcggttaatattagatacgtgtttgactttaagaagaccggcctattgtgagtaagtagctagattgtgaaccctttggaagatttattttggggctgtgagttgaagatggagtaatggaatcttacagtcccaggtaggtgaacctgcctggcacttgcttggccactgtatgtggtttcctctgtggtgtatttctcgcccatgtgcctctaccttagttggagtgcttatcagtcttctactgtgcatggatctcctcgtgtttgtaatatatgcagagatatgggtgtgcagcacgcagagaaacatctttagtaactcgagtaacttggcaacaccaaaatgctaaaataattttttattttaatgagagaggaggaccatgttaatgtctgagcttgtactcagagggtagaggaagagacagcattgaaaagagggcaccaacctcttgattccaacccattaatttgttttctattatttgagagttgttactgcatttgcaggtggtctttcctctgcagcagtccctcactggatatttgaacccttgtgagaagctatccctaaaagattatctgcccattcctctcaagaggtgaaatatggggttgggtgcagtggctcatgcctgtgatcccagtactttgggaggttgaggcgggcagatcacttgaagtcaggagttcgagaccagcctgaccaccatggtgaaaccctgtctctactaaaaatacaaaaaaattagtggggtgtggtgatgtatgcctgtatttccagctactcaggaggctgaggcatgagagtcgcttaagtctggaggtg

SEQ ID NO: 5225 - DNA, 1035 bp, Homo sapiens
atttcggctcatcatctgcaagagagagccgaggcttctcggaaagagagaacaacttggcattacccctgtgggagatatttgtcatcattaacctgcttgagttaaattaattcagcccaagatgactctggcctgagtattggaaaaaatcaagtgcattggttacggaattgtgctcaccaaaacatgattttggtcaaaacaaaattgtagacattttggattttggttagattgagactgggttttgacaaggatggcttttttttaaaaaaaacaaggaaaaaaaccctcaaagaatcttggtgattctcatgtctttgcccagtaagttcaaaatagtcgcacagatttttcttttctttgcctcttttgtctgcagtctccattctaaacgttaacactagatggctttcttatgacagacatttagtaaactgcccatttgagtcgcgtttgtgtgcagcctaggttgtaatttttctagtgttacaattagtaattgaagaaaaaagatctcccaaactgttgctttttattgctttcctagaaaacctacacataccgatatttttgcggatattgagaggtggcctattatttttggcattcccaaagttgaatttcaagagacaacttggttactgtatttagttacatcatttaagaatgcttgtttcatgtttggacttatttaaagaattcagagttctgttagttttgtcattctgtttagacaatatttccagttaaaagatgtttaccgcttgattgaatttcactgcttgattcagagttataagagagtattattcatgagaaaaatgcagtctttcttaagttttgggtataaatcacattgattcttcctaaaagattccattgatccattttgggaagagatgcagttaaagtatctgcatgattcataccagggattgtgttagggacatctccccagaggatgtttgattttttcatttctaagcacaagcccttttatgacaagcacaatagcccgtagtttcagca

SEQ ID NO: 5226 - DNA, 1035 bp, Homo sapiens
cagacttttgcctgaacatcaggcatttccatacctcctctgaaatctaagcagaggttcccaaagttccactcttgtcttctgcacactcttaggcccaacaccacatggaagcagcaaaggcttggagtttgcaccctctgaagcaatggcccaagctgtactttggccccttttagccacattggagttggagtggttgggatgcagggcaccaaatccagaggctgcacagaatagtggggtccgtggcccagcccatgaaaccatttttccctcctaggcctccaggcctgtgatgggaggggcttccgtgaagatctctgaaatgccctggagacattttccccattgtcttggctactaacattctgctccttgttacttatgcaaatttctgcagcgagcttgaattcctccccagaaaatgggcttttcttttctactccatcgtcaggctgcaaattttccaaacctttatactctgcttcctttttaaacataagttgtacttccaaaccatctcttcatgaacaaatatgactgaacactttcagaataagccaggtcaccttgtgaatgctttgctgcttagacatttcttccaacagataccctaaatcatctctctcaagttcgaagttccacagatctctaggatgggataaaatgccgccagtctctttgttaaagcacagcaagagtgatctttgttctagttcccaaaaagtttctcatcttcatctgagacctcctcagcctggactttattgtccatattactatcagcattttggtcaaaaccattcggcaagtctctaggaagttccaaactttcactcatctgcctgtcttcttctgagccctccaaactgttccaatctctgcctattacccagttccaaagttgcttccacattttcaggtatctttatagtaataccccactctgctggtaccaattctccatattagtccattttcacactgctataaagatacaacctgagactgggtaatttataaagaaaggtt

SEQ ID NO: 5227 - DNA, 1045 bp, Homo sapiens
aggagctgagaaagttccccgccatgacgtggaagctgcaggagaagtttgtggggcagggagggagggtggtgagaatcccactgtgaccttcttgaaaatgacaatcattcaaaaactttttaaagtctttttttgacattatttcatttggtcacaaagcagcccttgatgtaaccagttggcaagaggcaatacaaatttagaattctagctttaagaaaaatgttatgggggccctcctcctgttaatatctctaccactatacatgcaggaggatatcagaaggggctaccaaggaagctcgctggggctgagccctgtctcacacatcttgtgttcccagcctgtaatgcgcactctgggctgtggaagtaaactgctcagagctcagaaatggccatatctgatggtctcctttttgtagccctgatcaattcaggaataaccttatgtgaccacagaaggaaatacattttctaataatccaacatatgtatcccaacgtttgtgcctataagtcccatctgcagtttgaaaagcacaggctaagctctatctatgtctaagaatgtccactttgtgagtgagagcgtgattgtgctttatgggtgggtggtttgagctttgtcccttctctaacatcccccttggtcacctcagtgctaggtatatgcagaacgccagctcagtgcctggcatgctgcaatggctaatgaaggcaatgatccttttaaaactcagctaaaatatatattcagcatagttttaaacatttacaatgttttaaatgtaatcatattgatgaaattttggatttttttatgaatccagttagattcctttttgtagaatccaatttgattattgggaacaaaaactgcggtttgtttctcaaagtactcatatcagttactagaagggaaattgaaggaccaagaagcccaatcttgaaaatgtgttgtgcgtttcgactttaatggcaatgttctcaatggaaggttataaatcatcccaaccttttctttcagagcagcttttctg

SEQ ID NO: 5228 - DNA, 1919 bp, Homo sapiens
gttttctctccccttttctttgtcagtctggttagagatttttcgatgttattgattgatattctcaaagaaccagctctttggctctttgattttctcatttatttttcaatttcactgatttttgctctttatttcatttcttatgcttgctttgggttttctttgctcttctttttctagattttttgggtgggaccatagactatgaatttgatacctttttaatgtgtatatttagtggtgtgaatttgtctttcaacacttctttagctatgttcgacaaatcttgatatctttatttccattttctttcagttcaatgtatttctatttcttcttttttcttttttttgtgtgtgtttccatttctattgaaactttatctttgacccatggtttatttagaattgtgctgttcagtttccaaatgtttggatattttcctgttttctttgtgttatgtatttctagtttaagtccattatggttggagaacaaactctgtatgatttcattttttaagaatttgtggagatcattttatgtcccagaaaaatggtctatcttggtacactctctgtggccactataaaagaatgtgtagtctaccattgttgggtggagtgtgcagtaaatgttgaataggtaatgatggttgatagtgttactgagttcttctatattatcgttgattttctgtctggccttcttatcagtttgttaagacatgggtgtttaagtctccatctataattgtggatttgtctgctttttcagttctatcaggtttgggttcacgtatgtttcagttgagttgtttgacttatgcatatttaggactgatgtgttttctttgtggatcaaccgtcctatcatacaatgttcgtttctgtctttggtaaacttctttgttacggagtctactttatctgatattaacagccatttttgcttttctttgattaatgtttgcatagtatatatttttcattttttattttcagttgggctatgttactatatttgaagtagtaacaatatttgaatttcttgtaagtaagaatatttgaatttcttgtaggcagcgtaggtcatagtttttcatctacttgctaatttgttctggtgtatttatgtttggtgtaattattgacatattagggcttatatctgttactaattttttgttttgtttgctctgtttgtaattttcatttgttttttcctgattcttgtatgtttcttgaacatttttcagaattctattttgatttattaaataaataatatatttttgagtgtatcttttagtgtttgctctaggtattagcattatatataaataattgttcaaaatctactggtactgtcattttacctgttcaaatgaagtgtagaagtcttttcatgtccatttagcttcccctgcttgtaccatgatgtcatgaatattttctgtatatacacttagaactatattgacaactatataatttttgattcagacattaagcataatttagaagacacatgaggagaaggacgtctattgtatttacccatacttttgcttactgtgttttttcttccttcctgatgttttaagtttcattcttttctttctttctcttcttttcttttcttagaggacattatttacctattatttcagggtagaacatctgttgacacattctcttagtttttcttcctttgatacattctgttagtttttcttcctttgagaatgccttggaatgaaattttcttcattccaaaaggatatcttcactgtatataggaatctaggctgacaattattttctttcagcacttaaaaacatattgtgctatttcttcctgacctctatggtttctaataagaaatctgcaataattcagaatttttccttttt

SEQ ID NO: 5229 - DNA, 1032 bp, Homo sapiens
caaataatttaataaatcataaatcaaatgaaaaaccagaaatcatgtttgttgacttacagctgcagacttgttcttgggcactccccttcccctcaccttgtcattagtgcagtgtttccaagccaaattattttacatggggtaccatatcataaaaatgcaaacatgagatgtcaaacttgcatataataaatttcttcatttataagtttagtcaaggtgtaaatgatttgacaaggtgtctcaagatgattgtagaataagaagtgtaattttagttggatttgatttggtaatagattttaagatttaaagtgagcgaagtacagtgttacacttttaggagtgaaggaaatagcaaaggaaaagtgaggtccgtctgagcaagaaacgttgctgtgtgattttattaacgccaaatccctcaactagaaaactgcaccgggtataatgggcattgtgttcagagaatgtgtcttctcaagttgctgcctctcccgagacaagtggctacaaaaactgaaggtcctgacttaactcatcacagctgagtgtgtcactgcacaaattactgcagttccattgctaaagatcatagtttctttttgctatatggggaaatgcatgtcaaaagcccggttcatcttgatccaaatcctgtatacaccacaggtaacttatgaatgaaataaacatgtcttcatccccaggagaagtttcactcacaactctaaataaaacactcaaataaatggcattggacctccccttttaccagaagaatgtaacagccagaagtcgaaaccttaaatcagtcaaattaaacttgggggaaaactcagcagtactctgataatttaatctttatgaatcacttaaaactgtctgcctcttcatttattcaatttcccagttggctgactttttgcccaacagcaagcaacttggattttttattactatttttattagttgcatttgcagaaagagaagaaacacttttcaccccctaaatatttatgactttcc

SEQ ID NO: 5230 - DNA, 3393 bp, Homo sapiens
agctctgcctggtgtctttattttaattccaggcaacaatagcaaatgcagtgtataatagtgctttgtgtttatacatccccgtaatgtcagagcattttagaaagctttagaaatacattctgatattatgatttatcatcctgctctttgtatataaacagtcactaaataaccaaactttgtcattaacatgaaacaaatgtttaggccagaaattacatgatacatgtgcccagttatctcagcaaacatctttgttctaaaggagttgactattttcagctttctaaaataatgaaaactcccattaacagagattttgttttgatatgtcagaaaccctctataaaatgtaaaatacattagacctacagcgctagatgaaagggaaataaagctttcatgatggttacatatctagaattctatccagattggttttaaaatgttacattgttctgggtgctatcctttatggcaaatgtgtattaagcatcatctatgcgagtgtactgtgctaggctttacctagcaggaatcactctgtgtgactggtctgcaaaagtatcaactctgcatctgtatccttggacctgcctttctcagcaagaaataattggttctacttaatcctcatctcttactgaggcagcggtagaacatcagaaagcacaggctttgtgctttgtggttggtcaaaccacaattaaaatcccagcacatacgctcggttaggtgtttgggacgttactttgtctgtgagcctcagttaactcatctgtaaaatgagatgatcactcctcagaagtcatacgcaccaaaagagacatggtttgctgtggtaaatgtgtaagtcatttctatgtacaacataccttatccttattcctgaccccatttcattttcctttcctaaatttctatcttttcttattcagcttttaatctagttgtaactaaacatatattatgtatccctgcaatctacctgaagtcctttctgaaaccgcagaaggccatcaaatcaacaggggaaatgacacatcatatagatcgtgtaccatcacatccatagccagcctgctgtgaggtgccctataaatattatttttcccttcaggcaccgtgtttattttgatacctgggccagtcactgagctccagttctgttcttcgagcatcacagctgcctttatggaataataggctctctaagtcccacggttttatggtttatctaacaacaaaataaatgataaaaatattgtaactagtcttagtgagctctcgtgaatctcactgtgttgttttccagcgccttgttggtttgtaatatagacataagtatagcacggacccttaggaattacggtagcccctctgtgctctggaccatccagcctcttctcgctgctggtggagcggatcttgtgccttgctcggcagcccctgtgagtgctgttacagctgtgagctcttcattgagttgaatcggctccttgtgatatcacctggatacccctgctgacacagcatcaagacgctgagtcctacacctgctgctctttaccagtttggaggcagctctccttcctttgccaccctctttttcaggccaaatggtacaaactgttccttgtgtgaaatggtctagaccttggaaatcctagtcggcctcatctagatgttcagtggattgcccctaaccctccccaccttcaccttgctccagaggtcatctaattggttctcagtagaaggacctattctgcaaatcaggtgtcctgctatcattcatgcctcttaaaatctaaaatgtctcattattttacaaaatatttgctgagctgacccttcttcatcctgatcttatgcgtgagtgtggtttactgaaaagaggaagtttacgtttccgctctcaactctcctcttactggttttaactcaatattccagcccatagaggtcagtttcattcatgtcatctttcacgcctccagccccctcagtttggcagcagatgggattacctgtcaccatctggagtttcattcatgatttgtattaacaaatacctggcttgatcaggcaatcaaagaaagaagttctcaacttcacagtttattttttaactttttccaaatgaatattgctgaatgcttcctacccactaagctgttttaagggtgacttgtaagatctttgcaaagcattgagcttctcaaaaggcaattttttttcttaagtacaaagcaggccgcttattctggcttatgggttaatagtacaatgcaattaaaagctgcccttcctttaaagttatgccagggagggatttacatatattgacttgcagttaagttaccccataatttatttggatacgtttgcaaggtgcctggatatgccatgacaaggaacgcaacacatttttatttgttcgatgcccttgttttagttactgctgagataaatgtcatgaatctcctttatcaggaatccgaagtctattagagctttcagacccatacttaggttgtacgttgggccctggatctattattcttaatggtaataataacagtagtgggagtggagcagcagtagtagcagtaacaatggcgatcctcatcttcttgtatttattgaacatctgctcatcttctctaatatattcattccagtcctaacattcactctggaagtagactttcatttttcttatttgacagatcagaaaaaagaaactcaaggaagttaaagaacttgcccaaggtcacagaacaagtgagcagctgagccacgatattaacccagggctgatcttattccaagcccagaacatgcttcctgttatatcctgaagcctctcagaggacacacacacacacacacacacacacaaacacacacagaatgccagttaatgcatttgcccatgagagccttaaaaggaaggcaccatcacaagagccctgtgtggccagagaggcctgtctggaaaggaaagcagctgcagctcagagccccgaggcatttgctcagagtaggacaggtcagagaggcctgtctggaaaggaaagcagctgcagctcagagccctgaggcatttgctcagagtaggacaggtcagaaccactgcaggtcagaagcaatgcagcttgccaagaccacccttagaatcattaggctgagctttgagttttcatactcatcactggaccacaaaacatttatagctcaaaagaatggagtccctgtcttcaggctgcaagaaagcgtggtgagtggccactttgcaagtcatcagcttgcatgtttgtcttttccttttcctgaagagaggcttcctgatgcttctccatggccccggcctggttcttacagctc

SEQ ID NO: 5231 - DNA, 1199 bp, Homo sapiens
ttagtaaaccactatagagaacagtttggaagttcctcaaaaaactaaaaatagagtttccatatgatccagcaatcccactgctggctgtatgcccccaaagaagggaaatcagtatattgaagagatatctgcactcctatgtttgttgcagcactattcacaatagccaagatttggaagcaactgaggtgtccatcaataggtaaatggattttttaaaatgtggtacttatacacaatggagtactattcagccataaaaaagaattctatcatttgcaacaacatggatggaactggaggtcattatgttaagtaaaaaaagctgggcacagaaagataaacattatatattctcatctatttgtgggatgtacaaatcaaaacaattgaactcttagagatagagaatagaaggatggttaccagaggctgggttgggggtattaagggcacattgggaggaggtggtgatggttaatgggtataaaaaaaatagaaaaagtgaataataccttgtgtttgataacataacaaggagactgtagtcaataataaattaattgtacatttgaaaggaactaaaagaatataactggattatttataacacaaaggataaatgcttgagggaatagatacccaattttccatgatgtgattattacgtattgcatgcctataccaaaatatctcatgtatcccataaatatatacacctaccatgcactcacaaaagttaaaaacttaaaaacattataaatgatgctggaaaaactggatatgtatattcagagggatgaaacatctagtttcatcctatctctcaccatacacaaaactcaaatcaaagtagattaaagacttaaataatataagacctgaaactatgaaacaatactagaagaaaacactggggaaatgcttcaggaccttggactgggcaaagatttattgagtaaggcctcaaaagcacagacaaccgaggccaaaattgagaaatgggattatatcaagctaaaaagcttctgcacagcaaaggaaagaataaacaaagtgaagagacaaccccacaaaatgggagagaaatatttacaaaatattcaactcacaagggattaataacgacaatatattaggaactcaaacaactaaatagcaaaaaaaattaataacaatttagaaatgggcaaaag

SEQ ID NO: 5232 - DNA, 1062 bp, Homo sapiens
agtgaagtctgctgggtccccagctttcaggctgcacctcagagtggctgcatgctcttatacctttcctgtccctctcccattggtatatgttttactctttacttgcaacttgttaccttggtggcagggggtgggacacggaggacattctgattaattttctaatgaaaccccttggtctcagggatgcatcctgagctttcctctctcccctgtctgtaatcctgggcccagcaggtgttcctgccccttcctcagaaggagagtttctcatttttaaacaatcccttccctcccagctgcagtgagttttcatcagtgccctaaagacaacagcatttattgacctttcctccacagattacaatttttgttccattggagagttggcagaagggcccggctgagccgtgtgctcctgtgcatgtctgccttttctcccttcaggtctgcgccacatcagacatgttcttagggtgctcaccagtcttttctgtgaacaccctgtagaattctgagagaaggagccggcaatttctatggctccctaaggctttacactgtcccaccagcccacacatagctgtgttcaccaactcatcgattccactggccaaaatcttcccaccagctttggttgcatctgccccaggtgagtgagtgcttattgtctcttttctccctgaaggtatctttctctcctcagattttggactaggtgtggtacaggaaaggattcccaatccagaccccaaaagagggttcttggatctcgcacaagaaagaatttagggtgagtctgcagtagaaagtgaaagcaagtttattaaggaagtgaaggaataaaagaatggatcctccacagacaacgcagcccagaaggctgctggtggcccatttctatggttatttcttgagtatatgctaaacaaggggtggaatattcatgtctcccctttttagaccatatagggtaacttcctgacgttgccatggcatttgtaaactgtcacggcgctggtgggagtgtagcagtgaggactacagaggtcacgctca

SEQ ID NO: 5233 - DNA, 1070 bp, Homo sapiens
ctttatagatgtccctctatgacctgctggcttgcatggtttctgaggagtcttctgcaaggcttacctttgttcttctctgtggaatatgtcttttttctggctgccttcaagatttctttttgtcgtttgttttcagcagtttgaatatatgtcttttgtttccagcagttgttgcatatggtttttgttgtttgtttatttattcatttgttcatttgtatatttatgctccttggtactatctgatcttcctttttttaattttttttattttttgagacagggtctccctctgtcacccaggctggagtgcagtggcaccatctcagctcactataacctctgcctcctgggttcaagtgattctcccacctcagtctcctgagtagttgggattacaggcatgtgccaccacagcccggctaatttttatatttttagtagagatggtgtttctccagacctcaggtgatttgcccgcctgggcctcccaaagatctgggattacaggtgtgagccactgcgccctgcctgatcttctgaatctgtggtttggtgtctgtcattttggaaatttattggctattatttattcaaatatttcttttgttctgccctcttcctcttctctttctgaggttcaaaacatgcctatgttagacaatttggtattgctctgaaggttttggatactcagtaatgtttgcagttttgaactcagttgtatttttgtgtgtcagtgtgggccattgctgctgacctgtcttcatgttcactgattatttcctcgactgtgtccagtgtgatgaacctgtggaaagaaagccttctatatctgtgactgtgtttttcacttctatcatttccacttgactttttattttatagtttccatctctctgcggagattacccattcaatctttcatccggcgttgttttccagtacagcccttaacatattaatcacagttcttttaaatcccctgtcagatcgttccactatatgtgtcatctctgagtcttactttgattacggctttatcttctaggagtgaattttttttc

SEQ ID NO: 5234 - DNA, 1053 bp, Homo sapiens
ctatcttctttctttttgccatggattatttgaactacattttccactagaactctcatacatctcctgtatgataattccaacatctatgttatatatgactctgattctgaggcttgctggccctttagttctctaaactacattttttcctgccttttgctatgcccttaatctattgttcaaagttgaacctgttgtatcaggtgacaggaactgaggtaagaaagcatttaatttgagaatttatgttactctaagagttaggccatgtttaacgttgctttagcctttagctgtgggtctcagaggctttagatttttctagtgtccttgtttttgtctcatcttgactttcggtttcccttaaagcttctcttcggaaacggtttatgtcttgtagcgctattatctgggatctagtgttattatattgagttcctgttggtgtgctggtaaggtgtggggtagggggagcattctattatcttccaattaaatctgtttttaattgggcctgtgtctccgggctgtaaccttcacaaatgtttccaaagtggtaaactttttttttttaatgccctcgacttccttccctggttgtagtagtctcaatctatttccctgaagccctgacacccaatgactatgtttcttcctcccttcctctttccagtgagataaactggagtaaactggtagggaaggaagttctttctcccacgtgggatcggctcctgtgcagtgctgtgctctggaggataagcctgtgtgttttgcattgtttaatcttccccaccttctaccagagccgtgaggggatgtttcttgatcttcaccatgagaacctagtggggtttctggaagtaaaacccctgaaagtgtaggcccttccctaagaccgtggtgcctgtgagtttcttaatctcatggtaggccaccctcagcctgtataacttcatgaaaattatcatttaaatgttcctaggagtttatggccacagcaccttttgccccacagaagctaatctgcattgtgactttctggatgcg

SEQ ID NO: 5235 - DNA, 1027 bp, Homo sapiens
tttagcttcttcttacattattattcatcttttaatgtgtccctttctacttccaactataaacattcagtatgagtttcatttatctgttaaatgttttcctcatctagagactgaagcgtgtcattagaataaattgctgagattggtaggaggattctaagataagtaagaattaaagtgaaattaaggccgggcatggtggctcaggcctgtaatcccagcattttgggaggccaaggttggtggatcacttgaggtcaggagctcaaggccagcctggccaatatggtgaaacaccatctctcctaaaaatacaaaaaattagcctggcgtagtggcacactcatgtaatcccagctacttcggaggcagaggttgcagtgagccaagatcccgccactggactccagcctgggcaacagagtgagactccatctcaaaaaacaaaaaaaaaaaaagaaaagaaaaaaagtgaaattaatatcctgtcaatatgcagcgttaatggaacctgaagtcaaaagtttgggcttggtgatctctgggttttgttctctactttgtcatttcttgatatttattttaacttgtttcctcaccttttcccatctctgctttgactagatgttgtactcaacacccaccaggaaaaccgtgccttgggatgaatctttacctgaaatgttttatttcattcccgcttgctggtgtgtgctcatagtgtaaacacatttgctgtcctctcatctagagatgcagaattaatccatggaaagcagtggtagtttttatatgacatttagatgtcagaagctgtcactttcattcctttgaagtaccgtgggcagtaaactagagctgaattatgcagttcaacctggtttctaactcagtatttttttgtgactctcctgttcctataaaaataatagtaaaggttttgtaacttatgaattaactggtttccagttccccaaaagattttttcccttcaaaagtccaacgtagagctcctttatagcta

SEQ ID NO: 5236 - DNA, 1047 bp, Homo sapiens
acaaaactaagatcaaaataaaatatacctacctgaaaaaacctacatatatttatatcttatagaaggtggaaaggtatatacatttaaatgagcaaaaagttatttaacaagaaaaccaaccaaagttacaaactttttagagcttattaaaggctgctttcacaggacacagtagcaagctctgaagttcaggtgttttacaagattccttttaaagatatttttattttttaaagagattttattgtgtatatttaaagtatataacacaatgtcatgaggtacctatagatagtaaaatggttactatagtgaagtaagttaacatatccatcatctcgcatagttacccatttttatttgtttttgtggcaaaagcagctaaaatctacttattttgcaggaatcccaaatatagtacagttttattaattatagttctcatgtacattagatcgctggagttgtttatcctacatatctgctactttataatttctaacacacatatccccatctctacctcccccatgcccatgttaactactgttttattctctatctctgtatgtttgactctctctctctctctctctctctttagattctacataaaagtgaaatcacgcagtatttgtctttctgtgtctgggttatttcgcttagcaaaatgtgctccaggttcatccatgttgtggcaaatggcaggatgtctcttttcataaaggctgaaaaatattccatttacatttatattagaatttctttatccattatttatctgttgacagacactcaggttgtttccacatcttggctattgtgaacagtgctgcaatacacgtggtagcacaaatgtctttatggcatggtgatttcatttcctttgggtatatgcctagaagagaggttgctggggcacgtggtagttctgtttttagtatctttttttttaaatatagagatgggttcccattatgttgcccaggctggtcttgaacttgcagcctcaagcaatcttgccacctcggcctcccaaagtgc

SEQ ID NO: 5237 - DNA, 1028 bp, Homo sapiens
ttcaaaacagttccaaaggcattatattcccaacattgataaatgattctaaggttcctttagaagaatagcagctaatagtttttaaaaacttgagaaagaagcataagaaaaaggaacttagcacttttagatttaagagtgaagactgggctgggcatggtggctcacacctataatgccagcactttcggaggccgaggcgggtggatcacctgaggtcaggagttcgaaaccagcctggccaacatggtgaaaccccatctctactaaaaatacaaaattagccaggtgtggtggcacatgcctctagtctcagctacttgggaggctgaggcaggagaatcacttgaacccgggaggtggaggttgcagcgagatcgcgccactgcattccagcctgggcaacaagagtgaagctctgtctttaaaaagagaaaaaaaaaaaaagagtgaagactgaataatcagaaaaaagtatgagactatccaagatcagagaatgggattagtggatcagaaaaacacagaaaggagacagactcttttatgaatgtattatgtcaaaattaaatgtcacaatcaaaaattgattttcagagtctagtgttgaggtaattgtttagcagtgggaaagaaaaatgaatcttatgtgctagtccctcgccagacaccaatgtaaatgagagagggatttaagagtttcagaaagtgagagagaggaagagggaaaagaaaacgaggaaagtcacgtgggactttttcatttctgatattatggcaggttactgctgattaaaactaaaaattctgaataaaatacaaaaaaactcttcctgaatgtaacaaaacctgacaaaataataaggaattatcagcttaaaatcttactgaacaggagtacctggaggaagcagggcaggaagctgcttttgccccaagagcatttgcccaacctggggaccttaagccttgtttttcagacctcgaactatggagaacaggaattgaagcccaggtgggtgtcc

SEQ ID NO: 5238 - DNA, 1031 bp, Homo sapiens
cttaggattctctgaactgtttgatttgtgagttgttttggaaaatctttagccattctcatttcaaatatgtcttctgccttgttctgtttttcttttcttcttgggcctccaattatatacatgttagatcatttaatattgccccacatcatttgtatgctatagtctttttttccactcttttttccttctttgggttttagttttaataattttactgacctatcttgaagttcaccagttctttctcctgctgtgtctagtccgatgataaactcacgaaagaaccaacatttctatttgatgtctgtagatagttttcatttttctttcgaaattacccatctgcacatgaatgatgtccatttctgtcactagattcttcaacatattaatcatagtcattttaaagttgagatttttgtaaattatctggctttttcttgttgtcaggctgtgagcaggacacttgtggatttctacatctgaattggcatcacttgtcagtgtttagttttgaagataaaaacaatagggctaaaatttctttgttgaatttttgtagaattctttcctacagtctgaagtttaaaagaagttagtggactatgattaggcgtggttctcttaagttttctggagcaccatgcccattttcacttttcatattgaaaactttatctagaggaaaagtttccctgttatgttttgattaatgacattgttgattctgttcacataatatgatttaatttttcacagactttaacttttggctgtctttcatgtctctcatttctttttcatcattttcctctccttatagttttcctttgagttctggtacagttctagagtttctcatttcaagaatgaagaaatcaacaaatatttattgagaagttattgtgtactaggaattatactagtttatatatatactagttataaaatataatttataaaatataaattatgtaaaataatttgataaattataataatatataaattttatatattattga

SEQ ID NO: 5239 - DNA, 1031 bp, Homo sapiens
ttcagaaataatgcaggacatcccagtaaaggtggatggcaagtacagctgcataatccttgtggatttgtaatgtctgttactatggcccgtatgccactgctctaggttggagttatattatttagttcccagaggaatcaatcaagctgctattcctttatctgagcaagcatgtcatatagtgagacagtatgaaatcacttttgtaagacatagtcagacatttaactatgtttattgcagtaattaatttgcttacacagatttctaagtagattagtctctgatttgagttggcatttctccagtacttctaatgaagaaacaaaatatggtagctataaaatatttcttgttgcaatctgactgaaccatgtgggtatttagaagacagatttattacctcccatttgtagatagaaagctttagaaaggagatggtcaggatcgggaacccaggtttgggacacagagacgattctcaagcttgctgctgatttttattcataaggggctgtgaaaggaaccaaactgcttttcagacggcactattttgcacatttgtggagggtagctgttaataaattcagccaatttttgctcttagagtgattgacagacctttcttttttgcgtgcttctaagagcacaggtggcatattttgagcaagttgttaaaatcagaagatagcgaaatgaaaataaagtttttgcataacactgtgtatttcaattttaaatgcagaatgaataataatagcatggcaacaggtatgatacagtagcccctgggctcaaaagaaattagtttgattctaaaagaaaataggtctgggagagcttagaaagattaggagttggatactgtctaactgaaactttgcaatttgaggatcagagatggcaatatattaatggggaatgaagatattaatttgcttacacaggtgtccatatatgtgtaactgacagtaaccactaataacccagaaagcaaaattcagtagaatatccaagagacagtgaaa

SEQ ID NO: 5240 - DNA, 1069 bp, Homo sapiens
aaattcaacttgagcctcatgattatctgaatactcagcctttctatatatttctatgttatctttctaccctattctattattctgtaatatatcagctgcagttcagtcaaccaaatcacccattgttttccttctggctgttgtcctcagagtttcccatccttccttgtttaggaggcccaaggctatgcctctcggcagccccagctccaaacctattttactatagttatttatttttctatttctttgaatctgtgaaatctgtatacgtatctatcaatcaatcatctctatagctatctatctgaaattatatataaaaagtccctatcaaatgattcatgcatttgttcatttcttcaaatgttttctctttactgtttctctcatttttgttagctattgaagcatcaggtgtcagcattagattcgggttctttttccctcattttttcattcgttaaaaaatgttccacagaatggaagaaaatattttaaaaaacgaaggattgtcatccagtatacaaagaacacttaaaactcaacagtaagaaaaaggaacaacccgaaaatgggcttaaggcctaaagaaacaccccaccaagaagatatacagatgacaaataagcatatgaaaagacattcaacatcaatagtccttagggaactgcaaattaaagcagcaatgagataccactacacacccgttagaatggccaaaatccaaaacactgacaacaccaaatgctggtgaagatgtggagcaacgggaacgctcattcactgctggtgggaatgcaaaatggtacagctactttagaagacaattcagcagtttcttataaaactaaacatattgttcaccacacgatctaacaatcatgctccttggtgtttacccaaatgagttgaaaacatacgtccatgcaaaacactgcacatgaatgtttgtaacagctttatttataattgccaaaactcagaagcaatcaagatatccatcaaaaggcaaatggataaacaaactgtggtatcttcatacaatgagatgctataagagata

SEQ ID NO: 5241 - DNA, 1030 bp, Homo sapiens
ctacatgaactcacagctcacagtgaggaaggaggaagaaacccaaaatactgacctagaaaaactgagctgtttgggacctttgcaaggagagcataatccccaaacagggctgtgggtcggaatcattggggaagctgggtaaaaatgcataatatgcataataaaaacaaactgtaagagctaggcaggaagcggaagaaagcagtgggtaacaagcactaaaattgcagtaatcattgctataaactcccatagattaagtcatcctgcatgacattcttcaaaagagtcaggctgttcttccttaaaaatgttttcttagtctttgggcagtagtttcatggttcctgccgttgcagttccagctatttgcctgcagttctccacctattctactcagatgtttctggacttgtcctattctccttacttatattctctgatttcatatcttgccattaccctttccttcaaaacactgagggtttattttcatttatctagtcgatcaggtcagcatctgaaataagaagttgcccttctgtgcattatttcaacatttcattcattcaacaaatatgaaccaaagcacctgttccgtgctaggatctgtactgggcactgggtatggagtgataaataaaacagccattgtctctgcccttatggaacttactttctgggagaggagagaaaactgtaataggtgccatgaaggaagcacataaaggcctgagatagagagacctgagagggaagggcactgatgttcgaactggtggttggcaaaggcttttctggggaagatacacacaaactgagatataaaatgagaggtagctagctatatgacaagtaaagaggaaatcattcatgcttctcaaactaaactaattgtcatcagttaccatgagaacacacacttatagctctcatccttaaaaatcctgtcttaaaaccatcattctcagcaaactaacacaggaacagaaaaccaaacaccgcatgttctcactcataagtggga

SEQ ID NO: 5242 - DNA, 1041 bp, Homo sapiens
tttttattagatatggttcattctcaaaatcacaaatctgactttgtttgttttaaataactttttatttgtaactcattattcctcatcttatttttgccagtttccattatctagtttgcttttcaaatttgtgttgttaacttgttctctcacaatgagactatatgtattatctcttgaactctatttgttttgctgtgaaggtagctttctctttactgatgagcactgcttgatgtgttgattcacctgggcccccttaagcatgattgtagaaagagcccagactttggcttccagcaaatctcttcctaatctaggaccttgggccagtggcctaatctctcagagcctcagtttcttttagaaaactgagctattgtgatcttttaaggattagagataatatatggcaaaattatgactttactagttggtggcaattactaatatcatcaaaaaatcttatttgttatctggaactcttgaaagtagcattatttgaacagtagaatttctcaggtatctcagaagacatagtcttttattcttagatttcaaaaattccaccaaaaatatttctaaaaggtaccctatccttccctgccttcttaagaagaatatactgataataatgtaagttgttcttgataattcaaattcattaaatgaacactggatattatgatataaacactaatccatatggggagtgtgtgtaaatgcaattatcttgttttttaaaaagaacctaagttcaacttttatcctttcctttgtcctcgcttttcctaagctctttctcagaataatagaattaaacttgcaggcccaacttactgggcaatggagagatggtaaaatttgctttcttggagagttctgcagtggcatttaatgaagcagctgcactgccctcatgcatgccaggcactttgacatcagtgacttcccctattctttggcaaggcttaatgaatcagagacataaacatctttttttttgtcagtttgtccatgcattcattttttttcatt

SEQ ID NO: 5243 - DNA, 1058 bp, Homo sapiens
gtgcagcacacgagctctgggagtgcttcccccgcaatgttctgcaagctctttctagtaaaggatggaattctgcaggctctaatgggcgggtggtcaggaggtgagccaaggccagaggaagacttgtctgaaattcctccctggtacaaatacagtgtgtgtgtagggaatgaagtgtccctgaaaggggagctcccagaaagggctgtcacttttataaagggctggtcacttaaaatacacacacacacacacacacacacacacacacacacacacacacaggagaagaggaggttatttttcattgtcatagctgtagagtttagctctcaagcacaaagggaagggcagagcttggggcatggttggaattggtgaaaacctgttgtttgaactcaagattggcattcaggggttttgaatattaccaattaaaaatgttgcatgaatccatgttataaactggtacttctctgtcactaagtttatccatcatgtgcttctaaccccacagagtatattctgtagactcattaccatggtttttaaaatcttacattgtcccaatatgttatgggccagtacctgggcaatcaccttgaaacattttgcttattacactgctggttgagaggcaggtgcagtctacccaagggcagcataggatctgtaggaatacagcattttccgcttccatttactctcacctggatatggtctccaactcattcagcttgtcttacattaaaaaatgagatagtattgtatgtgaaagtgttttgtaaactctaaagctctatgcaagtctatgatagtggcattattattattattatcattatggatagcatgacggtcaagcattgcattggtcctaaactgatgagaattggtgagaattgcaaagataagcacagtgctaggcctggctgactgttattctaggtagatataaaggtagcatttacatcacaatttactatcattaaaacattaacaagaactcataagaatattggcatttactaaaagatgaaacaattgaaataatt

SEQ ID NO: 5244 - DNA, 1061 bp, Homo sapiens
gctgcagtggctcacgcctgtaatcccagcactttgggaggccaaggtggatggatcacctgaggtcaggggttcaagaccagcctggacaacatggcaagaccccatctctactaaaaatagaaacattagcctggcatggtggcacgtgcctgtagtcccagctacttgggaggctgaggcacgagaattgcttgaactcaggaggcggaggttgcaatcagccaaggtcgtgccactgcactccaacctgggcaacagagcgagactctgtctcaaacaaacaaacaaacaaacacaaaatacattgggttgaaatttatacaccattacccagctgtgcaaagaaaatgttgagttaccttttagctgaccacatattgctctgagctcttatacctgttgatgtggggagtgtagggatgacttaacttaaaagtgccagttgccagatacagtggcttacacctgtaatcccaacactttgggaagctgaagtggggagacggtttgagcccaggagttcaaggctgcagtgagctatgactgtaccactgcactctagcctggggcagagtgagatcctctctcaaaacaaacaaaaaaagtgctaattagggtaactcagccctttcagtcttggagtttgtgtgtgaacaagtgtttaatttattcaaagaatcagtcttttgggactgtttattctcttccctttcatgtattcaggctctcctcctcctcctttccagggcctctgtgtgttagggataggattcctaaacctgtgggtggaagtggacctgagaggggcacttctgaggaggggagcatccccttagtccagtcaccgggtgtactgtgtgttgtacctgcctggtttgggtgaggtgctggatctgccactcactgaccaccggagaccctgccatttgccctagctgtgttctgcacacactgtcagcccgtacaaggtctgtgagctctgcccagccccacccccagctgccagtatgtagttctcaccacagccctagtatgtgggggccctgtggaatacgggc

SEQ ID NO: 5245 - DNA, 1042 bp, Homo sapiens
gtggacaggtgagtctccctccctgctcccatcccccaccatggcgtcacaagctcagggttcctcagagcccaggcagatgtgataaataggtgaagctggcccagtgtggaatggtagagaggagtggtgatgactgcagtaaatcagagggcattcatcccatctgaagggcatttatcccatctgaagggcatttatcccatctgaagggcattcatcccatctgaagggcatttatcccatctgaagggcatttatcccatctgaagggcatttatcccatctgaagggcattcatcccatctgaagggcattcatcccatctgaaggacatttatcctatctgaagggctgctgctatgttagtctacttatgatggctcataagtcccaggtgataggattttccgtttttttccacagggagctagaaatgcatatttgtatctaaaagtgtattttgtttcatgttgttgattttaagtttcttttgtttgtttgtttgttttgttttttgagatagagtctccgtctgtcacccagtctggagtgcagtggcgcgatctgggctcactgcaacctctgcctcctgggttcaagtgattctcctgcctcagcctcctgaatagctgggattacaggcgcgcgccaccacagccgggctaatttttttgtatttttagtagagacggggattcaacatgttagccaggatggtctcaatctcctcacctcgtgatccgcctgccttggcctctcaaagtgctggattgcaggcgtgagtcaccacgcccagccgatttaaattttttttaacaacaccacagaccacaggttgtgcgtggttggctgtggcctgtgagctacctgtggtcagcctctgccctgccccctccagtgggaaagcagcctctgccctcctccctcagcccttcttgcacacatgtgcggcatccagatgcccctaggtgattccctgcaggctcctccaaaccaccttgccaagttctccactcattgctcccttttgaaactctca

SEQ ID NO: 5246 - DNA, 1050 bp, Homo sapiens
ttcacaaaacatataaaaagatatgctgaattactttatcaaaaggtttctctgagtgctggatggaaagtagatcaaagaaaggacaaaaatagaaatgagaggttcggtgtctatttcagtcacccagtcaagagatggtggtggcagtaaagatggagaatcatggatagattttgataggatttaatgatcagttcatttttagggtagaggcgtaaggatgggggaggaatcaagggagatgcctgattatctggtttgaaccagaggcgtatgaggtgccactgactgagatgaaggatgaaagaggatagttggtagggaaaccgaacacctagttttacacatagtagtttggagtttccttttagatatcaaagtggagatgttgagtagatagttggatataggtgtggggagtttaaaggaacaatctaagctagggatacagatttgaaaaataatcaacatagagatgatatttaccgccaagggactgggtaacacttcctaaatagaatgtgtagagcgggaaatgagtgctaacagtgaggccccaggagcgctacactcagaggcagggcaaagaggaggcgtcgggagacaagggaagagcaaggagagcatttccattgtgagcaactgtgttgctcgctgctgagaaaacaggaaattgtggttattttttgtttttagagacattgacaagaaactttcagtggtgtgttggggagcagaagccagactgctgtgggtttaagaggcaatgggaggtgaagacagttctttcaagcagggagcagaaaaagggcacactatctggagagaggtttggagtcaagggggtttattcctccctcaagatcagaaggtccttgagagtagggctgtgatttgaatccccattggtccttggaatggtgctttatacatagcagataatctaatcactctgcattaatggaatctaactccataagggaaggcacagttttggtagtgcatattacagactgtggtcagacccatttcagtagactcaccaca

SEQ ID NO: 5247 - DNA, 1048 bp, Homo sapiens
aatatgttatatataataaatataaatagattatatataataatatttttatattatatattatatataatatttttatatttattatatattatataaaatatctaaatatatattgtatatctatatattatatataagtatatattatataattatatgttatatttatatattatatattatattatatttatatataatatattatataattatatatatgtttatattatatgtaattataattccctatctcttacccagcgacttccgggtaggagatagggaacccctcctgactcccgagggcagagcttcacggagaggcacggcattcccatgagccacgttgcccggcagattaccaaagaaaattttgccaaatttgattatataccatgtatggatgatagcaatctgagagatttgaatagaaaaagtaatcaagttaaaacctgcaaagctaaaattgagctacttgggagctatgatccacaaaaacaacttattattgaagatccctattatgggaatgactctgactttgagatggtgtaccagctgtgtgtcaggtgctacagagcgttcttggagaaggcccactgaggcagcttcgtgccctgctgcggccagcctgactagacccaaccctgaggtgctgcatttctcagtcggtgtgtaatcatgttccagagcccaaagccccagctctttgttcagttgacttactgtttcttaccttaaaaaataattgtagatggaaatcagttgtgtctggcagaagaataaataaaaatctttgattcagacagtttatgggatatattaaacattcttagactagttgaacatctcacttgccccaattacaaaaatagtagaaaaagcaacataaaacataatgaaggaaaaccttacttgaaggcccaagtcaacatctaagtccactgagacttagataatcgagtctacctcttcaataggtttgtgtggatggcctgatggagggcaggtgccctctgctcccctatgctacctctttctt

SEQ ID NO: 5248 - DNA, 1083 bp, Homo sapiens
tcctttttcttttaaagagttaagtttaggttaatacgttttttaactctaatttactccaagcagggctataactgaatgaatattctgttctttttaaactaatattcaggtaaaaccacctcagctaattgattatctgcagcagaagaaaacagaaggttataccatcattggagtggaacaaactgccaaaagtttagacctaacccaatattgctttcctgagaaatctctgctcttgttggggtaagaagcttcttgtgtccatagtatattctctgagccccagactactggaagatgttaccttgtttttttttgtttttgagacggagtctcactctgtagcccaggctggagtgtagtggcacaatctcggctcactacaacctctgcctcattggctcaagcaattttcaggcatcagcttcccaagtagctgggattacaggcatgctccacgagacccagggtttcaccatgttggctaggctggtctcgaactcctgacctcaagtgatcctctggccttggcctccatggtgggattacaggcgtgagccaccgtgcctggctagaagatgttacttttctgttttacagtttaccctgactcctgctcatacctgcacttttctttgatttgtaacatttataagaagctccctgggctttccttttatttcatctctctggcatggccagctgaacatggaattgacccatcagtctttttttttacactcttatttatttcccggtactacagacttaacttcatttgttaatgtttcttttagtaacattcagaatatcaaagagaaaaataagtgaataaacaaaaaataaaaagaatatcaaagagaaaaattgtttgttacaggaaaactaatctttcttccattttcttcctcagaaatgaacgtgagggaattccagcaaatctgatccaacagttggacgtttgtgtggaaattcctcaacagggcattatccgctccctgaatgtccatgtgagtggagccctgctgatctgggagtacaccaggcagcagctgctctcgcacggagataccaagc

SEQ ID NO: 5249 - DNA, 1030 bp, Homo sapiens
gtacttccaaggaaaaaaatgttaccaaactatgatactctggattctaagatgtgtctcaatttcagatatgctaaaacgtgaaaaaacgtgtatctcatgtttccatgaagtatcataatatgttggttaataaagctgattttgaaaacttaaagttactactacaaatgggaattgtgtctgaatccaactaaagttttttacttaatgctttgttaagtctcattctaaattatctcattctaaattatttcacattcttaaaaatacatatacatgtatacataaatatatagagattcagatttatttatatgtgggattgttttctttttccttcccaggtactaatttggtcgaagcagataaccaagcggagtggaccgacgttcagaagaagattatcccgtggaacagtcgtgtttccgacttagacctggagctcctgtttcaggatcgtgctgccagacttggaaagtcaattagtagactcatcgttgtggcctcgctcatcgacaaaccgaccaatttaggaggtaaagttggagttttctgggagctttgcctgaaagcttttggtcttcaacattttttaattaatccactgccacgggagcttcaaaggaatgtatgcgacatgatgagcttagcattgtgctgggaacaatcttaatgatcccaggtgttctgtgcaggactgtgcaggacctgtgaggtatttggggcttcagtgctcgttgttggcagccttcagtgtatcagcgacaaacagtttcagcacctcagtgtctctgcagaacagtggcttcctctagtggaggtgggtggaaagtaatttattattaaagttcttaaaacaagcccgcacatgtacccgtgaacctaaaataaaagtttaaaaaaaagtttgtatttgtaaaaatattttatagtgctctatctttgtgtattagtccttttgcataatttataatagtgcagtctttaatcatttaagaacagtgtttaaaaataacatacagctcac

SEQ ID NO: 5250 - DNA, 2002 bp, Homo sapiens
gagaatcacttgaacccgggaggcagaaattgcaatgagccaagattgcaggactgcactccagcctaggcgacagagtgagactccatctcaaaaaaaaaaaaaaggatggacaagacaaatctcttgtaaaaaaaattacaagtaatttttatagaagctctgccctgagggagggggagcgtgacttctcactccttcagtgtgggctgcacaagtgacttccttccatatgggatcgttataacaaaagactgtaacaagggctatgggagttataagacaggaattgtggacaaaaaccagtgtatatcataacatcacaccttgtaatgttggcagtacagtcactgacctttgataaatgttgatgacatgttgagtaaaggaatgagagaaagaggattgtttatctctgtttttatccttctcagagaaacttagagtaacaagtgtgttatcagccatgctgatgcctttggtaaactattgtgtgaatatggttgttttgaattggtcagtagaaactgggctgccaggcgcagccggtaagcatttccatgtgagccttaggggagaagtgcatttggtaggagcatcaaaatagcttctgatatttcattaaaagtttgggtccgtctggttccttcattagtatatgtcacttcctttgaccttcagtgtctgttgaaccatgtgattttagaaagcaagggattgcttgacatctccaggctgtgaagactaaagttcacaggaaaagactacaaggaaatttaaacagttttattattttccccctcatttcttaattttcctgccactactcagtactgtgtgggtccaggatcaccattagggaagacagagtagctcagaaatcagtagtgaggaggaggacagcactttgtgtggtatcttgctctaggagcattttcaagccatcagaagtgggactcttgaagactatttctgactttctcagcacaaattaagataataggagatggaggctccatttgaaaaacattttggttgtataatggttagcataaaacatacttttttcaagttaactcaggtactagagtatggggggcggggggaaatgtactgcagcattaatgaaaactagagctgggagaatgtgtttttccttgagtaaattgcaaatgcctgtgcaccgcatttgaccaggagggaagaatgagaggccctggtagcaaagccagtggaagaagttttactaggagcagttgtatcattcgtgtactttttttgtgtcatacaagtgagagtaaaatggtccatgtctgtgttttgaggaattttttgcctttcttttcagaaactaattctgaagcaagcccttatagttgtgctgcagtggtgtttcaatcacaattttagtgttcgactgtatgctttagttgctcttaagaaactctggactgtgtgtaaagtgttaagtgttgaagaatttgatgccctgactcctgtgattgaatccagcctccatcaagtggaaagcatgcacggagcagggtaaggagccctcgtcaacctcatcgccctcactctcctccagcagggcccacagggagggggcagtgcccatactgtgtcagcttctccttccacatcctcatgctgccgtcctggagcatcgagggcttggactgggccaggcctaagcagctcactttggggtgtagttaattacagttcattgtcagctccaccttgacctcttattgcccttttatcctcaatcctttattgtacaaataatcttctacatacttgtacctgtttctcttcagtatagctaaatgtcatcctttgttgtttgagaactgcttagaagtggcacgacctgactttaaagacatacttttaatctctcagctatactagttatagctaaaggcttttttcttttctaagagaactctcctattccgcagacaaaatcatacatggaagctcagtatcaagcaag

SEQ ID NO: 5251 - DNA, 1681 bp, Homo sapiens
atgactgtcatcatttggagtgtgcagtacagttacttcatgttcctcaggtttagaacaatttcccctgtaagttctcacacagataggcagaaatcataactaattttggttaatcactatggcagccgttgaagaatttaagagaacctgccagtaagatttggaataagattctatattattgcatccacagaaaagaatgtactgatatactataaactctaggagaaaacttaattgaaatagtgttattaagtgttgaaagtaccataaaaatataagggaaaataagctttcctagaatttttcagtgttctagtttttaaacagtgatgttttttattaacctatttcatccattcaaagacaggcctttctccacaccacattttcctctaaaatcatgataacacttttaaattgatggtgtcttccagtgtgtatcagccagatggcagtgtgttacagttccaggaaaactcgttcacatcttccgtaagatcaagaaggctctggcatcagataagatcaaatgttgtctttctgttttaaatatgtgccgcaaagagatttgcttacaatctattgagaaagctaaaacagagcagacattgtcctgttgcggggtagatgaatagcctaagaatagtttagacaaattctgaaaacgaatttaccttagaagatgttcatgttagatctggtaaaagtaacatgttatttttctgtcaagccctttttgtacttgccgtttattacatattttagatttattttttattttcgaaacatccaaaaaggaatgctaattagtgaaatggaagaatttccatttcaacaccttaggaaaaaaaaaactgacttgacatacctaagaaaaggccaagttgatttactttgtcagtctcttcatttgtgatacgtaaagtccgttgttacctagataaatgtaggtttgatttcttggaagcaatcacttaagactttccattttcttcaaagcatcttacttaacctgcatgtgggatctgtactgagcaattagagattcaaaacaactgtcacacacgacagaggtggtaaccgcccaacaggttcacctcttccgccgcctacacagagccgatttatcaagacaggaattgcaatagaggaagagtacacagagctgcttgtgcaggagactggagtcttattagtactcaaatcgatctccctgagcattcggggatcagagtttttaaggataatttggtgggagggggaaggccagtgagtcaagggtgttgattggttgggtcggagatgaaatcataaggaattgaggtgtccttttgtgctaagtcagttccagggtgggggccacgagatcagatgagccagttaatcgatctgggtggtgccagctgatccgtcgagtgcaggtctgcaaaatatctcgagcaccgacataggagcagtttagggagggtcagaatcttgtagcttccagctacatgactcctgaaccataatttctaatcttgaggctaatttgttagtcctacaaaggaaatctagtccccagacaagaagggggtttgtcttgggaaagggctgttatcatctttgttttaaactataaactaaactaagtttctcccaaagttagttgagcctacacccaggaatgaacaag

SEQ ID NO: 5252 - DNA, 1029 bp, Homo sapiens
gaggtcaggagtttgagaccagcctggccaacatggtgaaaccccgtctctactaaaaatacagaaattagccaggtggggtggtgcacacctgtggtcccagctacttgggaggctgaggcaggagaatagcttgaacccagggaggtggaggttgcaatgagccaggatcacgccactgcactccagatggcatcaaagtgagactccgtctcaaaaattttcatctctttccaggctcctctggctcttctttttcatcttcgtgttcctataatgaagaaacagattctgttatttttccttgagttgccttttagatccatagctttattaatgtagtttgtttatgtcacctctcaaatgggttagcactgccccaggaattctcacaaagggcaggttggttctggtgtacccccaaaacttcctggtgctcccatccacagtagtgccagttgttacttttatttgcttagctcagcctctcactcgtcattagaccttgtatattctcttcgaatctgattttacctgtggacatcagacagagtttttgatgtaggcaaaggaagcttttgctgatggaatcaaaatgggattcaaaaaaggtagtggggaagaggggagtagtaggtagcttacagaacaccgggaaagctacagaatcagaactggaaaattggcaggaacaggggaggctcagtggcttccagaaatgcaaccacaggcaggccagagagagctagttcactggggacattaccccactggacacacggtgccttcagcagggctttgctatagccagctgtatacctactgtctctgctgcctgcagtggaggagggttttctgtgagctctgcttctctaagttgtaagttctcaatttaggaatcagaaatggagtctttggaaccgggtcaggtgccttcttgttagtggcaaggaggctgggaagatgaatacctggcatttttcagtgtcccccaacactcataagatggaagaattccctaaacttgga

SEQ ID NO: 5253 - DNA, 1068 bp, Homo sapiens
tgccccacagtacatagttagagacgctggtctttgctgcctcagccaaaggaaggccactggcaaaatgcaaacaaaggaagctgaatgtgtgtggggtgaggtgtttttcccctttgattctactgctttggcagttgtttctcttgaagagtcctggatgaatatcactatcagtaaaattttatttatttttattatcaagagatgaaatagcattctctgattattgatcatctcgcaaagttattctaacagtaatgaatttaacagtttttagactgttcatgattatgttgaaactaagtaacagtttttagcagcactgattttttaaaaactaaatcaaggataaaatgacggttgtattttattccagattatgtacaagataattgaaatgtctgctataaagactggagtcttcaatacactgataagttactgctgtcagtcttggatagtgtctgcttcaaatgtgtcccaaggatctttatcaagtgctaaaaattatagcgaacttatccttgaggcttgtatatttggaactgtgtttaggcgtgatcaaaggtaaaagatgctattatttcaactggtcataacttgtattaagtgcctacttgggtatagaattatgtctttgttttgaggctttcaattaaaagaatataaattattagttaactttaaccttggggatttaattttttttctatttaaaacctgttgttctttatcaaatgttttttatggaaagacttgttcaggatgtacagaccttcatagaaaaccttggacatgactgtgcggcaaatattgttatggaaaagtaagtatggtagattttctctgtcttcacataaatgagatactaaaaatttaacatcatatgacaaacattctgtatttgctaaatttaataagtgacatctaatatattaataagatgggatgagcctttaaaagtatgttagaaattatagtcccttgctaatacattgtctttacatctttcagtattcactagaatttgataaaattttaaaagtttttagtgccgactccagc

SEQ ID NO: 5254 - DNA, 1029 bp, Homo sapiens
aacagattcattaattaggattctttttacattcctaatgcttccttttcattaaagtcattggtgataatttaggaaaattgcatcttcgaatttaacatgtcttaaatttcctagctttgtctcacacaaagtcattttcatctcctgatttctttaatctgaccatggaataggtcttaaatgatcagataattatccttccaaaatgcatgagtttattcttcttggaacatttctcttttgtatttttagtcttttttggtctgtctgtgtctagtaaatgtcttatgctgttacattggaagattatttgaagtaaatatgttagtctctattaaagtagacataaactgggaggtcagatagaggtctgagagaccatggcctttgtggcttcattcatttaatctcatttctggtcacattttagggaacactcatctcagctgaaatactagaattgcctcttacggagttaccttgcatctactcttgcttcatctacaatatcttttccacatggtacctagataaatcttttcaaaatataaattttgattttagacatttttcctccacttctttgtatatattccctttaaccttcagtggcttcctattgcctttagggcagagacaaaggtcctctgcatggcctgcaaggtttcctggtctctcccctgcctgtttatgccacttcagtttttgctgctccctgtcacttagtgcacacatgagcatcctcctattttctggaatatggtatgccttcttctgctagaagacctttgatgtgctcttccttctgtctagaaagttctcgtgtcccttcatctttcctcttgagtcgtcacactcagcccaattgtcatttcttcagggaaacttcctcttactctctggatgagggcatgtcttcctagtgtagactccactagcaccatgtacttctcattcgtagccctcactataattgcatttttctatgtattctttgataatgcttttctcctgtactctaaattc

SEQ ID NO: 5255 - DNA, 1057 bp, Homo sapiens
ccaagtagctgggactacagccacgacactggctaatttttgtatttttagtagagatggggttccaccatgttggccaggctggtcttgcactcctgacctcaagtaatccacccgccttggcctcccaaagtgctgggattacaggcgtgagccaccgcacccgtccaggacttttgagttttttacaagttcccaggtgatatgtatgctgctgttctgggaactacactttgagaaccatggtttccattctgcaagttggggaccacagaggtgccagccatctgtggagtcattgtgaggtgtcaatccaaatgtgcaccaaaccttgtttgtggacttaaataattacttatatgtgctaaatatatatagatgcaaggatgaggagtaaagaaaaagcatttctaaattcaaattaacttttatggttttctttaatcagtagatccataaaacccccattatttatttagaaacccaaatttatccatattttgaaggatatgtaaattaatctcaagcaaacgtgtcagcaactttggctatgtggtattaagaacatggaactccgaactggccgttctaagcgtgtgcagccatgaacaacttgagtgactagagaaaacatttcagtgtcttttttctctttgtaatatcttagtattggcagtcctacctgcctgccaggacagttgaggattctatgacatgatttatgataatcactgtataaatggtagactttaatgtagctgtaatgtggttatattcattagctttgccatactcagtcttacatacctgaatcatactattgtttgaaaaactggataaatcaggctctttctacatatgttttgtagaaacagaagagctactgtgaaataaagagatgaaaattgcctgacatttttcaagatgcattttcatttcatatgatttttttgctcttatttttagatacatgttataaagccagttttaccaaagctaaacaatctgtttgaatatgcggtgtcagaggaaaatggtaacgattacttttatttta

SEQ ID NO: 5256 - DNA, 1047 bp, Homo sapiens
gcctctgaagatctcctgccctggccacagtctctctcgagagcaccggggcaggcttgaagaaaagagctggtgaatggatgtggactccctcagcaagctgtgaggctagcccaccttggtctttaaaaacttgtcaaaatgccatttttaaaactgctttttgggtgaccatgtcttgctcctgtgccagaagtagaacagataagtggcctttccattcttggagcgccttccttccttttagaattcaggttgcattgtgacctcagttctgatgctccccccacccaccgcacaacagtttaggattttgtagatttttcagcctttcctctttgtatgacaataacgatctcctatggttttctatgtcctaatgagcaactgaaacgatacatatctaaatgcctttattttgtcctcatatttcattgatggtttgactgagggtagaattcgagcctggaagatatttccattcaaaattttaaaggtatctatctattgtcccagaagctagagcttccagtattgctgttgagaaatctgaaaccattctgaatcctgtttatttatacaggaactgtttctctctatggaagtgtgtaggatcagtggctctagcattctgaaatttcacagttttgataggagtctattttcatccttgtgctgggcacttgctggacctcctgtgcaatctggaaatcatgttcttcagttctgggaaattttctagaatattctgtggattatttcgtccctttctgttttctgttctttttttagatattgaacttcctggactttcttgaaagcatcttttctctcctaaggattttctatgattttggattgagtttttttttttaaatgtcccctttgtgtgtgtgtgtgtgtgtgtgtgtgtgtgtgtgtgtgtgtgttttagagacaaatcctcgctcttgcccaggctagggtgcagtggcgtgattatagctcactataacttcaaaatactgggctcaagtgatcctctcatctcagcctccagagaagctg

SEQ ID NO: 5257 - DNA, 1042 bp, Homo sapiens
tttagtgaaattgaaaatagtgcagcttgtagaagtaattctcaacatttcaaaacctcttcccaaagatatactttaatgactgcatttcgttttcagttaagaaaacaaaccagactcttgatgtggcagatgtctttgtttattccccaaaggggagttgggggagagttaaaaggaaactatggaaatccttttttaattcctagacttttaagtccctctttactcaaaagttgttttgcatatgatttatagatggttttatttggttagtgaagagtaaaatgtttctcttcctgattcctaagtgtatacgtggaatcattcagaaaaatgttcagttgtgtgtaggccatgagaagtcctgagtcaccctcatttgcttgccttttgttcatagggaacagtatgagaagacacgcctttcctctgtcacagaccaaggtcagatgcaccaatgaatggaatacatatttacccaatttatcgtggggttctagaaatcgggagtgggggtggggactgttttaactccttcagtgccactggttaggcctctgacagcaatggtactacaatcaaataaaaattacgggtgtgactttccagattacaaactctatagatcccttgttgctgtttctcttgacagcctgcattttccttaatatgtctgaacccctcactgtaacttaaaaagcacacaaatagacaatttataaattactcgctaagcggttagaagatagaaaatgggtagatttatggattatctgtggattcctccattaatcctcagataaatccataatttgtcagggatacccacactacccctagttattacattaatttatacctaatttaacagtgaacattgttttaactcattaggtgtgtcatctgctccctccccatgtcaatacaacttaacttaaaatgcttgatttgaaacagctctctgattgtttgatttgaagtgtaacttgtctctttaaaagattatagaatatgaagtctgtatttgcactggttttaa

SEQ ID NO: 5258 - DNA, 1027 bp, Homo sapiens
caatttatgtgtatggttcacagcctagcttctatttacatttgaaaatacagatttttaccaactttggattcttttttagttatatgtttgtctttcctttttaaattgttcaaaactattttttaatggtcaagttactaacacttgaaaatcagatactgcaccaaatacagtgtttttccgtagtgtttttaatgagtgcacctattactactgtgcgagaattcatgttttaccagtcattgttatattacaaacagacttgcatgattaaccagttgttacacttactttttcaagttggagtatatatgactcagtgcagactggtctctcttatgtgaatgcacacatgcagaaatgcagagtcaattttacatgcccataaagacatttgtaaagaattcagctcttatggtctgttgtataaatgtgtatctaggcactttggaatttgacctcacagatgttacaacttgatcagtcgtttgacctaatttgtggtagctatctgtatgttttgcaatcttaatacagacatgctttccaaaaagattaatacagaaccatcctgccgttttggataagtctatccagctgtggaaagggcaacctgtggtttctctgtactggtgtttaatgggggaagaatatgaacagctttaaagagctgtgtattgtggttactactattaaaaaataagatctgcacgagtctgactggcctttgggtggcctttgtggacggctcgtagctggaaagtgttgatctgggttttctggcattcttttaagttaaaaagttaacatcgggacatgggtttgatcttttgttgtacctgatgacagtgcagagattctccacagctggataaaaatgtcacaaagctacttactgtacatgggcagtatcagatttcaaatcctaatatttcagctgtgcttttaatactcaaaatattaggggatggggtgttgaagctttcccttttttgcttttaacaatttatagaatttaacagat

SEQ ID NO: 5259 - DNA, 2588 bp, Homo sapiens
agcgctgccgtggagcacgagcagcgtgaggcggcagccaaggagaaacaaccgccgccgcctgcgcaccggggcccggccgacagcctgtccaccgcggccggggccgccgagctgagcgcggaaggtgcgggcaagagccgcgggtctggagagcaggactgggtcaacaggcccaagaccgtgcgcgacacgctgctggcgctgcaccagcacggccactcggggcccttcgagagcaagtttaagaaggagccggccctgactgcaggcaggttgttgggtttcgaggccaacggggccaacgggtctaaagcaggtaggggcggctgtgaagtgagggggtctaggggagaaaaggggacggagagcagaggaagggtggttctttggattcaccattttaccccagcccagaaacaacaaacaccccacttcctgatctgcctgaggcggaaccagtgcttggtggcaacgtgttcatgtgctgaagcagcataacagagatgagtcagactgggctgatacgctctgacacggggttttcctttcccagcacattcttggatgggagcatgagggcaccagtcaccttttaacctattgggggacattagcagtcacatgttgagtgcaaacgagggtacttttgtgcatgtgtacaaacaggcagttacaagcgtgtcattttcagtggctccattttaaatcagtctgctgcctcagaatcccgtacgcctgaaggttttaagttgcatgtgcacctgaaactcgtatatgagtattttctgtctgtgcttttagagaggaggaattctgtaacgacttttgtttcgggttaggaagagaatgatctctttcagtgcaccgccacttatgttacctttttccttttatttctttgtgtttccagttgcaagaacagcaaggaaaaggaagccctctccagaaccagaaggtgaagtcgggccccctaagatcaacggagaggcccagccgtggctgtccacatccacagaggggctcaagatccccatgactcctacatcctcttttgtgtctccgccaccacccactgcctcacctcattccaaccggaccacaccgcctgaagcggcccagaatggccagtcccccatggcagccctgatcttagtagcagacaatgcagggggcagtcatgcctcaaaagatgccaaccaggttcactccactaccaggaggaatagcaacagtccgccctctccgtcctctatgaaccaaagaaggctgggccccagagaggtggggggccagggagcaggcaacacaggaggactggagccagtgcaccctgccagcctcccggactcctctctggcaaccagtgccccgctgtgctgcaccctctgccacgagcggctggaggacacccattttgtgcagtgcccgtccgtcccttcgcacaagttctgcttcccttgctccagacaaagcatcaaacagcagggagctagtggagaggtctattgtcccagtggggaaaaatgccctcttgtgggctccaatgtcccctgggcctttatgcaaggggaaattgcaaccatccttgctggagatgtgaaagtgaaaaaagagagagactcgtgacttttccggtttcagaaaaacccaatgattacccttaattaaaactgcttgaattgtatatatatctccatatatatatatatccaagacaagggaaatgtagacttcataaacatggctgtataattttgattttttttgaatacattgtgtttctatattttttttgacgacaaaaggtatgtacttataaagacatttttttcttttgttaacgttattagcatatctttgtgctttattatcctggtgacagttaccgttctatgtaggctgtgacttgcgctgcttttttagagcacttggcaaatcagaaatgcttctagctgtatttgtatgcacttattttaaaaagaaaaaaaaagccaaatacattttctgacattgtaagattgccttactgtctgtcattccttattgctggcccctttctcaggccggaggccaagtggtggagaaggaaaggaaatgatcgaacgggcatgttgtcaagtgggcatgccactgggaaataccaccagtttaccctgaaacattgtcctcagaggagtaggaaagtggattttgaatctctattttgctcaaaagttcagttcctgagatactgatgactgagagtgctgctgggaaattttcaggattgtgtggtcttttggggttttttgtttttttttttttaagacaaagttgaccgctgttcactgtccacgtgatcagttgtaagattacaatgctgcatgctagttggttacataagatacaattccagtgatggaaggcggttataatggatggtggtgtgtacaagatggcactgccatctttgagcagagcccagctctgcagcgccacttcatctttttaaacaccctagaggtctgtttgttgttgctgttgtcctttattttgaaagagttgcaagagaagttacagtccaggtgaacttggagattgtggga

SEQ ID NO: 5260 - DNA, 1053 bp, Homo sapiens
ccctgcgggacggcgggccagccagccagccggtcgcccccacggccctcgggaacctcgcggaggcgagcaggaccccccccccccccactcgcgccctcgcctcccgccacctcgagtccaagttcgggcccgggggcggcgcctcgacgcccagactcgccgaagggggtggagcctgcgctgtgacgcggccgcgctggccgtagaccccggatccctggaatgtgcattcgttccacgaggccctagtgccagcggcgccgaggcacgtctgcgcggagcgtgcgcactcgcggcggcggccgcccacggccccgcgcccacgtcacgcgcccgccgcgcatacctacataaggcagccggggcgactggcgcggcgaggcccccgatgaacagggcgggctggacggggctaagagcggcacttggtgttcgggagaggctagtccgaaccgcgctccctcccctccagagggctccgtggaaaacgcgcgagccagctggcggcgtgtgcacgtggtgctgggcttgggaatattcacagtctccctagttagtaaaagggacaggcggggcgtatgtcctttccaagacaaatgcaaagcaccagtgacggatttcatgctatgtgtccgacattgagctttcaagtataactcctaaaaaaccagaactgtgaaccacgctagacctaaattccccattctcaggagactgacggaaaccaagtgacaaagtgtccttgcataaaagaaaaaaaatgatttttagcacgatttggcccagaggcacaccagaggaaaacatcctgagggtggtcgggacagccgggtggggcgcgaagtgagggaaagtggaggaaaagcactcgatcactttgcgcggtgttccgaagggaacaccggcgctgcgctgctgcgctgccccgcgggcgggcgggcgccgcgtagccggctctcccggcagcgctccttcggcgcgcggggggagggggagcgcgcgcgcgggagggcgggcacgcgcacgaggggagggggcccgcgcaggcgc

SEQ ID NO: 5261 - DNA, 3465 bp, Homo sapiens
aattaaatgtcagaatgggtgaactttactaagattcaattctttgaatacaaagagcattttattttgaagttagaatcctaattaaatgcttatgacactttaaaaaattattttttttttctttcagagaattgtaagtgctcagagcttggctgaagatgatgtggaatgagaaacaaatgtcaacataataaaatctcagttaaaaatattttaaaaattcttggtagttgagcagctctgggggaataagggcaaatatgcttgttatgaactacactgaaatctaccaaagttaatgtttactttgtgtagatccatttgtctattttatttatttttcccagtgaaaagtgtattttgatagagaacttttcattctataaatacactatgagttactaaaatatcatggattttgtttattcctgaaacatagttacatagttaaactgtacatatgacatggcttatgttaaaaatacccagtgctcagttttgaaagataggcaaaaaaaaaaaagtataggagaaactgaagaatgtacacttttttagagggcacattttgctgtaaatctggaaatttgatagacttgactgtgtttgtgaaaactgagcattaaaggttttgattgatcctttctttccatttaatctctgagacgtaaatatgtgaggtgtgctgctgtgctgggttaacagcttccttccctttctgtgtagcagtcttgaaatgttctgtttaaatcagtaggcttaatgtgttctgggtatttatctccttgtattttaaatatatgtagttgcaaatagcaccaggaattagatttctgtacacccctaatctagccttgtgagcttcgctagttaatgtgtgctcactttccctccatttgttacgtgagagaatgcgtctgctgatcactgaagtgtcccttttagcttctgattcattgggttctgttgggcatctttaaatccaccttaacctgaggaatgtatgtgggcaaccaggccctgcatttttttatattctgaattttgcatgcttgcctgacttagtatttctgaattgatgttttttttaatggtataactatcttgattttcactgaaattatatggttctgtcactactctgtaaattaatccgaaacttttaaggtaactgggatgatctgcttgtaaaaatgcttgttgccttttgctttatcttcagtgtacctccttaatcctgcttcaacttgattatcttgtgaaacgatgagagtaagttgcaaccttgtgactgaaaacttgaaaagagtggagcaggtgggacctcttattctcaaatagtgacatattctccgtagtcacagtttcagaactgagtaaggatccttggtacttggtggcatctgttgaactgaggagcatttctcattgtaaagattgcctttgttctgtctaaaagtctggagaaatcccaaagacttttcctatgtactaggcattttattttgattgacttacaaactcttcttaatcattatcaatctcggtttttttgtggtgcagtggaaggagaaataggtctagtttctgcctctgattagccgcacagccttgaacaaatcacatttcatctttgaacttacctctactgttagactaggcgactcacatttgaggacttttctcgggtatcttgagggtttgtgatcctgaacccttaaacagtgcttttttgttacacaggagggcttttttggggggatgaccagtacagacatgccagttagttttactagtgggatcccaaatccaaagcagtgtagtggtgattggtcagtgactaaccaggcagctaagaagtcttaggcagcagcccagacatgtatagaggggcagttagagggagaacaggggtgggaaagggagcaaggggcagatagctcagcaaggaaagaatgggctcagaaaaaggagggctggctggaggagtgaggggcagcttaagtttggggagggtagaaacgccgtttccttgggaactggagtgcagtatgagctgggtgtcacttggctctgaacatactggctttgctgtaatgcttgaaaaggcgttggtatcttcattttacagttcattaacccaagtacgttttcttatttaaatgacaactttggtgctttaaaatgaggtaccactttttaaagctagctgtgtcgagttaaagaaaaaatcagcagttttttctcccagaaatgtaattgccaaacactattcatccccatcttaagttttacaaggtgatgtaatcagcttgttgtagtgatgctggccaaatggtgctcagcaggtgagaacaaaaaaaccccagatctcagtgaactaatacacagcttgagcgtttccatgtgctaatgttgcacacttactaaaaaactttggaaatggaaaataatgtattagtgcaacagttgatgtgcttctttgggcaaagatatagttttgttccacaatttgtacttaaaagcgaaagaacattgaaaacatagacttactggctgtagcaatgctggcctgttaactgataactagaacttaggttcacgtttatgtaaagtgtgtaaaacctagtagagcttgcatagtcggcactcagtaaatgtttggttccttttgccccttggtaagtttattttaccatcctcccacctgccattctgactttattaaatcaacatgtggaccagagtgttaatgagatgttattgcagaagagattgagaaaattggtatatcatgcagataacatacaaaatctttttgtaacgtaaaaaatgcagttttattattgcttgtgcctcaactgtttaagtgaatattaaagggcttggagaaaactttggcttggcgtatgtttggagaagtgaactctgctgaatttattgagtctaaagctgtgggttttttgttgttaacgtctttgaggatgtctagggccgcaggcttccctgccagaagaatgcacatttgcttcagattccaggtgaagaaaatccctgtggtagtgtcagcgcctgagggcttccaggtggtggtgggcccagcgtcaggagatagcagtcacctgggaggcccgttacaacaggttcgtgagaggagcccagtggtggtggtgctgacgtgcgaaacatgaaggcttgttagagaaaccagctgtgttaaggtgacagaatgtgtacgttagcactgtaaaaagcagctaattggtagcagaacgtgctagctgagaatacgttgtattctacatcactgataatgatctgaagtgtacaagtcatcagtatcagatctatgagagtttttgtagttttgctctaacataaatttctctttgccacctccaaagttattatattaatagtaaaagtaatgctttggagagggtggaagggggtatgccctag

SEQ ID NO: 5262 - DNA, 1123 bp, Homo sapiens
atacttttttgatatcaatagaattgctcaattaatttgacctaaagagtcacagtactcaaattgccaacagactgggaaggggtaaaaatcagtgagtagggacaggcatggtggctcatgcctgtattcccagcactttggggaactgaggcaggaggattgctggaagccaggagttcgagaccagcatcgataacaaagtgagaccctcatctctacagtaaatgagaaaataaaccaggtgcagtagtatgcacctgtagccagctactcagagactgaagtaggaggataccttgaacccaggagtttgaggctctagtgagctgtgatggtgccactgcatttcagtctgggcaacagaatgatatgctgtctcttaaaaactatatacataaaatctgtaactgcagaggagtacaagataggcaccagtcaggaaacatttccaagtctcctacaggcatcacactgcaatttctccatcaatctgagagagaggacccaggcattggggaaagggaaagcattccccctcagtgctaaagcagtgctgcatactgagttgctctgctccttgcatcgcataacactgggtttgatcttcctatgctgatagatagattttatgatattctccatgctgttgtattaacaaaagataccacttacgacgatctggctatccagtcagcaaaagttgtagcaacatccactttgcacaagaagggagctcaaaatgacaagatcactgcaactgaggttgtgtcagtgtatcttcagcattgttgctaaatctgcagatacagtaatcaacagtgctagttcagaagagatttaattatagtatgtattcagaagcaggaactgacttagccagtcttttgattactgtaattctaaagtgaccatcagtggatcagtgtgcagccctgggtcggatcccttgtgatgggtatcactacatcatcatttcaatacctgggaaaggaattggccaagatggtgcctgggaacccagatgacaatgacctacacaattggagtatcctgaaacattgtgtagatgggacaatcatagtcctcacattggcagtggagattcacctgtttctgctga

SEQ ID NO: 5263 - DNA, 1067 bp, Homo sapiens
ccctagtagctggactataggcatgcaccaccatgcctagctaatcttttattttttttatagagagaggctgaggtaggaggatcacttgatcctgagaggtgaaggcactgagctgtgatcacactactgcactacagcctgggcgacagagtgagaccctgtctcaaaaaacagtcttttagatgcatgtaaaatgtaggctgggtgcggtggctcatacctgtaatcctagcactttgggaggccgaggcgggtggatcatctgaggtcaggagtttgagaccagcctggccaacattgcgaaaccctatctctactaaaaatacaaaaattagctgggcatggtggcgggcacccagctactcgggaggctgaggcaggagaatcgcttgaatccgggaggtgggagttgcagtgagctgggattgtgccactgcactccagcctgggtgacagaatgagactctgtctcaaaaaacaaaaaaacaaaaacaacaaaatctgtataaaataatgttgaatcataaggacaaattgcttacagttgtataaaaatctacaataatggcatccgaaaatattgtaacgtgcgtagacggtatagattttgcactcttttctctttacattcgagttagagctttctaagaattattcaactacaaactcaagttttttcttttattcatttgaatgtagatgaactcttaattcctacaagtattcaggagtaaagttcttctatcagatttttttagaatgagtgatttggttttttgttgttttatttttattgatatctgtgtattggttatatcccctggcataattgtggtgtcatttattaaatattttatttccagttacctgaccttaaagatgctgaagctgttcagaagttcttccttgaagaaatacagcttggtgaagagttactagctcaaggtaatagtcattgaaaagctaaggaaatgggtagaatttttctcactgatagaaatttataatgataaggggctttgtttgtgtaatttggctgttagaaaaggtactccaagtatctc

SEQ ID NO: 5264 - DNA, 1511 bp, Homo sapiens
gccttacagtggtagcactctattatgggagacgagtgggtatctgatgctggtgtgatgaaatccagtttatgagggttgactaagaaaaggtaccttgaccatagtaaatgaaccttctgtctacaggtagggagacctcttttttgagacagagtgtcgctctgttgcccaggctgaagtgcagtggcacagtctctgctcactgcaacctccgcctcccgggttcaagcaattctcctgcctcagcctcctgagtagctgggactacaggcgcccgccaccatgcccggctaatttttgtatttttagtagagatggggtttcactatgttggccaggctggtctcgaactcctgaccttgtgatctgcctggctcagcctcctaaagtgctgggattaaagcatgagccactgggcccggccctcagacctctttagtcatgcattgaagcttggatttgtagagtgctttaaggttttcagaggacatttgcttgtttcatggcttttgtttctcactgtagtcctgtaaggttagaccttatcttgggagagtgagagatttgcctaagatcacccagctaataagtattagctaataataagtattggagccttacattttcttaactatgtcagcagttactctctatgtcattggtagtttttagtgattatcactttaggtgtagtcctgcatcagtatccttgagtgactggttccaggcctcccctggataccaaattctgatgatgctcaagtacctttaagtggtatagtattttcatgtaaccatcatatgcctcctgtacactttagattttttctttcatttaagaatgccagtttgcaacattcagtaaagatataatctggcatatttcagtaataaaactccctaatactagtggcctaattcttgcccctgttacatatcctttgttggttggaaggggggacttgatctgcttattgtaattactttagaagtccagctattggagctatctccatcttgcaaattgctagatcttctgccccaaagggaaggagaacgctccagtgcagtgtcacatttcctacagctcattgaccagaacatgtcatatgctcttgacagatcacagggagggatagattcctagagttagaaatgttttgcaaatggaattaatgactgccacagcagttagaattcttttgattcccatttttataatgacaaaatgtaaatataactttgcatttcttgcaggaagaaagaaacagaagcttgccaaggagagagctgggctttccaaggtaatagtctggtttctgtttaaattatatattttgtagaaatattattttaaaatctgtaattggaaatgtaattaaaatgtaattggaaaaagctagttgatactggacattgcttttttattttaaaatacagcttatttttaggagtaggtgaataatgtagttccaatgacagttatcgagtccttcattatttctttt

SEQ ID NO: 5265 - DNA, 1024 bp, Homo sapiens
ccgaccgctctgagggttcgtggcccaccgctccttcgcggtccctgccgccaccgtccacgctcagcgttgtagagaagatggtgggtcggaacagcgccatcgccgccggtgtatgcggggcccttttcattgggtactgcatctacttcgaccgcaaaagacgaagtgaccccaacttcaagaacaggcttcgagaacgtgagtgggtcctctctcccctggccaggcttgctgccttcggccgccgcccttcacaggaggggtcattgcctcccaccagcctgtgggccgcgcagggcgaccgcgtggtgcggccctcaataggcgatggcgctggctgcgccgctccgggggctctagtgccccgtaggaattccattttggaggaaggatttttcccgttttgttttccccagacactttagccgtgcaaatgcactcttgatttctgttgcaatctcgggtgtgtgtggcctggggaggaggttgtctctttttttgtcgttcatctttttaaacctctactcttaactaaaaagtcgtgcatttttgtcgcaaattttagtctgaggctaaatccgcatgctcagtgcagtatcattgttgcattcttttttttgagacggaatctcgctctgtcgcccaggctgtagtgcagtggcgcgatctcggctcactgcaacctccgcctcccgagttcaagcgcttctcctgcctcagtctccccagtagctgggattacagtcgggcgtcaccacgcccggtgattttttgtgtttagtagagacggggtttcaccgtgttggtcaggctagtctcgaactcctgacctcagatgatccgcctggctcattgctgcattcttaaaccctcttggtagcttcgttctaagtgcttccaagatatgagtgaatgctatagaaattgcaggggagtccaaagggctgcgcttctcccgtggctcagtcttatttcatacctgcgacatcttttaagagaggtctaccagaggggaatcgtg

SEQ ID NO: 5266 - DNA, 1125 bp, Homo sapiens
cctggccaacgtggtgaaaccccgtctctactaaaaatacaaaaattagccaggagtggtggcgtgcgcctgtaatcccagctattctggaggctgaagcaggagaatcacttgaacatgggagttagaggttgcagtgagccgagatcatgccattgcactccagcctggactgcaagagagaaactccgtctcaaaataaaaaaagtgctattgcttgtcagttggcttggtagtctggtgggagtgggcgcagcagggtctctgctgtcttgtcttagtgtttccgtgtctcaggagtgcacctgatcagggcttttttcccggggcagccaagctgtgccaaatgccttgtacctttagtggggattatgcagaggatgtttcccacctctcccccggtagctggactcctcccttcctccggctgtaggggtcttctctgtgccctggagtgacagggtttgctatccctcccctagcagcttagccttctcctccatcaagagaatgtgtccggaattggtgggttcttggtctcactgacttcaagaatgaagccgcggaccctcgcggtgagtgttacagctcttaaggtggtgcgtcgggagtctgttccttctgatgttcggatttgttcggagtttcttccttctggtgggttcgtggtctcactggctcaggagtaaagctgcagaccttcgcagtgagtgttacagctcttaaggcagcgcgtctggagttgttcgttcctcccggtggcctcgtggtctcgctggcttcaggagtgaagctgcagatctttgcggtgagtgttacagctcataaaagcagcgtggacccaaagagtgagcagtagcaagatttattgcaaagagtgaaaggacaaagcttccacagtgtggaaggggacccgagtggcttgccactgctggctagggcagcctgcttttattctcttatctggccccacccacatcctgctgattggtagagccgagtggtctgttttgacagggtgctgattggtgcatttacaatccctgagctagatacaaaggttctccatgtccccatcagattagttagatacagagtatcgacacaaaggttctccaaggcccc

SEQ ID NO: 5267 - DNA, 2257 bp, Homo sapiens
tgcctactgatttttctgtggtatttagtggcacccaggctgcaggttttgtggttgcctttgactcttcattggctcacccatgctagtgtttgccactcctgtccgtttttcaactgtgatttcttcctaatatgagtcattcctttcttttttccttgtcctacctaagttctcattacctcctgtcagaatagtcgcagaggcctattgtagttccttaccttcagtcttcctctaatttgtccaacaaaacactgtgaactcagtcttcctgaagctcttcttcccggaacccttacctctttccctgccttgcattaatgaaacgcccttccccccatccccccagccgccacacacacacccctcacggggcctgctattgccttctcccctttggggagcctaccttgattctccccagtctctaggctaccagtgtgtccctgctatgcatttgacagcacccatccctcattacagtacttagtacactctactgaaattgtcgtttgcctcctccaccagactgtaagctgtggttacaaatactctgtcttacttcttcttgggttaccagcacctgtacattgtgttaattattctgtcagtgaaatacatccttaattcttagcttggcagttctccagtgtggccctgcctctcctgtgttcctctacacgtgggttttctcacctttgtccctttgccagtccatttgttttgcctggaatccttccttaaagtaccatttttgcctatgaaagtatttttcagtatgtggctaaaaatgtcccttcttcaaagcttttccgatactttatatcattaagtgatattttttcctctgcattattcctgtactttattgccttatgttgtacttatgtattaatatctttaatgacaggatgtaggccgggtgcagtggttgatgcctgtaacccagcactttgggaggccaaggcagatcacttgagttcagaagttcgagaccagcctggccaacatggcaaaactacgtttctactaaaaatacgaaaactagctgggcatggtggcgggggcctgtaatcccagctactcgggaggctgagatgggagaatcgcttgaacctgagaggcggaagttgcagtgagccgagattgtgccactgcactccagcctgggcgacaaagcgagattctgtctcaaaaacaaacaaaataaaacaaaaccaaacaaataacgggacgtagacgctgtacagaaggcacccaataaatgtgttttgatgatgtcattcacatgttgattattcatttagccatttctgtgtcttgtactgtttttttgaggtttgagagtttgactatgttagcaattttagcaagataaactgcaaacagaagaaatagttaaaatttcatagttttactatgtaaactatcaggttactgagaaagaaaataggttttccagaaaagatttataataactaccctacatggcatttatgttctagattgtgaacttgcagggttggtatcttttcaccttgatcttctcagtacctggttgcatttggcatgttgtcgacagctgtagttgttgacgtgtatttctgcctcttccataaagttttccctacctgccccatccactcttaaaggaggctatatatgactggaaataaagtgaacctgaatataaaggggattcccttacctgcatgatggacaccatgcatttttttggctaatatataaactcttagagatacaggtgatatgtctttttatattattcatcagttcagttagacatatttaaaaatttattagaatacacgataaaatgttaatttataaacatttctttttccttaacatttttcctttttttttttttttttttgagacggagtctcgttctgtcgcccaggctggagtgcagtggtgccatctgggctcactgcaagctccgcctcccgggttcacgccattctcctgcctcagcctcctgagtagctgggactacaggcgcccgccaccacgtctggctaatttttttgtatttctagtagagatggggtttcaccgtgttagccaggatggtctcaacctcctgacctcgtgatccgcccgccttggcctcccaaagtgctgggattacaggtgtgagccaccgcgcccggccttttccttacatttttcatgtgtctttcatcgtcggtgtctcttcctggagtcctccctgtaggagtcatctgat

SEQ ID NO: 5268 - DNA, 1091 bp, Homo sapiens
tcaccagaaacaagggcagaaaaggaaaaattctcaacctggtgttaaagtagcagatagaaaaatacttgatgacacagaagacacagttgtcagtcaaagaaagaaaattcaaatcaaccaagaagaagagagattaaagaatgagagaactgtgtttgttgggaatttgcctgttacatgtaataagaaggtgagtttgtatatggtaaaagttcagagaagttaataactttgttcttcctgtgttgaataagcattcaatagtaagtcatggatataacttcattgtaaattattacataaatcatcctaatatgaatggattccagtatccaccccctccttttcattcctgtagtccctgccaattcaggcttttgcagattatatttgaatattgcagtgacctcctgcctggtttctttctttcagccttgtctcctgttatatgccactagaaagtaagctccatatgtttaaagatgtctttcctttttcttttctttttcaggacaggttctcactgtcacctaggctggagtgtagtggcatgatcattgctcactgcagcctcaaactcctggactcaagtgatcttactgcctcagcctcctgagtagctgggactacaggcgcacgccaccgtgcctggctaatttttgtgtttttttttttgtgactatgttgcccaggctggtctcaaactcctgggcttaagtgatctgccctccttagcctcccaaggtgctgggacttcaagcatgagccactgggcctgatcctcttttttcatcattctgtctctctctctctttttttttttttgagacagagtctcgctctgttgcccaggctggagtgcagtggcgcgatctctgttcactgcaagctccgcctcctgggttcacacccttctcctgcctcagcctcctgagtagctgggactacaagcgcccgccaccacgcccagctaattttttgtatttttagtagagacggggtttcactgtgctagccaggatggtctcgatttcctgaccttgtgatccgtccgcctcggcctcccaaagtgctgggattacaggcat

SEQ ID NO: 5269 - DNA, 1214 bp, Homo sapiens
tttgagacggagttttgctctttttgtccagactggagtgcagtggcctgatctcagctcactgcaacctccacctcccgggtttaagtgatttttcctgcctcaggcctcccgtggagctgagattacaggtgccaccatgcccggttaattttttgtgtttttagtagagacagagtttcatcatgttggccaggttggtcttgaactcctgacctcaggtgatccacccacctcagcctcctaaagtgcagggattataggcatgagccactgcacctggcctggtttgctttttaaaaaaaaaatttttttttttttttttgagctggagtctcactctgtcgccaaggctggagtgcagtggcgcaatcttgactcactgcaacctccgcctcctgggttcaagtgattcttctgcctcagcctactgagcagctgggactatgggcgcgccatcacacccagctgatttttgtattcttagtagagacggggtgtcaccatattgaccagtctggtctcgaactcttgacctcatgatccacttgcctccgcctcccaaggtgctgggattacatacgtgagccatcacacctggccgagtttggtgttcttaaatttattcatttccctcattaactttttttttttttttttgagacaaggtctggctctgtcacccaggttggagtgcagtggtgcgattgcggctcactgcaatctttgcttcccagactcaatccagccgcccacctcagcctcctgtgttgcttagactataggcatgccccaccatgcccagctaatttttgtatgttttgtagagacgggattttgccatgttgcccaggctggtcgcaaactgctggactcaagtgatccagtcagcattttttttttttttttagtaaaaaaatagaaacagggtcttgctatgttgcccaggctagtcctgaactcctgggctcaaaccatcctcctacctccgtctccccaagtgctaggattacaggcatgacccaccatgcccggccagcataacgttgtttaacagtgtatttgaatcaagatgcaaatagtgatcccatcacgtgtacctagctaacagtcttcattcctctcttctttgccactctcctcaagccccttatttccttttcccttttctcatttcaactgaagacctttgtaccagttctggagctgttaat

SEQ ID NO: 5270 - DNA, 1027 bp, Homo sapiens
ttctgatatgatgtcggtaatttgatttaaaagtatctggtgttaggggtgaggaatggataggggtgcagatgatacaggttttgccataaattgatgattactgaagctggataatgagtacatggggttcactatccttctctctatacttttgtatatgtgagaaatcttcataaatcttcatttaaaaaaaggtatatatatatatgttttaggtatacatatatatatatatatatatatatatatatatatatatatattttttttttttttttttttttttttttttaaatagagacgaggtctcattatgttgcccaggctaatcttgaactcctgagctcaagactgagctgatccttccacctctacttcccaaagtgctaggattacaggtgtgagccaccacacccagccaatatgtatatttttttaatactactctagagtttttcacacaaggaaataccttaagtattcttaggagattgaagattgctttagagctttttaaaattgccttctaatttaaatttttacacactctttaaaaaaacctaaaaaataacagagaacagaagagaaaaatttatccacagtcttgttactcacaaaatgtgtacaatttagcattttggtgtctttccaggttttttgttttgttttgtttttgtgtttttgttatttttagacagagtctcactctgttgcccaggctagcgtgcagtggcacaatctcggctcactccaacctccaccttccagattcaagcgattatcctgccccagcctcccgagtagctgggattgcaggcacccgccaccatgcccagctaatttttgtagttttagtagagacagggtttcaccatcttggccaggctggtatcgaactcctgacctcgtgatccgcccacctcggcctcccaaagtgctaggattacaggtgtgagccaccgtgcccagccccagttttatttttaagtgtgattttttactgtggtaatactgtatatggatg

SEQ ID NO: 5271 - DNA, 1018 bp, Homo sapiens
gagtgcggtggtgcgatcttggctcactgtaatcttcagcctcctgggttcaagccatcctcctgcctcagcctcccaagtagctgggattacaggcacgcgccaccacacccagctaatttttttgtgtgtttagtagagacagggtttcaccatgttggccaggatggtctccatctcctgacctcatgatccgcccgcctcggcctcccaaagtgctgggattacaggcatgagccactgcgcctggcctttttttttgagacagagtctctctgtcgcccaggctagagtgcagtgcagtggcatagtctctgctcactgcaacctccatctccctggttcaaatgattctcctgcctcaacctcccgagtagttgggattacagacgcccaccaccacacctggctaatttttttgttgttgttgtatttttagtagacatggggtttcaccatgttggccaggctggccttgaactcctgacctcaggtgatccatccgcctctgcctcgcaaagtgctgggattttgggcatgagccaccatgcccagccccaatcctagtaactcttcatgccaatactctgaaaaagaggctttaccaaacttaatagatgtactaatgtacaatgtatagaccttatttggatcccggtttgaataaataaattggttaaagaaaaattttaaggcagttgaggcaaatgccaacactgactagatatttctgatatggctgggcgcagtggctcatgcctgtaatcccagcactttgggaggctgaggtgggtggatcacgaggtcaggagttcgagaccagcctgaccagcatggtgaaaccctgtctctactaataaaacaaaaaattagctgcgcgtggtggcacgcgcttgtagtcccagctactcaggaggctgaggcaggagaattgcttgcacctggcaggtggaggttgcagtgagccgaggttgcgccactgcactccagcctgggcgacagagtgagaccccatccc

SEQ ID NO: 5272 - DNA, 1585 bp, Homo sapiens
tacacttttagcttggatgacaaagtgagactcaaaaaaaaaaaaagaagaatattaacttggaggtagcacaatctgggattatatcctgactccactattttctcagatatattatgataaaaatattatacttatataaacttggagaagcttttttcttttttatttcagctttattaaggtacagtttacataaaagtgatgacttttatgtttaaaatgtgatgggttttgacaaaagtatacagtgttacaaccatcaccgtgatcgtaatagaacatttccatcattggaagagcctcttagcctctttgaaacccagtttctttgcatgttacatagagataaaagccagcaacctcgggtggctgtatacacaggacctaatatatacagtccctggcacatagaagacattgctagtgttcttatcatactcatcatttttttttctgttattttctagcttctgaaagttctgctgaagacagtgagcaggaagatgagagaggtgctcaagacatggataataatggcaaagaggaatctaagattgatcatttgaccaacaacagaaatgatcttatttcaaaggaggaacagaacagttcatctttgctagaagaaaacaaagttcatgcagatttggtaatatccaaaccagtgtcaaaatctccagaaagattaaggaaagatatagaagtattatccgaagatactgattatgaagaagatgaagtcacaaaaaagagaaaggatgtcaagaaggacacaacagataaatcttcaaaaccacaaataaaacgtggtaaaagaaggtattgcaatacagaagagtgtctaaaaactggatcacctggcaaaaaggaagagaaggccaagaacaaagaatcactttgcatggaaaacagtagcaacagctcttcagatgaagatgaagaagaaacaaaagcaaagatgacaccaactaagaaatacaatggtttggaggaaaaaagaaaatctctacggacaactggtttctattcaggattttcagaagtggcagaaaaaaggattaaacttttaaataactctgatgaaagacttcaaaacagcagggccaaagatcgaaaagatgtctggtcaagtattcagggacagtggcctaaaaaaacgctgaaagagcttttttcagactctgatactgaggctgcagcttccccaccgcatcctgccccagaggagggggtggcagaggagtcactgcagactgtggctgaagaggagagttgttcacccagtgtagaactagaaaaaccacctccagtcaatgtcgatagtaaacccattgaagaaaaaacagtagaggtcaatgacagaaaagcagaatttccaagtagtggcagtaattcagtgctaaatacccctcctactacacctgaatcgccttcatcagtcactgtaacagaaggcagccggcagcagtcttctgtaacagtatcagaaccactggctccaaaccaagaagaggttcgaagtatcaagagtgaaactgatagcacaattgaggtggatagtgttgctggggagctccaagac

SEQ ID NO: 5273 - DNA, 1015 bp, Homo sapiens
ctttgggaggctgaggtgggcggatcacgaggtcaggaaatcaagaccatcctggctaacacggtgaaaccctgtctctactaaagtacaaaaattagctgggtgtggtggcatgcacctgtagtcccagctactcaggaggctgaggcaggggaatcacttgaacctgggaggtggaggttgcagtgaactgagattgcaccactgcactccaacctgatgacagagcaagactcagtctcaaaaaaaaaaaaagcaaataactaaagaaaaattccagaactgacagacacaaatctttacattgaaattgctcactaggtaccgaataaattaatagagtcataccgtagtacatcattatgaaattataaaatatcaagaatgaaaaaatcaccacaaaggaatgagaaaccaaaggaaggttatggcttataaccccttaagcaaagaagcaatacattcggaaggattcagaactctgaaggaaacaatttttaacctagaattctgtacctcgtgaaactctcaatcaatgaagtttgagggtaaggatgtattcagataagtaaggacgatgaatatttatatcccatgtacctttttaaggaaactactcgatgagctctagtacagatgagataaccaaggaagaagaagatgtgagattcagttaacagtggacctagctcaaaagaaagcagtgaggaggattccccggatgacagctgttagagcagacccagagagataccacccagatgctactgcagaaaatagctctctagggtgcagagataggatgaataaggggaaattggatacaacgcttaatttaatgaaataaaataatgtaaaagagatacaaaggaagatgtaacatgcagaaaagtagttggaaactcttggaaaaataaaatgctgtataagaaaggaagtttatcaaatgtactacttatttctgcagggaaccacatttacatatgttataaatactatattgtaaaaatgaaag

SEQ ID NO: 5274 - DNA, 1338 bp, Homo sapiens
agatgaagatgatgaagaagcagaagaggaggaggaggaggaagaagaagaagaggatgaagatgatgatgacaacaatgaggaagaggagtttgagtgctatccaccaggcatgaaagtccaagtgcggtatggacgagggaaaaatcaaaaaatgtatgaagctagtattaaagattctgatgtcgaaggtggagaggtcctttacttggtgcattactgcggatggaatgtgaggtaacttgagttttagctagtgattattacctaaaaacaattataaaatacttttctatttaaaaacttaagtaatggattacagatttattagtattctaattgaggtcatagtaccttataaaaaatagtttttagcatgtaaatacctcacttagtgacttacaattaatgttttcactacttagaagatatccctaatgtctagaaaaccgaggtctacacacttgatttttatgtactacatgtagatcagcagacaaaacattgttgaaatgatcagaacttctggacatctacaaaccaattatcaggctgcttgctgtcttgcattttaaactacattgccacagtaacctcttttttgtattctgaagtcatttctttccttctgtagtcagggatttaaaatcctaggaaacattagctattttaagaaagccttatctccttattaacagctattgcattacagccttattcagaagtctcagaaatttattagtatctttgaaaaaatctggttgaacatgtaagcagacctgcttcactaaaatagaatgcactttttgactgctcctaacctagggaactgaaaggcaagagtgaaatttggttttaagtcatgttcaatgacttaagcatttttcttagataaattttctttggctttccaaagaaattttgtattttgattttatccaaaattggcaagccagttttgggatctattcattcagttatcttttaagaatcatttattttagaatatttgatagtatatttgaaatgtagcctataagacagatacctggaaagattaaccatagaagtttaagttgtggtttcatggtgtacctagtgtcttcaaggaggaatacagttctcatgctttatacttaaattatattctgtggtttgggaagttaataggaaggcatcatctcaaattctgtgtttgagtgttgcaaatgaaattttgattctctttaatcacttcccacaatgccctttctctaaagaaaatcacttctgagagttttgaggctgtccttactaacttttcattctactttcacatacatataaatgtactcatag

SEQ ID NO: 5275 - DNA, 1038 bp, Homo sapiens
tgagcatagtggctaacgcctgtagtcccagctactcaggaggctgaggcaggagaattgcttgaacccaggaggcggaggttatagtgagctgagattgcgccactgcacttcagcctgggcaacagagtaaggctgtctcaaaaaaacaaaaaaaaacaaaaaaaaacaaaaaaaggatgctgctgtgtgccccagggttactgtagtgactaaatgagatttactaaggagtccagcctcacacataagaaatgtgcaaaaaatagatgctattactaatacttttaatagctgttattgttatgactctgagcacagtgttttaaatgaattttttgacaaaattttttttttgcattgaaaagattagaaagaactagaataaattagaatgttaatatggctcaatatctgagagtttagacaaaagaaatgaatacacattaaaaataactctatagttatattttgaaatgttttcaccaaatgtaatttctcttcatgtttccagatacttatatggttttgaggagtactgtagatcagccaacattgaatttcagatggcattgccagagaaagttgttaacaagcaatgtaaggagtgtgaaaatgtaaaagaaataaaagttaaggaggaaaatgaaacagagatcaaagaaataaagatggaggaggagaggaatataataccaagagaagaaaagcctattgaggatgaaattgaaagaaaagaaaatattaagccctctctggtaaatcagatattgttaattgtcttttgctttctttggtatattttccatatcctctataaagttccaaaatcaatatattgtataatattattctttattatttgtttattttcttcattaagtgctacttttgtataatttttatcataacttcaaaatagctgttagctatttttgtctagagctttaaagtagcaggagtttcttaaaagtaatttataacttttaatattagaattggttgatacctcctgttgctaagagataaaccatggat

SEQ ID NO: 5276 - DNA, 1032 bp, Homo sapiens
ctttttttttttttaacttttctcatttttgctgtaagattttaagctgttttaggggaatatcctttctttcctcacttgataggccccccttttcctagcaatttctacacaaaagccttcaataaatatgtgtggaataaactgaaggtttacatacaataaatacagacagctttggggcaagtatagtgataaagtacagaattctccctgagttcgtggaattattttaatttcatttccgtacagtcagtgagtatgaggacttgaagacatggtttttctcctgttaagtgaaggtctgcattttatttttttagtctagagaaatagccaaaatattattttttttaaccaggagaattttcagttggaatggttcataagacagttgtaagttaaatgctgaaggtaatatgaacaagtggctatgtatccttcatatcttcaaggaggttcagttttagtgtgtctgtgcaggtgtgtacttctaatttatgttttgctagaaggaaattagaatactggtgtgtgattcttcaattcccttcccatgtgcccggagctgtgtagtgctaggtaccgggacaaaggttaagccaacccatgtaaacatggaacttatctttgggtacttactccctgttggaggagaaaaagcattaatcaaaccaagccatgtaaacatggaacttatccttggatacttactctccgttggaggagaaaaagcattaatcaaacaatcaaacatattttaaaatttgagtatattaagccctgtgaagatgtggtccagagtgcacccaataggggaatttaatctaccatctgtatgttcttttctctttatttggtatttttcatattgttttaaaagttttaacgtttttgaaagaccattcagagtattagtagtagtagtagtccataacattgtcctttaagaggaaagctgcttcatactgccagtattttgggtcactaatcccatttaataaactactgaaattaatcccatctcataaa

SEQ ID NO: 5277 - DNA, 1028 bp, Homo sapiens
gcggccacaacctcctgggctcaagcagttctcccacctcagcctccttagtagctgggaccataagtgttcaccacctcttctggcttatttttcaaaattatttgtagagatgaagtctcgctatgttgcccaggctcgtctcaaactcctgggctcaagtgatcctcctgccttggtctcccgaagtgctgggattacaggactggcccagtagggattttaaggatttttttttttaaatcaaactcttttaaatgttctccagatgctgtctttagtgacttgttatactaaaaaatgttctacttattgccttctaatccatgccagtagttattactaacatgcccagatacattaaaccataacaatgccagtttctgtttctgtttgtattctgaattttgaactgcctgaatcctccactaggctcctctaatttccagatcatgaaagtttatgttctgagagtgctgttactccaaagaagattcatttgcatttgaatatgattgtgacctcactagcaagatgacaaataacctcttctcaaggcagagtagattggctgtgttacatgagaaagctcctttgcttttttgatacttagaacagtgccttaagtatagttggcttttaataatgtctctcccaatttctctcttgcctgtttgccgaggcagaaaattctagttagaatatttctttggagttacttaaatttccaggaatatgcagatactcttctgttaatatttgtgactatgcagatatccctctggtttatgagatgtggatctaaaatttacttataacctaaagtagcttaggttttgtctcctaaagtagcttaaattttaagaagatacacagtggggccatgtaaaaaaccaaaaataaactttaaaaaattgtaagaagaatattaagaaatatagataacatccaaagattttcgtgttttgggaaggggttgagtttttttgttttgttttgttttttgtttttttgagacggagtctctc

SEQ ID NO: 5278 - DNA, 1024 bp, Homo sapiens
tatatcgtagtttaattggcagcttttttcttttttagtggtaggtgtggtttacaattagtgacttaaattagatgaaatatggtaactttatgtttgtatgaatttcagtaacataaaaataaaccatcatctctgtaaaggagagataatttactttttttaagtttaagaacagctgtgtaggctgagtgcggtggctcatgcttgtagtcctagcactttgggaggccaaggctggcggatcatctgaggtcaggagttcgagaccagcctggccaacatggtgaaaactcgtctctataaaaatacacacacatgaaattagctgggtggggtggtgcacgcctgtagtcccagctacttggaaggctgaggcaggagaatcacttgaacctgggaggcagaggttgcagtgagccaagattgcgccactgcactctagcctgtaaatataactgccaggaacttgagatttcagaaaacatttctccagagtatctggaaaatcacctggcttacccaaacaaaattgccacttgtggatatttgctaccaatgcccctatcattcttctctgtagtcctgtactcataagcttagctgcttagctgctcatacctattcttgaactgcttctgtcactaatttctacgtgatctgattgttaagtacaaaatcttctttaaaaagaatggtaataataaattaatatagacatttatttatattgagtgcttattacatgtgattttatgtgtaataggccacattggtattgtatgtatttaatatgtaatttatatttaattataatatgtaataaatgtataatataaaagtgaacatatgttttattagtatgataaactacactttacaaatgtgaagctatgctcagataagttaaataatttttcccaaggatgatggatctagtaagttatgaacctaaagtttgatctcagatattgattccatagctcatgctttttcacctgtttatataagacgcttctgatta

SEQ ID NO: 5279 - DNA, 1049 bp, Homo sapiens
aattaaagctattttggttatgggtaatagaacccatttcaggtgatgaaaagcagaaaagagaatctattataagggtacagagcatctcatggtacccaaagaggggaactccagtttggcttgaggaggcagttggaaagctagcaggaactaaggctagctattctctcagtcactcagagaacccacagtttcttatgtgcactttttccccctctgcatctgttttatttcttacttcctctcagcagactggttttctctacttctccctgtgcatgccagaaaatggctaccataggctgcatcacatcctttctctaccggctaattggttaacctagctttaacttcatagcagagtaaaaccgatcggcccagtttggatcaggtggctagcagtctaatgaattacttgttggcaaagcatattgccagaacatatctctttgttaagagaaataacttgtaattgatacttgtcatgttagtgacttagtctttgtaaagctgtgtgggcttctttgtcgtaaaaatttggtcatctgtaagatagtttgtccttattttacttattaaaatatgatttgttgggtccctcatatgtgcatagtcattgaataggcagagcggtctgcgcgcgtgcacacacacacacacacacacacacacacaaaattaggcctagtgttggattttcctactcttaccattgtgcctgtttttagtatgcatttgatttagcacatgataatcataattcaaagataagtctgcagcagacttaacatttatatatagagtgtttttaaggcagaaggtattatttaccctctttttagaagtggagaaactgagaatcagggagtaaaaatcagtcaactaataggttgcagatcgtagccatagctgagttgagatattctttacacaaattatggccttattcttctatatccttttacctctatgtgagtgtatatcaaactggacttctccgaaattctctttggcctagtttgcaagttctctgtgtagaataaaaa

SEQ ID NO: 5280 - DNA, 1438 bp, Homo sapiens
ctctaggattagaaaagttttggttgaaaatagaacacttaactgtaactaagagtcttcttttttcattatgtgttggcctttaaggcaccagaattatacttcagaaattccttgggagaatttgggttatgtcttaaaataaaaaatgttcatgttctttgtgctcccttttgatacctacccagaagcagcccatgtacaggtgcacaaggaagctggcatgaatatgtttgtggctgccctctttaatagggaaaaacagaaaaccacttaatatcaccagtagaggacaagctaaataaccatggcaaattcctacaatggttatagcacaaaattaattcgacagtttgtgtttactgatgtagaaagatctctaaaacattttttgaatgaaagaaaagttgaaagacagtatattaaatgtagtaccagttatgtaaaaatagattcacagaaatgttattaaatatggatacatgtacgtgtatgtaagtgaaggtctggaaaaaacctggaagaacatatgccaaaatgagaatagtgattattaatgggaattgagtgtagtaatttaggacttacttttttttttttgaaatggagtctcactctgtttttcaggctggagtgcagtggtgcaatctcagcttactgcaatctccgtctcctgagttcaagcagttctgcctcagcctcctgagtagctgtgactacaggtgcccaccaccacgcctggctaatttttatatttctttaatagagaaggggtttcgccatgttggccagcctggtcttgagaaattcctgacttcaggtgatccacccgccttggcctcccaaagtgctgggattacaggcatgagccactgcgcccagccacattaatgttttattatttttacaaggataatatgctcatagactgtacaactaaaggccaatttaaaatttatttggaaaaaatacattgttttgtacataggtccctgtaaaggcagagtaagactggaaaaataccctaaataaggagacagtagttatgtccccgagggatgtgggaacagagaagataaaaggagacatttgctttttgtatacttctgtatttttatagttttataaagcaaatgaattcatgcattaatttgtatgctgaagaaaggactaaattctttaggaccaggaattcatgtaagagtatctcattttgtcaagcttatttaacagtacttagtgaaaatagtagctgccggttgaattactgggtagagaataaaggtgtcaacagaaatagtttactaatttgctgataattaggcattaatttgcttgatgtgatgcatgtttattactttagggcaagtagaaaaataaaaataagtagattctttctcatataccatcatgaacactggtagtttctggtacattc

SEQ ID NO: 5281 - DNA, 1078 bp, Homo sapiens
tttcaattcatactgatatttccagttttcatgaaaaattacagaggttttgtttaacttattttatgatttatttatttattttatggtgaaaaatatgtctatttagtgttagccagctgggctcactttagatgatcccaattttgttggcaacgtcatcatagtcaggaaccggtagaacatgggccttctttccatcaggcctgatcagggtgttgatattggccatgtcagtgccacagagctttttcttagcctgtttgatctggtatttgttggccttgacatccacagtgaacacaagaatgttgttgactttctgttcttttcatggctgactcagtggtcaggggaaacttgatagcatagtggtcaagctggtttctcctggactggaccagtcttccaaggatatttgggctgcctccagaacagcagcagtgttttgggctgtccttaggtgggtgacgtgaagatcttctcttttttgtgtggctgtggatacggatacctttcagcactgctgttttggcctttagagcctttggtttggctttgacgttgggagagcaggggcttccctctttgcctgtgatgccttcttgatgagtacagccatgtaacttcttttatagttgtgtctttttttttttttgggacgtagtctcgctctgttgtccaggctggagtgcagtggcgtgatcttggctcaccgcaacctccacctcccaggttcaagcgattcccctgcctcagcctcccgagtagctgggattataggcaccctccaccatgcctggctaatttttgtatttttagtagagtcagggtttcactatattggccaggctgatctcgaactcctgacctccggatccgcctgccttggcctcccaaagtgctgggattacaggcgtgagcctccgtgcctggccttttttttttttaaattgagatggagtcttgctttgtccccccgcaggctagagtgcagtggcatgatctcggctcactacaacctctgcctcccaggttcaagcaattctcctgccttagcatcccaagtagctgggat

SEQ ID NO: 5282 - DNA, 1077 bp, Homo sapiens
tatattttttgcatcatacgtttaaaaattggttgctcctaaatgaagctttagaatcctttgcaagatagtactactgcttcaagcagctaaccaccaatgaacaagaattatgagttcaaactctggcatagaccaaccccctaacttggatctcctaactcataatccagagttcttttccagagaactgctccgcttttaaaaaccagtgccaggattcagatctcaaatgataccattaaacactgataggcaagaagcatttgtttctatgagtaaataactctctgatgtattagaggctggtgttaatttttgactaggctgaactctgagcgtttattatttcttcaggtattaaaccttcagataatttcaaaaacacagtttaggccaggcacagtggctcacgcctttaatctgagtactatgggaggcagaggtgggtggataacaaggtcaggagttcaagaaaccccgtctctactaaaaatacaaaaaatagctgggcgtggtggtgggctcctgtaatcccagctactcgggcggctgaggcaggagaatcgtttgaaccctggaggcggaggttgcagtgagccaagatcacgccattgcactccagcctgggtgacagggcaagactctgtctcaataaaaaacaaaaccaaaccacagtttatcccttaggaaaacaccaaaaagcttcttatgtacatgaacttgtattagggtcacactttaaggtggctctagaaagtataatgagagacttacagtaagactgctttttttttgacgtggcatctcactttgttgtctaggctggcttggaactcctgggttcaagccatcctcttgcctctgcctcccgagtagctttacaggaggattacaggtgtatgccactgtgctgggctgagactgcagtttttaatgaatgaaatgccactgtgctgggctgagactgcagtttttaatgaatgaaatgcctctgtgcatggattgaagccagcttttatggcaaacattaacagtatggtttggttccccatctctgtgccccttgagttataa

SEQ ID NO: 5283 - DNA, 1050 bp, Homo sapiens
actacatggaaccattgaaagttgttgagaattgcttgaacccaggagctggaggttgcggtgagctgagatcaggccactgcaaaaacaaggggagagctgaatgtaaggatggaaattccaggtaagaagtccaagtggaaaatgaataagggcctgaactaatgcattggaagtggagcagagaggatagatctgagcctttttgaagtagaattcagggccgggcacagtggctcacacctgtaatcccagcactttgggaggctgaggtgggtggatcatgaggtcaggagattgagaccatcctggctaacacagtgaaaccccgtctctactaaaaaaatacaaaaaatagaaattagccaggcttggtagcgggcgcctgtaggacgctgaggcaggagaatggtgcgaacctgggaggcggagcttgcagtgagccgagatcacgccactgcactccagcctgggcgacagagcaagagtctgtcttaaaagaagtagaattcaggacctagtaactcatcctggggtaggaagaagatggaggtttttttcttaggaaattagatagatgttactgtcatttgaagcatgctgtcattggacctgctagttaagatgtaagagtaagtaggtaggatgaagtcagaggcttggttaatctggtgtgaatgttaacctcatatctatgatatttgaagggatttaagatccataacatggcaaattttgtgctataaatttgtggtcctttagatgaataggtaatcttgtaaaatactaacatgttttctgtccaaattgctaaatctttgtttattgtaattaaaaaaaatactaggtgagtacctatgtcactgaagaatgtttttgccaagtcagccagtgaattcagtcattgaacacattgtgtactttccttgtaccggacattgttctgggttttgaggatgcagcagtgaatagaacaagagttcttaccctcgtggagtttactttctactatggtggacacacgttaagaaaaaaaataatgctaagtgc

SEQ ID NO: 5284 - DNA, 1106 bp, Homo sapiens
tcgaacttctgggctcaggtgactctcccgccttagcctcccaaagtgctgggattacaggcgagagtcaccgtgcctggtgtaatttctgtattacgatgatcattgagctacagaaggttttatgccatttattggatcttaccaaacatatttgtacttgggagcaagcttttaagtttgaattgtctgttgtattaacgacaacaaatctttaaattttattaagtgacagtttattgaggtgattgaaagttagattatgtagtaatactttttaggtgttgttttaaagttgaagtgttgtatgttttagcagttttcccatgtactacctttaagaatttatgtaaacaaatacattcccattactgtctaatatatgctatgttacttttttcacagtatgtttttgaggaatatgattcgtaatacataaggaatttgtgctgtaacatagatcgtgatgttggtgttatgttgaatttatttttcatgctcttgatagacttttaaaaatcagtggtgccggctgggcatggtggctcacgcctgtaatcacagcactttgggaggccgaggtaggaggatcacctgaggtcaagggagtttgagaccagcctggccagcgtagtaaaaccctgtctcttctaaaaatacaaaattagctgggcatggtggcacacacctgtaatcccagctattcggaaggctgaggcaggagaactgcttgaacccaggaggcggaggttgcagtgagctgaggttgcgccactgaactccagcctcggcgaaaaaagtgaaactctctctctcaaaaaaaaaaaaactaaataaaataaaataaaaatcagcagtaccacattataaggaggtggtagattattaaagtttgtaaataattccaagacttatttttattatgtcaggttgatttttactttttttttttaagacggacttttgctcttgttgcccaggccggagtgcagtggtgcgatctcggctcactgcaacctctgcctcccaggttcaagcagttctcctgcctcagcctcctgagtaactggaattataggcatgcaccatcatgccgggctaatttt

SEQ ID NO: 5285 - DNA, 2144 bp, Homo sapiens
gtggtctcctaagggggttcttttgggagtcgctgggcccggccaaggagcagaggaagatcgcggtggtggtccctgcggcgcccgaattcggggcctcggcctcccgggaacccccaccccccgcagccgctgtgtccgagccgccccctggctgggcggccgcacactcagcggtttagcggccgcggtcgggggcccgggcagggtgggggccgttccgcctccggggccctcggccctcacgttgtccccgcggcggggccagatgttgatctcgctcccacttgtcgggtctgagcccggaacgggacgtgggcaggggctctgtggcgggccggtcctgcccgcggcccacaggccctcctggcccctcggtggcccccggccggcctctcgctcggacgcggcgcgtgggggcgcggattcgctcggccgggcgccgaggccctaggggagagcggccggccctgcgccggacgccgggcttgttgtgagtttcttctctgacagaaatggcgtcattgtcgtagacgggaaactccgtcgggtctcgacaatggggacgggaagctgccgagctgtgtaggtggttgggtttgcggggatggcggggccggagggagccccgagtcggcgtgtgatggttcgggggctggcgcctggttgcggctctttcttcggggttcggacgtcgctcgcttctttccctccgcctccgccagtgcagaggggctcctgtggtgttgactgggtgtcttttgtttcccctccaggtgcagctgaacctggtgttttagaggataccttggtcccagagtcatcatgaaggtaagattgcctgcggaaaacgaatctctggggttatcgaattcaggaagtaggaggtttcgacgaggtcgtcgtgtggggcttccgagttttgcagaggaaggtgtgtttggtgacttggtgaccgagcccttccccagagagaccggggtcagctggcgggctttgctgtggagttggaggcagttataggatgtctcaactgaagatgattctcccatattgaacatctctttttgtagggaatgagaggaataacggcatgaattaaagtgttttaaaaggtaaaataaaaagcaagtcaggtaatctgaccctagaaactgaactgtattgtggttctatcagttacactgatgaaagagaatcttatttattgtgtgaacagtactgtaaaattttagcagaaaactctttgactcgtcacaaaaataatttaattgaaagatttaaaaagagaatttttgtgattttttacacaattcagagataccagttgtttcttgtatttccagtgacttggggttatatggtttatttttctttattgatctggttggtctgtaaataagtcagaggctctgttgcattatgatgtgtggaaaactgatggccaggttcctcttagatgtcaatatgttaactgagtggagaatagggtcaaaaaatttgcttaattgttggaagaaatgataacgataaaaatacaggtatttttgttacttgagagaatatgtatatgaatgctgtcttttttttttttaaacacatgctagaataaaaccttagatttttgaaaagtctggattcaactggtggaacttagacactagcttgtattttttcatccattacaaattcagaagtgcttgaaaagggtagagtgttcacaagtgtagaaatgcaacagatagcatgttagaatatcaacgttgtctacttttgacagttcctttgaactatttaaaaaaatatttcacttgtcctcagaatcaagactgctttgacaattttgcatccaaattaaaatttgtaatacttgtggttgtagaaggtaaaagctgtggctacttaaatcttggtctactatacagagtaattaagtttagtctaatttttttaaggttttctctttgagtttgggatgctgtaaactacctgaaacagtttattcctatctcatttcatgaagcatagacatgtttcaggaatgaatcccttttgttagtcacaaatcctagctataactctcatcacctgtgtaaaacagtggtgaaagtgcatttattaggtaactcgtatatgtaccttga

SEQ ID NO: 5286 - DNA, 1168 bp, Homo sapiens
accaaaatggaaactagagccctgggaagaaatcaagcacaaagctggctttagcttcagagatttctgttctggattcttgcagcttccactttggccatcgaaggtgcaggggacagaaggcacatgcagtgtctgtcagttagaagccctgcatagagctggggtcccagagcagctctcagtccaggacaagaaatcaacccacatctacatggtccactttgatagtctgattcctttgctgtactttgtctcatctttgaatataattcttttttgtatctggtaattctgggatctgtagtctttgctgggtctgattttgcagtttgttgtttctacaactgttgttcatggcgcttgttttctgatgcggtctttttttttttttttttttgtgaccatctcatgtctttggaaactgagtcctctatttaaaatgcattcctacagagaggatttacatatttacatttttttctgccatgcatctaggaatactaccatctatgaatacttcagatttttggcttggaactgttgggcttacacagactgactaccagccccagacctacctaagtgcaagctgtgggtaggcactgaggggagagagactcctttccatcccactgaggggcaagactgagacagacaagctgagtgtgttttgttttatcacccctgaggctgtggcccctcagagatcctagctctgtgtcagtctcccattagtctcctgaccctgggcttggccttccaaacccaaggatcagcagctgccttcaaggcacaggctgactcagcgctttctcctaccctgtttcttctttgatcacggagttgagccatgctttataaaggtttttaattttatccaacatttttgtgttgtcaaaacattgaatgagtttctctctgtgttctgctacattgctggaaatagaaaccaattcacgtagctaggaaatagtctagtggttaagaacttgagcttgggagtctttaatccctcctcttcatttaccagccctgtgacctggaacaagttttttaactcttcgtttgttcctcaattgttaagagggaaatagttcctacctcacagcattactgtgagatttaagtgagatatttacaaagcacttggtacagtccctgcaat

SEQ ID NO: 5287 - DNA, 1050 bp, Homo sapiens
agagtcagccccggatactctttagagcaagatatttcctaggcgtggaagtatcttagcctctcccttagtctccgctgccgctattgttggctgccaccttctctccctggatcgctgcagtaaccttcaacaggactctgatctgggacctgcgtccccatagctggcatcacccatctccacactacaaatgagtttcattatttcttcctcattatttcagttatcagtgacctaaatattctttatcatgaaatttctaattagcaaatattatgtatgccttctgctgttaattggaaataaactttagaaacatggggtgatgctatttggtgtggacccattattgttaaattcaccattcttggacctaatgaaattctaaatttattttattgagatttctgacatatgactggcaccctagcaaaactgcatttttaaacagatgtacagggactgtcaatgtgaaatgaaggagtcaattttgtctttagtcatgattatatattttacgtctagataatgaagtcactatcctttgccttccagaaggtcatttataatggtttaattgctagaagttgtttccaagggaaaatatgtttcaatgtaataagtcaggtttttttaagccataaaatattttgagtgtaatataaatagcatcggatgcatcttgtacaatagcgttctgtgtgagaggcccagatgtaacacctaattcattatgctgggcctttgttattaagaacacacggggcaaggttcaggcgtttaatagatttggcagcaggagttgaatgatgcctaagaagcatttgtttgaacatatgttccatttaagccagatattttccttcaatatgctctttctttgccttttaaaatcaggttagtacttctctgtgttatgccatttagtaaagaccaagtgatggccttagttgatagcagcaaaattttgttagagcaaatgttctcaacatttgaggaataagaaatttagataatgacaggtacagttttgaatgaaagtgttag

SEQ ID NO: 5288 - DNA, 1027 bp, Homo sapiens
tcaactttattttttcatcccaatccttttaacatgcaagatcagggtaatttttttaactgctatatttcattatgtgaatataccacaacttggctgttttttttttttctctcagtggacatttaggttggtcccatttttcttccacaattacaaacaatgctgtaattaatatcctcatgtgaaataatgttagtagggatatatctacaagtggcctcaactgaaccataaggtgtacacattttcagcctaaatagatattgccaaattgctttccagagtgggagcatccacttaatcctactggcagtgtatgagagttcccatttttctacctaaagttccaaacaactgcatgtgtttctgctgggttaccttgggaaaagaactttagtgtacatcatcagttctgaatggtaactttacaacagcatttttctccaactctcaacttttcctttatagaaggtgatgctctcttacacaaccttcattctcgccctcaaagacttattgatcatataaggaatctccatgaggaagatgccttactgaaggaggaaagcagcatctatgatgatattgtttttgtggatgttgtcgacacttatcgtaatgttcctgcaaaattattgaacttctatagatggtaggttgtaaaaatgttgggtagctagaacttgttttattgttagtttttttttttttgagatggggtcttactaggctgtaaggaaaccccttactaggggtttcctaggctggtcttgaactcctgagtgcaggcaaacctcctgccttagcctcctgagtaggtaagattacaggcacatgacactgtgccttattgttcttttgctatcgagacaatttatcaacttcaaaccactgagatttcagcaaataaaaacaaacctaaggacactgagcacctgggatatgacctattgtatcccagttccttgcgaaaactgagcttctaagatgctgccactttattttgataaagatccacaatgtg

SEQ ID NO: 5289 - DNA, 1049 bp, Homo sapiens
gcaagcaattatttaatagtggctatacctggtggggagctaagattatggatgattttaattttcttctttttgtatatctatcttctaaatgttccataataaacatatattagctttatataatagaaagaaaaaataaacttttagcaattaaaaaaattctctcctgttgtacaaaattctatttgtgttgaaaatatgtttaattttaaatccttttttttactgcatcaaggctgattgggtttgtttgctcggaagaatgatagtgattgtttgctggcatatcatcagcaaagagtaacagaagagaagtaggtagtgtattccatttgcgagaggaagttcatcatcgtattccctccacacttggtgattgcctggagtcacacgtcggcagtatagcttgtccagtaagcaggtcgcctgtaaggttttcattgtgtagctcactgaagcataaatctcagtgggcatcacaagtgattcttcacaagtgaagactactgtgtgtttctcttaaaatatttatgttttggctgggcgtggtggctcacatctgtaatcccagcactttgggaggccgaggcgggtggatcatgaggtcaggaaatccagaccatcctggctaacatggtgaaaccccatctctactaaaaatacaaaaaattagccaggtgtggtggcgcatgcctgtagtcccagctaccagaaggctgaggcaggagaatcacttgaacctgggaggcagaggttgtagtgagccaagatcataccactgcactccagcctgagtgacagagacagagcgagactccgtctcaaaaaaaaaaaaaaaaaaaaatatatatatatatatatatatatatatatatatatatatatgtctctaattttatgttgtccttaatggtacagttggaacctgtaactaatttcagtaaaaagcagactatttttgttcacctaagtcactagcgacgttattgttagcattatggacgcttacatccttagacagaatttcactcctgttgcccaggctg

SEQ ID NO: 5290 - DNA, 1083 bp, Homo sapiens
agtagagaactacacaactgttttaatgacaaaggatgatgttgggtgtggattgatggaaagaccagacagagataccatttgggtaaaaattaaataatttgcttatctaaagaatgaaaagaaaaaaaagtcagtgcagacaggttaatgatagagatgggccatgtttccaagttaaataaaatttctccaaagggtgaacagttgtggatgatagcctgaaaatgtacctgtcaccttctgggtccctctaggtccagtcataactagatatgcactaaagaatgcctcgcctgccaggtgccctcattagtcctggagttaagccacacagtatggtcgcagagtgtgacagaatcaggatcagacataacaaattattcattcatcagcttcagcctttctaggctgttttagtctaggccgagtacattcctgaactcagtgctctggaaccacaatcggggtcagtttcctagacatctctgggattcactttagatcacctgtagagttcatcccgcagcatctcagctgggttaaggtgtggaggctagacaactgaccggccctggtgactaaccaagaaactttttcctacccattctgtggtgtgccattcacaatgtgttcagcaataggaaccacacatttttgtaacatactatgggtctttggaattgagtacaagtagttgaaactatatgttaattctgtcagtgtcaaagggatctccttttcatttgtatctgaacttccattttaaaaacttctgaatacgctactctcagcatactgcttataggatagcctgctccgcaaaagcagtcaaaaaataaattaaaaaaaacaaaacgacttttaaataaaagccaaactaaaacaggggtggaaaaaaaggaaaatgcagatatgctaaaggaaaacaacactactagaatctcatatttggagataatcacatttaacatttttgcttctatgtgttatagttgctaggattatgccgttcattctactttataatttacttactttaacatatcacgaacatcttttgatgtgctctattatttgtaa

SEQ ID NO: 5291 - DNA, 1086 bp, Homo sapiens
ttggggtatctgtagagattctttacagaattggaactttaggatccaggagactttatttttcagtgtgattcatacgcgtttggaagttccttatgcttagataaatcctgaattaccaaattttgaagttttggaaaactgctgattttaccagttaatttataataatcttgaagaaacaaatattatgaatcaactttctcttagaattattgtctaatttatttctgtaaaagaaaaaatagtaaaaaatgtaagacacaagtaacattatttatgccttaaaattaaaagtttgtaaaaattctggtgaggataaagaaagctgctccagcactttgggacaccacggtgggaggaggagcacaaaaccagcctgggcaacatagtgagctcccatgtctgaaaaaaaaaacattagccaagtattgtggctcatgcctgtagttccagctgcttgggaggctgaggtaggaggactgcttgggtccagcagttcgaggctgcagtaagctatgatctgcttccgctactgcactccagcctgggtgacagagcgagaccctgtctcaaaaacaaagacaacgaaagaaagctgatcctaactaggttctctgtgtcaccagggaaccaattttaggaagttgataagtttttaactgtctgtgtttattagcaattcccattatgttcagctgtgtttctaagggaggttatacttccaagtcttaaatatgctgattaggacttctggtattttaaggtttgttaaaactgtataattaagtaacacctcacttttataagcagtctccatggctctcaatccaagctttgccattttctagctgtgtgacctcctctgcctcagttttatcatctgtaaacttgggataaaagaatctccctcatggggattgacataaggatgaaataagttgatacatatgatgtatttagaataatagttcctagaaggtggaaggtactgaacattattttaaagagcctgctattttataaagctgggtttcaaacagctttttaaataaattggacaatatattcaggtctgtattacaa

SEQ ID NO: 5292 - DNA, 1057 bp, Homo sapiens
cagcagtgaagaccactgcccaggggttgccagaggggtcaatggatgaatttagtggctgtcctaacatggtggccatgagggagaccccagacctcagcagcttctgcatctctgggcatggtgagaagccaggagtggaaactaaggaggtcatcactccagcagttggggagggcacttggctttccttagaaggtggcagcaagggagggctcaatctcccaagtccaccggctttgagttgcagcactcaccatgtgattccattctcttgtgtgtccatcgcagccctgtgggcctcagagtccatttccttaagcctgtgctcctgctccttgtgatggcttcacaggccccccacaggctcagttttcccctgagcctcacccatctgggaaattcctatatgggcgtcctgtaacccactgcaaacttcaaacactcctattcaactcaacatacacgtttttaggatcttaaatactgaccatgctattaaaggtagaatcatagacgtcttagagtaaattgggaccttagagctctccaacgctcctgaattttacaaatgagggaagtgaagctcagaaaggttgagctgcttacccaaggtcacacagctagcttacgggcgggggtagatctagaagcctgatgttcaccggaactcatttctccatgccacattcttaacaaatgtaggttttgtcaggatttagactaactcatctgctaaacttcaagttgatttatttgagtgatgtgtttagttgattcattgtatatctctgctggaattatttctagccattgctaaagcggttaggtctgaaaatcagaagaatctctgtaaaatgctgaaagatgagccaatttttaaaacccagaagggaatgtgtatggcctgtgtagctggaggcttctaaacattttttttcttcatctgtggaacatttttatcattctggggaagatttagacattgaatgtactaaaaggatttcatttgactgctatgtatttacccctgcctgtaatccgctaataaatactc

SEQ ID NO: 5293 - DNA, 1044 bp, Homo sapiens
tcttcaggatataacataaaacagcttcattaaataaaggaagacctgaatctgcaggtccaaactgcttgccgtattccagaaaagagtgtgagagaaatgatcgacacagacacaaatacagctgagggtcttaatctcaaaaggaaagagtgatctctccatcaacaaataagtcaatagcaaaaagcaaaacaaaagcaatactaataataaagagcccattaagaatataggcagaagaggccaggcgcagtggctcgcacctgttatcccagcactttgggaggccgaggcggacggatcacctgaggtcaggagttcgagaccagcctggccaatgtggtaaaaccctgtctactgaaaatacaaaaatgagctgggcgtagtggtgggcgcctgtaatcccagctactcgggaggctgaggtgggagaatcgcttgaacctgggaggcgttcaaacactgcttcagtaaacaaggaaagaggtcatgaggaatctagtgagccaagatcgtgccattgcactccagcctgggcaacaagagcaaaattccatcttaaaacaacaaaaaaaaaagaatataggcagaagaagcagtcagttaggacaaatacccctaactttgattacattctttttttttttttgagacacggtctccctctgtcacccaggctggagtgcagtgtcgtgatcttggctcactgcagcttccgccttcccggctcgagctatcctcccacttcagcctcccaaatagctaagactaggttttgccatgttgcccaggcggtctctaactcctgagctcaaacaatccactcgccttggcctcccagagtgctaggattacaggcgtgagcccccacacccagccttggtacattcttaatatgtgttaggtgcttgaattttcacaccagccctgagatgttggtgctatcagtaccccatttcacagacaagaaaacaggcccaggccaggtgcagtggctcacacctgttgtcccagcactttgggaagccaaggcaggaggat

SEQ ID NO: 5294 - DNA, 1099 bp, Homo sapiens
ggccagacccacatagcagcaggcggaagggggttgaagaagacagtgctgaatggtcctcctagcgctaagcaggatgacaaagtcatgtgggaactcctcatggaagacggccaccaggtgccgaggccttggaccacacagacggtgaaagaggcgccagtggccaggctgctgaggacattgtggaggctgttgcttagggtgatcacccaggccagagtgctgataaagtagtggacacctttcagctccagcaggcactctggggagcctgcagaaccagcacagagagtgagcccaccacgaccttcccatccatcatggactgcttgccatccagttcactgtggcagtgctgagggctcatgtggtccaggtccccattctgcagcttctccatcacccccctcctcctggtgcttcttggaaggaagcctctcagaggcataatggctatgtctatgtgatgttcattttcctgtttgagaaacatcttcaagatctctgaaaaataaaaataaaagcccccagacaccactgcagacttggacacataatcatcttccagagggttgaaatcaaaagccccaggaatgagctaggagagcacattggactagaggattccaatcgccagagctatgacgtggagcagcagcttccttctgtaaaaggccttcttgaaggcaccacgatggtgcccatgagggagcagagggagatgacagtcacatagaggagatcgtatccccacacttcagttgcactagatggtcatcccagcattgaacagcatgacagagaatcctttttcttgccttatccagcttctagaggctgcacactccccttcgcttgtggcccccttccaccttcaaagccagcagtgtagcgtcctcagatctctctctgactctgacactgactcttctgctcgccctttcacttacaaggtcccttgtgataatccatggtaattggttccaccaggataatccatgataatggtcacacagaggagactatatccccacacttcaattgtgctcagcctcccctcttcgatctatgcattctctcgttctcctggtccaca

SEQ ID NO: 5295 - DNA, 1631 bp, Homo sapiens
ggcaactgcattgaaattctttaatttttcataccatatgggagaagttgggaccaatttttttgcttcttgtaattgcatttgacatttcagaagagttatcccaacttggtatggtgactcacacctgtaatcccagcactttgggaggccaaggtgggaggatggcttgaagccagttatttaagaccagcctgggcaacaaagcaagcccctgtcttcattttttttttaattggcggggcatggtggcacgtgcctagggtctcagctacccaggaggctgaagtgggaggatctcttgagcccaagagtttgaggctgtaatgagctgtgattgcaccattgcactccaacctaggcaacagagtgagaccccatctctaaaaacaaacaaacaaaaaagcaaaaaaaaaaaaaaaaaaattcaagcaaatgtttgactttatcgcttccaaggagaacaagtgccagttttgtcagagaggaaatgcatgtccatctcctgggtcctgctcagaaccaaaggaagctgaagactctacaaatgcaaaagtgaagggaatggcaaaccctgagagaagccatacagagaaaggaggctgggcttcctgcagggaagctgtctttaaaaagggccaccacctagcacctgcggatcaaagtgaatagggctgatgcgagtctcaatccccatattcagatatgcggggaaaagtgacttttctaaatgttttaaaacgcaaatcgaagcatgcattctgcctgtttggcctgcttgggttgcctcagtgtttccccagaacttacacaggaccaggtatctgtccactgggtgacccgtaggacaccatcatctgggtggggaccctttaggctggttgctgttggtggtcttgggtcctgcctggggacacaaaactctccacaagactgcccatgacctcctccgcttcagggcacccaatggccattttgttctagggtcttgtaacccccccccgtctcctaacaaggctttgtggcccccaaccaccccagcttgcagagagggtcactctccggtcctgcaggcaatgctcttcttcctcctgcttctggccaagacattttcctccgatactctgaattctttctcacctctggggtttaggcttttggaaacaaaagccagaaagactcttgggccatgtctggttttttgttgttgttgttgttgttgtctttgttgttgttgttgagacagagtttcgctcttgttgcccaggctggagtgcgatggcacaatctcagcccactgcaacctccacctcccgggttcaagccattctcctgcctcagcctcctgagtagctgggattacaggtgtgtgccaccacgcccagctaattttgtatttgtagtagagacggggtttcttcatgttcgtcgggctggtatcgaactcctgacctcaggtgatcctcccacctcggcctcccaaagtgctgagattataggcatgagccaccacgcccggccccatatctgtattttaacccatcacacccatcccttccttgaatggggaagtattggttgatatcacaaaatactatccagtctcatggttgaaactaaggatcctgatt

SEQ ID NO: 5296 - DNA, 1035 bp, Homo sapiens
gttatcagatttaacctatcaaaaattttgactatttattggatatcatccaagtgatcttaaaattaaaatatatatatatatgtctatgtatgtatatacgtacagacaatcctttgtatctgtgggtttcacatccgtggattcaaccaacctcagattgaaaatatctggggaggaaaatgaatggttgcatctgtacttagtatgtacagacttttttcttattattatccaaacaatacagtataacaactatttatatagcacttatattgtatttggtattataaataatctagaggtgatttaaagaatacaggaggaggccaggcacggtggctatgcctgtaatccctgcactttgggaggccgaggtgggtagatcacgagatcaggagatcaaaaccatcctggctaacacagtgaaaccccatctctactaaaaattcaaaaatttagccagacatggtggcactcgcctgtagtcccagctacccaggaggctgaggcaggagaatcgcttgaaggaagcggaggttgcagtgagctgagattgtaccgctgcactccagtctgggcaacagagcgagactccatctcaaaagaaaaaaaaaaaagaatacaggaggatgtgcagaggttatatgcaaatactacaccattttatatcaaggacttgagcatccatggattttgatatcctcaggggtcctggaaccaatccctctcagatacctagggacaactatattatgtgcctgtgctgtatgtgtaacatcttctcaaaagttacattgtcaagctcattcctcctgatcataatttctcagttcttatgatgggatatggtttttatagtgataagatgtgaaatgtattaaactgtgaaaatgtaatcagtgatttctgggggggttgtatgtgtgtttaccattctatcactggatcaaaatatatgcctttgaactaaggtgagacatccatagcctggtcctctgttgccaatggcaagatagagttagtaaaatattc

SEQ ID NO: 5297 - DNA, 1072 bp, Homo sapiens
tactacctcccttttgtgaaacactttcttctggtggctttcagaatactagtctcctgatttttcttctaggtcactggtgggtccttctcagtcttttgctggttcctcctctttttgtctacttcttaacgatggcataccttaggtctcttgtcttttgctaccttctcttctctagctgtactaggtgatcttatccaaagtcatggttattccctaatgactcctaaatttatttttccagttccaaattataccctgaaatccagacttggatatctaattgcctacacagcattttcaacttaacacagccaaaacaaaacttgattctacattcctccaaacttgttccttctctggtatgcctcatctctgaatttcagaattcacccagttgacaggtcaaaaacctgagtcatcctttactcttctccttctttctccttatatccaagctattagcagacattatcttctctacttacaaaatagagtctgaatctaacttctaacttctcctaccctaacatctatcacactagtccaaaactgttacctagaacactataataacctaactggtctttgctttcctctttaatctttttcagtctaactttcacactgtagctctatatttcataaaggtaaatcgaattatgtcatcctcttcttaatctaattgcttcccatttacatatctacgccaggctataaggacctggctttcttccttatgtcacttcttactattcttctctcttaatcactatgctataacctcactgacctctttgttattccttaaacatgccaagtaagttacattttagggccttttcacttgcttttacctttgtccagaatgctttttccctaaatatttatatggctcatatgcttacctcactggggcctctgcatatgttatctcttcaaacaggcttctccaagccatcttatctaaagtattaaccctccccacattctgtcccagtgggattcatcctgggatgtaaagatgattcaacatatacaaatcagtaaatgtgatatatcatgttaa

SEQ ID NO: 5298 - DNA, 1027 bp, Homo sapiens
tgagaccagcttgggcagcatagcaagaccctatctccacaaaaaaaaaaaaatttaaaaagtagttgggcatggtagtgcatacctatagtcctgttattcaggtggctgagatgggaggatcacttaagcccaggagtttgaggctacagtgagctataatcacaccactacactgcagcctgggtgacggagtgagaccctgtctcaaaaaacaaaaacaaataaacaaaactatgatcatggccgatggccaacaagagatttactgtttcttaaaaaagttgttcagaataatcctcccctgaaacgatgaagagtggataaaatatatatacaaaaatatatctttataaaatatatccatgttttaatataacttataagtatatattttaatataatgtaaacatataatgataaaatatatttttattcagtcttagttgtgtgtgtgtgtgtgtatacatagatatttatagagagagagagagagagccttaaaagcattgaagatctgacaagctagtaagaaactaccaagccagagaggtaaataagcaggaaggagctttagccctgaggacactatcaatcctgaaacactgacactgtccttggacagcctctgtggaagaaatggaaaacggcacccaggaactaagcaagctggggagtgccaagagagcccgcctccaaaaggctggtccctttcattctgctctctcagaatgaaaatgagttgcatgggagaaccctggaattccctggtttgtctaggatcctcaaagacttcactttgcgttaaggtggccccaggctggtgtggtagtgggtgtcatctggcagaaacaaggaagttacttgcattctgttccacaaatagaggaattcctacaagtaaatgttataatgtagtgacaaatacacaaaaccaggcacaaaaaaatacagctaagaaaataaatttatgaaaaagttaaaagttataataaaataaatatcatttaaagcaaccttgattgcc

SEQ ID NO: 5299 - DNA, 1052 bp, Homo sapiens
aaaacaagatgtgatgacattgtgtgatactttgagtcaaatgactaaactggatgagaatactatattgcattttcatctagagatacatttctaaagatatatttttgttcacccattaattctttgatttgagaaaattcagctaggatattattgttgttgttgttgttgttgttattattattattattattattattattattattattattatttgagacggagtctcactctgttgccaggctggagtgcagtggtgcgatctcggctcactgcaacctccccctcctgggttcaagcgattctcctgcctcaccgtccctagtacctgggactacaggtgcgtgccaccacacccagctaatttttttgtatgtttagtagagacggggtttcaccatgttagccaggatggtctcgatctcctgacctcatgatccgcccgcctcggcctcccaaagtgctgggttacaggcatgagccactgtgcccagccaggattttgttatataaagactcacgctctgagatttcacttatatgatcaatttcatcatcatcagtagagtctagagtcctgacggctgtgtgccttcatgttgtgattagtctcataattgtgaaacatcttcctctgtcagctttcttggtagaaaatgaaaaattctgaattctccaccgtgttcaatgaaagccaaaagtagactacagaagtggtgtctccagccttcttttatactttcctgaaagatgacactatactttggacaatgcaataagaaaaccaaaagatgacgatttagttcacatattagattatcctcttgggagattccatcattctcccatttccttgcttgtttgtttgttttttgcgtatttaggaataattgatgagtagtgatgaaataatttttagaatgatgaaatcgctaaatgtttcaggatatagaaaaacaagttagttattaagatcttgtaatgtaacttaggttgattcactggatccatgtggtaattccaagacagaatgagttttattctgt

SEQ ID NO: 5300 - DNA, 1103 bp, Homo sapiens
tatgaaggaagatttattatctttggctataaaaagtgaccccataccatcagaactaggtagtctaaaaaagagtgctgacagtttaggtaaattagagttacagcatatttcttccataaatgtggaagaagtttcagctactgaagccgctcccgaggaagcaaagctatttacaagtcaagaaagtgagacctcacttcaaagtatacgacttttggaagcccttctggccatttgtcttcatggtgccagaactagtcaacagaagatggaattggagttacctaatcaggtaataccttgtccttagtccaactcttatgtaatatatatacatatatatacacacacacatatatatataaaaaatgtaatatgtattacataatatatgtaatatatatattattgtgttatatataacatataatatattacttttatatatgtgtatatattatgttttatgtatatatacacatacacacacacacattttataagtgtcagatgaataataatggatattgtgtttcaaagttgaaagatctaaatttttgtgtgatactgttggctgccctgcccagaactcctttaccaaactgatcacccattcaccatctgcgcatcagcacccatcttccaggaatcacccttgaccgatggaagatgcctgggaaggatgctcatagctaatgctgatagatgtggctctaagaagtggggacaatcattgtggggcacttcaggctccagagcttcccaggaaatgaggctgggacgagacttctcctaaaaccacatctttgtccagattcttctcctaacctcttctgctttacctcacattcttacaagttttctcctgagatcatttctcaactaaaaaggaatctagggacctggaatatggcagacctcttctgtcctcactaacttacacctaactgttcagtcagccaacaggctcttcctacttcagttccagcctccatgttgccttatctctaaaaaatcctgatgcttccacactgaatttccacaattgaaattcacaagctttaacacagcacacaaaactcttcagtcttgctttgact

SEQ ID NO: 5301 - DNA, 1048 bp, Homo sapiens
cagcctcccgagttcaagcaattcttgtgcctcagcctcctgagtagatgggattacagtcgtgcaccaccatgccagactaatttttgcattttagtacatacagatgggatttcaccatgttggccaggctggtctcaaactcctgacctcaagtaatctgcccaccacagcctcccaaagtgctgggattacaggcatgagccaccgtgcccagcctaaaggatatatttaatattttgtttcaagcttgggtagaattattctatgtaaggtcgatagatatttttaatttatgattttgaagaaatcatatgtctataaagtacatgaaactttaaatgtttcattggagagattaatagttttcctcttgaccctttcttgtgacatgtttgtgagatgtttgaagatctctcaggttaaaaaaaaaattattgtattttaattcctgtatttttagtgaatttcatggagctttttttaaggaggtatctaaggttttgtaatactgtttttctgcttatttattgattcactaactctctgcttttatttttttctgagtttgcagaattcacaaattgttaatcacttaagaaatctgattaatgctctttgggggaagttgtcttcattgtctgcatcttttgcttgggtggaatttgtcagactccttttaatttctcctcttcccatctggtttgctttccctgtcttagtaaagcacagatttttttatttacagattttaatttattcactctaaattacagctacttttttatatagctcttactacatactgcaaagagaaagactgatctaattatctttttagttaaagggagaattcattcatttcccctgtgaagtatttactgagtgttgaccatacgccaggccctatctaggcaccggggatgaaataatagtgtctatacctggtgcctagttcagtgctgaaacatttgagaaataatttgaataaagaattatttaaacctcagttttagagaacatttggcatatagtgtatgattttgaa

SEQ ID NO: 5302 - DNA, 1053 bp, Homo sapiens
tcaccatgtttgccaggatggtctcaatcgcctgaccttgtgatctacctgccttggcctcccaaagtgctgggattacaggtgtgagccaccatgcccagcctttttttttttttttttttttttttttttttgagatggagtctcactttgttgccaggctggagtgcagtggtgtgatcttggctcactgcatcttcctcctcccgggttcaagtgattcttctgcctcaacctcctgagtggctaggaatacaggcatgcacccccacgcccagctaatttttgtatttttagtagagatggggtttcaccagttggccgggatggtctcgatctcttgaccttgtgatctgcccgcctcagcctcccaaagtgttgggattacaggcgtgagccaccgcgcccggccccattttaacaatattgtttctttctattcatgaatgtggaatgtttctccatttgtttgtgtcatctctgatttctttcagcaatgttttgtaattctcattgtagaaatctttcaccttcctggttagctgtattcctaggtattttattctttctgtgactgttgtgaatgagattgtgttcttggtttgcccctcagcttgggtgttgtcgatgtatggaaatgccactgatttctgtacattgattttgtagcctaagactttgctgaagttatttatcagatctaggagcttttgagctgtcttgctttctatgaaaaagccaaacccattcccagcacttcatatacttgctaggagcccttttcctccaaatcttttcatggattccttcttctcatcaattaagtatctgctcaaatagcccatcctaaatagcctgtctaaaatgttaccctttttgtcactctgtaatctctttcctagataatttccttcatagcacaacattatatctgaaattttcttatttttacccattattttctgtctcctgtgctaggaagtaggcttcatgaggatatggatattgtgttcactacagcatttgaagtacctgacacagtgcctggcctgt

SEQ ID NO: 5303 - DNA, 1060 bp, Homo sapiens
gttctatctatgcatgattggtctgacaggaatgagaggatgtaggggatgttggcattcctacttcttggagtagtgagagtgtgatcacagtggaaatcttaaccactcgacagtggtgctatccatggagagtagataattcattgaattattcccgttttaattaatcccccaattatccacccagactgattgaagcaatgaatatatcagttgattgtggtgtaacagaccatgttccaaaacttagtggcataaaacaatgatttctttgctcatgattctgttgagttggcagttctggcatggctcagctggaatagccactttggctccttgaggtatcagctggtcttacatctgagtttgcagtcagttagcagattaactgagggctattgggtggggctgttggccagcctcagttctcatccacatggcttctcatctttcagtaggctagactcagcttctttacatgatagtggaaacattccaagagggtgcagaagctgcaagaagtcacataacaacatgttgatcacattgtattggtcaaagctagtcacaagttgagctcagatttaagggatggggaaatagactctatcacttgataggaggaactgcaattaatttgtggctgtgtttaagctaccatggtctcttctctgaccaaaattattattattcctcctacactcactcccctctacgcctcttgaagtatattattccatcatgacctcagggttgaattgatgatctcatggtatgcatcagttctggatacacatgaggctttcacatgtagtaattttgttgcagctcttcttgattgagaaacttgtgaattagacaggttatctgctccgcatatgccctatatacaataatgagataggagtaagttaattgtagtaagaagagggacaggagaggaacatagccatctctcggccatagcagtcctgaaatccagtcagcacatgttgtcatggcccctgttctagggtctgggaatataattatcttctgtgggagtggttccctaatc

SEQ ID NO: 5304 - DNA, 1035 bp, Homo sapiens
tgtgaactaataattactgagtcctttagcttgtatacatctaatttatcaaacgtttttggcttaaagtatggtatgaccatatggttttgctgttttcttattataaaattaacagagttttaaaactagttgagactagatgttttcatctaaccttcttttacagatgagaaaacagatccagaaacattaagtactcacataaattaattttaaggccaaatgtgatttatatctttatttcattttagtagaaaatgaataattattttgtgatcgtaaaactctacaatctgctttcagggaactaattaatatagttagttgaaaaaataatgaagtgtttgtaacaccaatatgatggattttttttaacactttgaatgttaccagctttagatgtaaaattggccatcattaaataaaatttctttgctgtgaaagcattttgctaatagatacatatattgaggaaatatggagactaaaacagtacttctgttttcactgtaagctaaggaacatagcaaatacaaattaggaagcatttacttgtcatggaattttcaggacatttgtaggtttatggttttttttgagacacagagtctcgctctgtcgcccaggctggagtgcagtggtgcaatctcggctgactgcaacctccacctccgggttcaagtgattcttgtgtctcagccacctaagtagccgggactacaagtgtgcatcaccacacccagtgaatttttgtattttcagtagagatggggtttcaccgtgttgaccagctgatcttaaactcctgacctcaagcagtctacccccgttggcctcccaaagtgctgggattacaggtgtgagccactgcacccagccaagtttatgtatttttattctttttcatgaatgtgatttgttaaatgagtgattaaatataatttttatatatttgtatgacttttctgtaaataaaatttaaaatcagaaaaaatcatgttagaccatgtatagtgatttattttgaaattt

SEQ ID NO: 5305 - DNA, 1051 bp, Homo sapiens
aattaggttattggatttatttaatacttttactttctgaaagcatataaagaaccaatattaatatataatagaggttattgccgtattttagaatgagagatgcactttatatttttctcctttctaatattcaaaaatattaaaaatattgatgtttgttatactaaaagagagttactgtaatacctagaattttgatgggaatcaaagaattaaactgtgaggtcccaggatgaacaggaactaaggtagtattaggaatttctctggtacttccctttcatttttatctacttctctttgtatcccgttggttcatttttacctggttggcttcttctgaccctcagctacctcataatgactaccacagccccatctctgcgtgacctttcaggacatcaactatatccctttagtttaaattcccgagagagaaagaaaacctgattagtccagttcctctttgcaacccacactatacgagtcacatcttgtgatgagcatggattgtagctgaactggggcccagagcttgactgtgcctcttggcaagaggcatagtcatatgtgcactgccctctcagcagggactgtggggagggcttccccctgaagcgggtgaagggaggtgaggcaatacatgtcttatttaacttaacatctctatgttaaatatcttttaaaggttactggatacctcaaaattacttttagcccagagatgaaactattttgaaactccttggggatttcgttgttcatggtttttcccttctggaaatttgtacattttcctctgtatttatgttcccctattctgtttgctgtagcttatttcccttaatcttaaaatgtcacattaccctttatttgatttaaatatgtcataagaagtgaagtggcgtaactttagctattagaatttttcagtttttattcacctgattggaaatcctttttattaactgaactttggtgtttggggaggatgggtcagtgattgtgggctctatcaagtgaaaaatgggttatatttttaaaatac

SEQ ID NO: 5306 - DNA, 1097 bp, Homo sapiens
ccttactgctgttatacatgtttttttttttagttttctttacacaattctacataaattggaaatatttcattaaacacatttttctactttaacttagcttaaatgcataatacagaataaatataggaacagcacaaccatttatttccatattcactagttaaggattattatattcccacattttaaatatagaacatctagttcagagccaattcttaaccctccgatgctgaaatttctgatgctctttagagctgaaggtgttacttcttgttaaaatgtacatacttcttttcaagaggagcaacatttttcttccaagtcatttactttttggtataaatgtacaatgtggaaacatggaaaaagataacaaagctgtaaaacatcttgagaagtttgtgggggggcaagaagtttgtggtgcttggaggcgtgcctgggagttggcactaagtacagctgtaattagtcagttttctgtcctgtccacacagaaaaccgtctagttacagttgtaagttgtgccagacctaatcgctaaaatgctctgaaaggtagaattctgaaagatatagtttggttgtgagtagtctgtcaaaaattgtatgcagtattaggaaaaacattggataggactctgcagacctagctgttaagtcctctgacttttgggaaatctcttaactgctgtctgccttagtttatctgtaaaattttgagggaggtgatatggtcattaacccagagatcgtttaactctctgaaagttgattgtagaatggattctcattttaaaataatttattaaatgcgaactctggcagttttcctttattgtcaatcaacttgtcacttacctcagtattagttgaaaaaatgtcttttgagtatggcagttacgtcttacatatgactgtgttccagaggctcatttctaagatggttgttgagaatgtttagaatgcataagatttgcccttacagacaaaataaactacagtatacttgagtgttgcattgtgagacttccccgggaaaaaggtccggcaaagtgctgagattacctcaacatgtctaactggcttact

SEQ ID NO: 5307 - DNA, 1050 bp, Homo sapiens
atgatcattctgggcgctggatggagaatagactttgttgtaggggaagggttgagcaggagcagaagctgggataccaatccggaactgttgccctaatccaggccagagataatgtagcttggaccagagtggaattggtggaggtggtgagaggtcattgatttcaggataaattgagggtagagatgtaaaagacaccaaaatttagttccgaacaagtagaaagatggggtacttgtttactgagattaggtttacgagaggagtaggtttggtggggagaagggtgggagttggttagaagacaataaaattagacattcacgtttttaaagaaaaaaatattcaatgatacttgtttaagaatggtaagtaaggctttattcagaaccatctcaataggtatagagacctctgcagtggggccctgcagtaggggagggagactgggctcaactccgaatacagcatgagaaaatgggaatttatagccaagcagcagtgtggggatcgtggatggaaaattgctaaaaggaaacatcagggataagggggattctggctaagccgacctaacgggattcttgctgaagacaggccagggcgatcagacattacctggggaatggtggaggatgaggaacctgatcagatatttaggatgattagatatccaggatgttatgctaaacagacttagcagggttctttgctaatactggattttacaaggaagtgcacagatgggcctcacagaaaattcaaaagcctgagtaagtttggccaagcaaagaatttttgtcaaagctgagattattagtagtaaacacaagtgactttgttttgaagacactttttacgttaccttgactataccagggggttaaaaatttcacccataaactgccagctttgatttcatgattattttcttcttaattcttttggaccaacctagtcattcttttcccaattgtagttttatttttgtttgattgcactcacatagtgtgtttgttagcttcggttgtagagagagccatatag

SEQ ID NO: 5308 - DNA, 1879 bp, Homo sapiens
ttcatgcgctgctttttcatcaaaacctaccctgtcctagagatctatgggcatttggtggatgataatgagcagcccctcccagatagaatgtcaatatttgagcagtaggatattggcatttgttagttaaaggcttaaatcaaaagaatgtccaatggtaggaatttcaaggtgtaggtcagatatttgagaataggggatttttttgatgtgccttaaattataccaaagattactaattattcctctttgcccaaaatacttgcatccaaggttctagtctctgttgctgtgctggtctttagccccactgcttgcactgatgtccctccttttcacggagacctatctgaggtacaggatggggctggcaccagatgatgtcccaccacagtccctcacctccggcctccacatgacagaaccaatttacactcaaccatgacctcacccctccttggtttctccctcgatctgtggccctttttggatgtattcttatctaacaacacaatccggaaagactgaattgaatatttatactaatggttcatatcctttattgctcaatgatctaattaaagggatcattgccacatttcatgtttatatttctacaatttgtttagaaaacatctcctgaccatatcagtagctcgtgttatctttttatcaactgcttcccagagtcctaaaacaatagaaattttggattgaaaagttcagcataaggagtttgagtcagtaaaggatgggataaaggagtcgagatgattcaatgaaaagtatcacaaaaaagagattgatcaacaagagaaataaaaaagcccaagaggaagtggtaggggaaggaatttaagaacagcaataagtaaaactcttaagtaactccaaaaagaaaatggtacattttgccaaagaccacttatacttgagaacatggaagaatttgcctgatactctctttggggaaaagagtctctcctcttttcctcaaaccccagtacactcagcctctctgccccaccttctcctgactttgtcctcacttgcttctgcagtacattggaacctgaattgaaagaaagtcttccttgaataattggagtttgtcttgagaggcaaatatagccccaagaatcacaagattcgaggaccatgtaggtcttttacgtagcccaaatccataaattagtctcactttttgtatttatcgtttcatattaaaccctctatatcaaatgttcatcatgattttgtatgatttttataactattttattcattttattagatttattctaaaattttttaatggtaaattcttaaactgtggaaaccactgaaggtgcttattaactgttctcccagatttgtacaagtattggatgattccttgagtttacagctgtacaaatagtgtggaaaataaactttttttaaaaaagaaaatcttcctctatcttttctgaatgaagagatttaatgttgggaggctgattcatgatagacagacagacagccacttaataatctgcaaaacctgtggagcccagaaactcttatcccagtattatgagagctagtatgtttctcaaccacaaaaaaccttaggggttgtaatttacctaaaaatgagtgcagtgtctcacacctgtaatcccaacactttaggaggccaaggtgggtggatcacttgaggccaggagtttgagaccagtttgggcaatacagggagactccatctctgcaaaacatcaaaaaaaaaaattagctgggcatggtggcacacacctgtagtcccaactactcaggaggctgaggtgggaggattgtttgaatccgggaggccaaggctgcagtgagctatgatcgt

SEQ ID NO: 5309 - DNA, 1068 bp, Homo sapiens
ctcaggttatatcaactccagaagagtagcagggcggcataaatggactgctgaggctgctttcaggggcagacccagactgaacaccctggagatcccttcctgtgtgtttcttcggcacatccatgctttctcttccttcttactgcaagctctacctcttacacaacaggctcttagttcctcgacactgattccttccctttgagaccacatctcctattctgtggccactcagcctcctccttgaaggcaggtactttgaccacagcccctgccaacatctgcttcttgtcctagtctggtcccctgggtctgctgtgctctcctccatgtgggcctcatgcagggaattccatatatttatgccagttatagccctttactttgttttcttttgctaacagcttcattgagatattatatgtcagttatgttaaagggaaccaaatttgttagtaacagaatcaccaaactcaaatgaggaaccaaattcaagtatctttgcaaaagaaaatgtgttttatcacctctcgatcctttcagtcattctgttttcatgtctgccaatcacttcattgtaattcttttcaagtgtttttcataaactttttctcatgcatccttattatttcttttcctctttcccccctttttcctcctccaggaacctttactggacagactggaacagagataaccccaagattgaaacttcctacatggacggcacgaaccggaggatccttgtgcaggatgacctgggcttgcccaatggactgaccttcgatgcgttctcatctcagctctgctgggtggatgcaggtgatggaaagctggacactgtccagggcgggtctcaatctcctaagtcaggggtgggcaaactagggccctggggtcaaatctaaccagccacctgtttttatataacccagaagctatgaatggtttttacggttttatctggtacattaaatatatactggtacaaaattgtatagatacctgcatactgtccttggttttgcctcctggcctgcaaaacctgaaataatttactatctg

SEQ ID NO: 5310 - DNA, 1035 bp, Homo sapiens
tatttttgctcctatggcattgtcatgctgatgatatttgttctgtggagtcaccttgcgttctctgcaaaatattcacatcaaagatacatctttaaaatagagcagcctcattttgtatttctttttacttggcactgaatgtagttttttctattttcaatggaatgtttccctcacaattgatattctagaagatttcctgtgcctgtggaacaactcccgaagcattttttcccttctttgttgccttcagtaaagatgatgcggcaggaatgaagctgaggttgaattaactatgtctggctttggacatagaccctgaacccttttctggaagccaacaggctatttaaatcatgtcttccagttttcatgctttggtttagtgaaaaacagtttgaaaatgcctatctccgtgtgttaaaaatgttattgttattatctatgatttcattttaaaacccagtggaagaggggaataggtcattgtttgctatttcctgttgcttttggagctcataaccatccaagaacgctgtaagcacagtaagaagcattccaagcaaaagcctagttactgtgaaaacacagaattaaaccaaaatgtgatctttgtagaagaaagatcactgggaataattttcttttttttttttttaagagagaaagaagcttccagttatctccttagcatggtacaggttggtgcttccctagtgagtgagagtgacagttaggtatcattttcatttcttccttatttcataacagcccggatcccaggctttctttctttccttgagttacagacccaaccaagtatctctaaaaagtatcatatctttgaggtaagcagtaaggaatacttcttcctcggactgcacattgaaggataagattatccagacctttcccttggaagagtagctcataaagaagtattttgagttgagggagagggggttggttgctcttgggtttgagatcgggaccaaggctggttctaaggagacaatatgcacggagctcatg

SEQ ID NO: 5311 - DNA, 1049 bp, Homo sapiens
ctactaaaaatacaaaattacctgggcttggtggcgggtgcctgtaatcccagctactcaggaggctgaggcaggagaatcacttgaacccgagaggcagaggttgcagtgagccgagatcgtgccactgcactccagcctgggcaacaggagcgaaacgccatcgcaaaaaagtaaaaaaaggttcactgtatgttctatcaatttgcttcatttctttttgcctcaattttttaaaagtgttttaaaaggaactacctaggagtataaaggagatgtaaatatcattttcttgacaaacctattcaataataatgatgtttctgcattttgaataactgatgaaacaaaacccagtgacacacaggcagccctcgtggttctgagcgagctgcggggactcctgcagccccgccagggagcgctgacggatgacgcacctgacagctttcttgttgcctgtttctctgatagaggtggagaaaacccggtgccagcacgagcgagaacacattctcggggcagcgggggcgacagacccacagcgacccattcctccggggctgttcgttcctgagtgcgatgcgcacgggcactacgcgcccacccagtgccacggcagcaccggctactgctggtgcgtggatcgcgacggccgcgaggtggagggcaccaggaccaggcccgggatgacgcccccgtgtaagtgggtgcaggccgtgcttgggcgtgtgcctgagaaggacctcgggggaccggaattgctgaacacgctctttgctcttctgctggacctaaagcttgaactgttccactggctccagccccacccgctcctgctgcacccttcttccctctcacttaccccgctcctccccgtgcttcctctcctcctcaccctctctgttctcttaccctcttctttctccttccccacccaacacacacacgtgtagggtgtaaatacccagtggggcctgccacagcggtacctgtaatggtagcagagcggctgtgtgtgctccaggcctcccagaagaactctctgc

SEQ ID NO: 5312 - DNA, 1056 bp, Homo sapiens
tcttcaccccttttaattggctcctttgagactcactgcgcagagagaaggctcactgtagaaccaagtctgcctacacgcattcaaagaaataactctggcttgtcactgagtaattgagtggtcattccatctctcttggaattccttgttgaaacagtgttctaggtcggaagcctgcactgggaaggttaccctgcaggtcagaatggggcaaggtgaagaaataaatggggcaaggtgtgctctgccaactgtgaggggctgggggctcaggcagggcctgtggactgaccaggaggaattctcttttcatgaggattggtatccattatcggggaagggatgtttgtggacttccatctttggcattttctgtaaactcataactctcttttccactgggaaccaacttttgcagttaattgaaatgtgcaaaacatgtttttgtgaaggaaaggtgggcctcagcttgcccataagtcagcttgatgtgaagatgtagatacccctctgaatggacatagccctgtgacactgggctggcatatggagtgtggtgaacttgaggtcctacttctcctcccctaggcatcttggtgcagggcatgatggcatgcatcagctcttctcttgagggaagaacagggcccaggcttaggcaaaaagctgtagcagttaacttccagtatgccaagcacagagaggccagtagatgggactgtgattctcttaagggtcctgatgatagaactcatggaaggagggctgaggaggaggtgagtgtcacagaggctagctgataatgccccatcttgtgctgttgcctcaagatggaaggcaaaggttgaggtctacagggtgattttcagctggttcagttactctggggttcctaaggcaccattgcattttgcttctgattttctaaaagaactcagagccaggacagagtcccatcctcacaatgtcagaacacaaatcattccctcccatcaggctttgtgtagttggattatcccagatgaaggaggactcatgtttttcctccatgag

SEQ ID NO: 5313 - DNA, 1035 bp, Homo sapiens
cagtctgggacttaccttcctggtaacgtatcgctagggaggggacatagtgcctactcacctgcaatcgtcagtttcccagtatttcctgcaaagagcctgacagccttgaatggctgaattggctctggccagttcaaagcagcatgatgctgtgtgtgtgtgtgtgaacgggagccctcccaggctgtgagacggctggcatgcggggatggggctccttcaccgatccatgcctcctcattacacagctctgcttcaacttcgtaagcctcctggatagtaataaggtgcagaagtaacccagtctgctgctgttgaactgtgacctcgtggctaattctgcccttggtgcctgagcttgccacagtgggagtgcttcacttcagaaggcacaaccagccatcctttatgtaatctgcaccatcctagaaaatcctccgatatccttgtccagaaagacaggtggtcgcatgtagacttgcttttgtcctgtggtgagtggttgttctgacttattacctccgtggaatgcgagtgtattcccagtcaggacacttattgttctgggtcactagaacatgccttgaagtgttaatgtatcgagacatgaggcttaaaataggaaattgcattaagcagatcacttcatgtgttatttggacttgggaagtgcgttagaggagaatgaggatgagcctttgtgattcagtgtgtgcagcgctgatatgatggtatatgacaccccaaacaagggtggttttggtgagacgtcgcacagtgactctccacagtaatttggagacgatttcacagagctctgtgattcactctggtccatggcaggatggctcccgctgtttctcaatttagagcccgtagagatagttttggctcatctctcattgagtaatcgtcgagtatgtagaaggcatttagcaaattggtaatgagactcttctcctctaagagcctggcctttataaaagggaaaaattggagaaacttagagttgttgaaaatatgtgaaaagta

SEQ ID NO: 5314 - DNA, 1042 bp, Homo sapiens
atcttactaatactattagtctgcttgattccagaaattgcacatacattacctggtctgatccccaccttgacctattttgtgtgagaaactgagaccaaagatgttgagtcatcagccagtggccacacagcttgtgagtggtactgagtgtgaattcaggggcgtctctttccaagtgtgtgtcctctcaacctgaccttcatctctagttctgggcgtcttcaaaacttacagagaaccacttgagagaaaagcaacaaatacacataatacgaataataccaatgatcatatggggaatccaggtatttcatagaatgagtctcaatacaaacaaatggtcttatttaagctgttctgtctggtctgtcatctggtagccttatgggcagggaataccactggtgccttgaaagccgttgattcagcttcttgcatccttaaccatcttccctctgtctccctgccttgtcccctccatccttcccactctgcagtgatcacttcctcctccacccgggagtacacggtgactgagcccgagcgagatggggcatctccttcacgcatctacacttaccagtggcgccagaccatcaccttccaggaatgcgtccacgatgactcccggccagccctgcccagcacccagcagctctcggtggacagcgtgttcgtcctgtacaaccaggaggagaagatcttgcgctatgctctcagcaactccattgggcctgtgaggggtaaggggatacagctcatgctgggcacaggtgctcatgcatttttaaaaccccactctttgacattgtttttggtctcttactctcagtctgtagaagaaaattatgctaaagtatcttctggcaggaaaaaaagaatgtcttgttatttttgattcttggaaaagctgcctgtctgttcttctaaccaaaggcctattcgtgattctatctaaagtaaagtgcagaatgctaacctgttgaggtgccttacagagtggaccctcttaaggctactgctggcattggcagggctt

SEQ ID NO: 5315 - DNA, 1008 bp, Homo sapiens
cccagacagagcctagcacagctgggagtccaacccctgtcctccgctatttccagcacaacccttgagccaacccaacagatgctgggctgtggctaggaagcctcttctctcctctgcgtgtggctcagttgggccacagggatgtctgagctctgtcttcagtgtcaccagttctatgttctacagccaaaccaaagcacctgcagaagcgttcgcaccaaccccactccacactgtgagcctggggcgggcagaagggcgcgctccccagtcagcaaagtgacagtctcatcttgtttttcagggggtgagttcactcgccaggctgaggtgaccttcgtggggcacccgggcaatctggtcattaagcagcggttcagcggcatcgatgagcatgggcacctgaccatcgacacggagctggagggccgcgtgccgcagattccgttcggctcctccgtgcacattgagccctacacggagctgtaccactactccacctcaggtgagccccagctgtgtcccagggccagccccagaccggccactagcctcgtgctcttgacccaccacggcagccgtgaactggggctgtctctgggatctggagagggaaatacaccgggccttacagtcaccttcccctcaattatagacataggacgcactactccttgtagagaattttgtgcaaaaaagacaatacgcatgagttagagttgtaaaacctggacataattattatgacatttaagtgtatttcttttcagctttttctccagcatctatctatttacatgtatatgaaatatcccaacatataatttcatgataaactaattttattatacatctatttgtacttttttttttttttgagacagggtttcactcctgttgcccaggctggagtgcagtggtgcgatctcagctcactacaacctccgcctcctgggcttgagcaaccctcctgcctcagcttcccaagtagctgggcctacaggc

SEQ ID NO: 5316 - DNA, 1058 bp, Homo sapiens
aacacagatcctcagggctccctctgcttgggtagtggtggctgttggtgggttgctggcctgtttctaagaagcctgtccttcctcctaggagtagtaactctgggcagcagggtgtctgggtgtttgagattgggagtccagccaccaccaatggcgtggtgcctgcagacgtgatcctcggaactgaagatggggcagagtatgatgatgaggatgaagattatgacctggcgaccactcgtctgggcctggaggatgtgggcaccacgcccttctcctacaaggctctgagaaggggaggtgctgacacatacagtgtgcccagcgtcctctccccgcgccgggcagctaccgaaaggccccttggacctcccacagagagaaccaggtctttccagttggcagtggagacttttcaccagcagcaccctcaggtcatagatgtggatgaagttgaggaaacaggagttggtaagaccatttaagttgcagttggtaacgatcttggatgtgtgggcttccagacaggcgtactgctggggagatgtcagttgtgagcattacatggtggtttgtaaagataagagcttgggaaagtagaggctgaactctcacagccgtggagccttggtgttatatgcccagtggcttcagagatgctcagtgatcttttgggattaggaccatggttttggagactgttgagtgtgtcttctttcaagtttcctagtattccgttctgtctgttttaaagagaaaacgtccgttagaattgttttgaaagtcagattttcttgtgatttctcagatcagaaatgtattcatccacctgaaaaaacattttagaagttcttttggctgtctatgaagcttatctttgacatttatttcctcttggttttggaattagaattgttgattatttttcttcccaggtcccgtcagtttcagagttggtttgtgaagattaaaaaatatatatatatcaaagtagatactctttaaaaaaaaatagggtcgggggtggtggctcacacctgtaatcccagcacttt

SEQ ID NO: 5317 - DNA, 1058 bp, Homo sapiens
tattttaggttttgctttcaaattatagcttatgtaacaatatcaataatttgaaacagtatgcaacatgttagccttactaataagctttttctttcttccataggctttctacaagtataagagacttacagaattttaaagtcttattacaacacagtaggtaataaaggcttttatgtgtctaactagagacataaagtgactgtggaaagccttttaattatggacattcatcagaaagacactaatctgacttcaagaattctgaactattaaatagaaaatttaaatgctcacttgaatatttatgattcttaatagattattatcaactagagatatttataaatgaagtatatacttttaaaacatgtaagttatactaattttgtgtttaatttcatatgttttcatgtaatgaaaattctattttttttagaattggttttgtttttattctattatcctttatttccagttgtcaaactttaaatggctatgtctgcattctaataacactgttcagtctgttatggaaaaggagaactagggaacaaatgttgctcagggctggtgtcagtgagaaaaatttatcaatgctttttaatgtgtttttacccttgcctcactgtgtgtgtgtcactttctataatataaagaaatactataatatttctagaatctggaactgtcaccatgatgaatggccctttcaatgcatagttacagaaattcctgaagattccccaggacttcaatttcattggtttttatttgcagtttttagttgctgtaattgttgctgtttccagtctaaaggacctcctttggtaaaggtgaacaagacctctcccctatgctacccagccagattttgtgtgtgtaatgggctggcccaagagtgttcttttacttagaactccttttgattttgcttttctctgcccctagaaattttagggacaaagacattttggaaattgtcagttacttttagaaagaaaacactgcagaaatatttaacagattacttcttgataaaatttaaatgggat

SEQ ID NO: 5318 - DNA, 1049 bp, Homo sapiens
atatctgtactgtccaataaagtaaccagtttccacatgggactgtggaacacatgaaatttggctagtgtgaaactgaattttaaattgtatttaatcttagtttatttagatgtaaaaactatattgttaaacagaaccttattgttttggtaagactactataacctatgcgtcatgtaacatatttttgttgtagtgtgtgtatacttttgaattttaaaaatgtggctattagaaacattttaagttaacactcgtgtgtggcgttatatttcaatggaacagcattactgtcatcagtgggatacatcctcagtctgttctcagtgaggaaccaaaccctgggagcaactctgtcattgacctgccattccagtgttttctttagacggggagtgttttaagaaatttgatttcctgatctaaatttgtatctttagacctttctgagaaccaaatagacttggaagggttgactgcatagactgctttttcatgctcactctgtcacaatgtggcaaatacttgttttccccaaattcacattgaaactgcctggagaaggaagttggtcctgaaaaagacgtgcctggcttcttatcctttgtctcttttactacttttgcctcacaacttttctattttcaacttaaaggttttaattaaacaaaattttataaaaattgaagcaatatagtagttatataaagtgaaaagggaaagctcttctattccatagtacagagtttgaaaggtgttcttccagaccttttctacagccacttaatacttttaaagcagaaaatacaattttttcacttaagaaaaccatcaagtcctaagaaacacttcatttccatgttagtgatatatcagagacataacactgctgaaaagatgaggaaaaggaaactactacatagaaaaagaggaagggaagaggagaaaagaagaaaaatgaaatatgaaagaagacaagactaggtaaagagaatggttcctagctgttataggagtactctatgaagtaattaatagctcttgct

SEQ ID NO: 5319 - DNA, 1046 bp, Homo sapiens
ccacattggatgggagattatagaaatacagttattggtattttagatcttgtaagtatagacacaatttaaattaaaagaattctgaaaataaatttaattacttcggaaaaaatacgtttaacgttataatttctaagttaattgaaaagtttagcttgagttttgtgtttaactacatgttatatgtatttacaaattaatttctccttgaaataattattattgactagtcctaataattcagtatagttaagaaatataaattactcaaggaaattaatacatatattttcctataacttgttttttgtcatcccttcatgtaatcactaatagcagaattgtgacatcatctaatctttaactgacctcagattatctattttaattacactagaatacagtattaaaagtttcagctccaaatttaataatttttcttttttattcctccttcccatagtaatcaaagcaaagaagctttcattgactgggcaagatatgatgattcacgggatcacttttgtgaacttgatggtaatacaataaactattataattaaattattttaactttaacccttttataagacattttaatcaatgaaaatataaactgaattatagcttcagtactggattttgctatgtagaccttattattcataatggcatttattgagagcctgtgttccaggccctatgttaagtgccttaaatacattatttctggtctttgcagctaccttcataagtgtgtattatttcatatctgagaaaactgagtctgaaaaagactaaataacttgcccaagatcacacaatagcaagaggctgaggcaggatttgatcccatatccgaatccaaaacctgtattctttccattatgatataccatctgccatggaccttcaattgaagccacttagttataggtctgtgaacattttgtaaaaatatttacactggaatttgctagaggtcttaacaaactcatgtaaagatgctttctaatgctggggaggactctaattcgacttct

SEQ ID NO: 5320 - DNA, 1050 bp, Homo sapiens
aactgtgtctcaaaaaaaaaaaaaaaaaaaaaaatatatatatatatatatatatatatacacacacatacatacacacatatatatacacacacatacatacacacatatatatatacgtgtatatatatacgtatatatatacgtgtgtatatatatacgtatatatatacgtgtgtatatatatacgtatatatatacgtgtgtatatatatacgtatatatatacgtgtgtatatatatacgtatatatatacgtgtgtatatatatacgtatatatatacgtgtgtgtatatatatatatatatatatatattttgactgggcatggtgactcacacctgtactcccagcactttgggaggccaagacaagcagatcacttgagcccaggagtttgagaccagcctgggcaacatagcaagaccctgtctgtacaaaaaaataaataaataaattagctggatgtgttggcgtatgtctatagttcgagctacttgggaggctgaggatagaaggatcacttgatcccagaaggtcaaggctacagtgaactatgatgtcagtgcactccagcctgggtgcagtgagaccctgtctcaaaaaatatatgtatatatttatcactcccagaaagtttctcattccctattccatcttttatgctcctcatttcccagtttgaagactactactttaaccttgggacactatcttgaaaggaagtgctgagttaagtccaagaaattctcatgcaaatagtgttgcatccatcttcaaactgacatttggaaaagctgaagtagataacctctaaggtcccttctaactcatttataaatcaaactgagccagctttattagcattagatgcacattcaatgttttttcgggcttaggcatggctttactgtggttttaggcaggggttaggtgaaagaatcagcaaagcctcttcaaatgaggatgctcaaagaagaaatttcctgaaagtcatattgttaacaagaaaataggaatttgtatcactattgatttgttcttcacta

SEQ ID NO: 5321 - DNA, 1030 bp, Homo sapiens
aggcggaggttgcagtgagctgagatcacaccgttgcactctaacctgggtgacaagagtgagactctgtctcaaaaaaaaaaaaaaaaagatttgtatttatgtaccataattgctaatgactcagtataagttagcaattttatttattgaagacaaaatttaatataggaaaataaaagataataaacacccacatacatatcctccatttcaaataaataatcctccattccaagtaaataaatattaacattttttgccatatgttttaaggaacaagaaacatcacagataaatttaaaatcccttatgctgtattccctaatccagtagaggtaactactatcaagaattagttggtgtatatccagtctgtttttgtttttatatatttatatgtataaataagatagttttattttgtgtatatggttttatttttcctttgtataaatgatatcctatatttaacattctgctacatttttcattgtacattttgctttctagatctgtccatgttgaaacacagatttattcttttaactgatgaatgattttcatcatataaatatcccatattttacttagctattcacttattgatggatgtttagctatttccaattatttacttttacaaacatgccaccttgagcattcccaaattttttttcacattagaagtagaattgttgaatcttaggattgtctttttaatacccattcttgatattgcctgatgacattccatagtacttggtgtgaatatatactgactccagtgctgacagcttgtatcattctctacatccttaccaaaagttgataatgtttgttgagtgtgaaatagtaccttgtttttattttatacttcgtaattactagtggatttgagcattttttatttattggacatttgagtttcttattcattcaacaaatgaatgtctacaatgtgccaagcactgttctagggtactaggaatccagtagcgtaatggataaaatttccgccctcgtgcaa

SEQ ID NO: 5322 - DNA, 1124 bp, Homo sapiens
gcaacctccatctcctgggttcaagtgattctcctgcctcagcctgttgagtagctgggattataggcccatgccaccacacccagctaatttttgtatttttaatagagacagggtttcaccatgttgtccaggctggtcttgaactcctgacctgacctcaggtgatccacctgccttagcttcccaaagtgctgagattacaggcatgagccactgcgcccagtgcctcgtctttctttgataagatactttttattgaatcagtttccttaattattattggcctattcagattttcatgacttccttactccagcttttgtaggctgcatgtttctagtaatatcttcatttcttctaggttatccaatttattggaacatagtcgtgattagtagtctctttttcttcgatgtcagttgtaatgtctcctctttaattctgattttgttggcatcttctctttttctttgttaatctagctaaaggtttgtctatttgtttatctttaaaaaaaaactttggtttcattgattactgatttctagtttcatgttagtgtggtcacataagatacttcgtatgatttcagtgttcttaaatttgttaagacttgttttgtggcctaacatgctctatcctggagaatgttccatatgcactgagaataatgtatattctgttactgttgtatggaatattctataaatatctggtagggccatttggtctaaagtgtagttcaaatccagtgtttcctcattgatttttttttttctgtctaggtgatctaatgttgaaagtggagtattgaagtcttattgtattgcaatttatctctctcttcaaagctattgatatttgctttatatatttaccttttcagaagttgggtgcatatatatatttagtttttgtaacttcttgataaattgacccccttatcattttaaatgaccttctttatctctttttacatgtttgacttaaagtctattttgtctgacatatggatagctacccctgctcttttggtttctagttgcatagaacatctttttctatcttttcagtctgtgtgtgtccttagaggtgaagcaagtcttttataagcagcatat

SEQ ID NO: 5323 - DNA, 1088 bp, Homo sapiens
tcttttttacttcttattcctttcctttatgcagtaaatatttattgaatgattagtttgtgtcaggtactatggatacagtagtgaataagacaaaacttttctgataagagagacaaacaataaacaagtaaacaataaaatataatttcagatgcttataaggtaaattctatggagaaaagtaaagtaggagagaatgaatattggggaattggagggtgggagaggtaggtagccctacattagagaaagtatttgggaaaataaggtatttatgctaatgtaacatttgagcaaagtcctacctaatgtgaaagagccatgagaaggtttggggaaagaacatgccagggaaaagatgtagaataccaagtaaatggtcttgagatagaaataagcttggtgtgttgaataggcagaaagctggtatagctggagtgaacgagagggagagttggaaatataggtaggcaccagatttaaaaaacagtaggaccgtattgaccatgtaaggatgctggattttattttaagcaggataagaaactactgaagggatttttgtgcaaaaaagactgtaagggtagaagacaagaaatagaggaaccatttaggagactcttgtgttagttcagataaaaacaatacagatttgcaatagaatgctgcagctgaaaaatgtagaaaatgatcaaattagggttgtacacaaaaggcaacaccagcaagcttttctgatgaattgagtgtgacgtatgatatagaaatgaaatcaaggatgatgcctaagttttgagtgcacatatacaagcacaaatgtacatatatgtaaaatcatgaccaaatagattttattccaagaatgcaaggatgattcttgcattgatgttgataatcatcaaaattcaatatgtgctcctgatttttaaaataataagaatgatgtatatttcttaacatgatgatttcagtcctaacatcagcatagctaacacgtcttgcatatggggaaacactagaggaattctcacttaggtcaggaaccaagacaaggatacccactatctgcattaactgttggatat

SEQ ID NO: 5324 - DNA, 1048 bp, Homo sapiens
ggtttcctgtcacccaccacaaggctcaacttccttctagagcactcacctctgtttccctccagtgaaccccaagtcaccctttgcgccttgactcttgccaagctaacaaccctgtgctgcccttcccacctctaaggacttgttcaaatcatgccctaaatctagaaaagccaaccttcagccttccacatccttcccagctttctgaattccaaaccaatatccacaacttcagggaaccttccatgattagcccacatctgtctacactccacataccagggcactgcattagactggaacttagggataaatatgaatgtcacattgctatctattccgcctgatattcatgcttttagtaacgagttttgatgagtcctcaagaacccacatggtccagacaatgtgtcagtttaaaatgctgtagaatgataacctaaaccaatgaccctaagtgactgtgtgaggcagtggcacctgagctggtgattgaggctggccaaacacccggcatccgcatcacaaggagactattctctgctcagcatcccagaaacatatttcgggaaaggtatgtgttacaatattcacctatctggggactcaggactgcatgccttttagttccaagggactgatgtatttttccttgaatacatacaaacaagactaactccttaggagaaaggactgccacctgaaaccgtctaccctgatgggagatgatggccagtgcaagcaagcagttttagggtctccacgtcctcaagtctgcttatatgattaaatgtgtgactccagtcctgagacaagcttcctggttaaattcctatcaatatggggctacacaggaattttaatatgatgacaaatgtcaattccaatgtgcataatttgacactctactggctttgccatttatactgattgcccacgttataaaaaggggcaaattacaatctccaagtaaacaaaaaacatacacaacttccacatactgagttaggacttgatttaaatggaccacttatcccacccctgc

SEQ ID NO: 5325 - DNA, 1054 bp, Homo sapiens
ccaaactgtaaggggccaaggacagtggtatggtgcaggagtaatcagatggatcaatgtgactgaacagtaggcccagaaacacatgcaggcataggtaagaggtgcagcaggtgattttacaaagcagttgggggagagaatggtccaagtgctggccctggcatgatttgtttcccatttggggaaaagtctgatgtcacaccttgtagaaaagacaactttagtcagagtaaaaacttcattgtaaaaaacaacagttcaaatgtttagaagaaaatcaaggagaacatgattgtgactggaggataggaaagaattcctttaaaattttgattcaatagaaagccacaggctgagagaagattattgctctgcataaatcaaaaagcctcagtttccattagaacaactggcaaagaatatgaattcactgaagaggaattacagatggccagttaatgtacaatgtcatttagcctccagtaagcaggaaatgtgattaaatgtgatacccatcaaattggcaaaactgttgaagtcgttagtaccagggattgggtacgtagtggcagacagtgtgattgttccaaccactttagaaagcaattggcaggatcccatgaggttgaaagttccagtaattcctgtgatctggtcattcccttccttaggtatatatgctgtaaaaacttcccaagatgatcaaagggacataaaaatgttcttctctagcattattagtaaaaggggaaaaaatggacataaactaaacatctaacaacagaggcaaatggatagataagtggtatttatagaggaatatcatatgcagttaaaatgaaggaactagaacataagtcaccatgcatagatctcaaaaatatgtttccagaaaaacatgttgttccgtgatatgtagtgtttgaaacatttggaagcagatttgggatgatggttttgtttgtggggcttggggtagagggagaataggaccaaggagcagtacttgggggattccagctgaatctgtaatgtttaacttctcaacaaa

SEQ ID NO: 5326 - DNA, 1034 bp, Homo sapiens
actttatttttattctctaaagttttagtttgtgttttctgttctcaagtcttgaggaatgctcacagattatctttctgctcatctctgaagggtttagcacttttgagcattacacatgaactgtcagaaaggacctgagtgccttagtgtgaattaatagctgtctccatgtctaagaagttaccatcattgggttttttcctccaggctaaactcccatcttccagcaggctttgagtgtctctgtagagtgagcaaaaacatatcagtatacataactatttactactaagtctttggatctttagatggtgctttctcagctattgcctatggctgaacaactgctagaaaagatccagaaggagcccacagctgtgctgaaagatgaggccatggttctgcatctcactctgggaaagtataatgaattttcagtttcccttttaaatgaggatccgaagagtctagatatatttataaaagctgtgcacacaacaaaggaactttacgcgggaatgccaaccattcagatcacagcccttgaaaaggtcagtgatttctttcagaaactaaggcatagcatgttcaagcatttaaaggtagaaggcaacaggaacagcgttaaaaaaaaaaagattaatattttatttggagaagatagttacaggtggactagacgttttaaaggaaaatgatgtatttgacccatttttgaaaactgaacgttgtacatgggtcattaaaaagaattgcattttaactgacaaaattaagtgggaaacaattttgtattttgagagaggttgatataaaaattatttctggaatttaaacttgttcactgaactcagttgccttttttctaccccctctagattacaaaaccattttttgcagccatatcagatgaaaaagttcagcagaagcttttaagaatgttgtttgatttattggtgaactgtaaaaactcacattgtgctcagactgtcagcagtgtttttaaaggggtaagctgcaaacttcttgta

SEQ ID NO: 5327 - DNA, 1026 bp, Homo sapiens
gagtttatagtatgctcttgtgtattttcaaaagaatgcaccaggtaacatatgcctaacctttctctggaatattaaatattcaaacagtgaacagagaaggagtttgaattcgaagggaaactttttatcaagtacctttggtactatgtaaattttgtactgtttcagtttttaaaattgtttcttaaatttttttttcctttgattttagtggtgacatctttactcattaacctgggaagccccgtaaaagaagttcgtagggctgccattcagtgtctccaggccctcagtggagtggcatccccgttttatctgataatagatcatttgatttctaaagcagaggagatcacttcagatgctgcctatgttattcaggtaagctcgttagcaaagaagattgagtgtgttcatgcctctgtgtactggagcaattttctccattctcgacatttcactgtgtagggattttgatggactaagtcattggatttaggaactgataggtcaatatctgtacatctgtgtccccctacttttgaaaagatagcaatgtcatatttcaatttagttcttttcattggataaaggtttagtgtgtagcttttcatagtaagccagctgtgtgtttttaataacgtttcttattaaggttttaaggagaaatggaaaattataaacaatgtcacatcatttgggtaagagtcttccgtaattaatatatttagcctttgtagtttcttaacccttttttatccaattttctttttggtatcttaggatttggctactttatttgaggaactacagagagaaaagaaactgaaatctcatcagaagttgtctgaaactttgaaaaacttacttagttgtgtgtatagttgcccatcttatatagcaaaagatttgatgaaagtacttcagggagtcaacggtgaggtatgtgccatttaagtggattgtacattcctgtgatgttactaaagaattgttgtaactgcttgtgggtgaagaagacaa

SEQ ID NO: 5328 - DNA, 1148 bp, Homo sapiens
cttgtcttggttctgtgttttcaagtgcaaggttatagtgaggcttctgaatatcactcttcattgacatcttcccagttcattaaaacatggaatatggaataatttgaaatgattagacaaagcaaaactttgccttaaattatttgtttctttataattgtacactagtgagaagaggatttggaaccagcttatttgagtaagaattaaaagtttgcttttttttttttttaattaggtgcatctagaagatgtttttcagttattcaagttctgttctgttttatggacctatggttctagcctttcaaatccactaaactgcagtgtgaaaacagtgctgcagactcaagctctttatgtgggctgtgcaatgctttcttctcagaagacacagtgtaaacaccaactggcatccatatcttctccaggtattaaaagtagcattgttatgttttgtcatgaccaactgttcatgctttctctatatggtttatgtagtttggaaaattataacttaaaaaaaaatagcagagggcaggcgcggtatctcacgcctgtaatcccagcactttgggaggccgaagcaggcagatcatgaggtcaggagatcaagaccatcctgggcaacatggtgaaaccccgtctctactaaaaatacaaaaattagctgggcgtggtggcatgtgcctgtaatcccagctacttgggaggctgaggctggagaattgcttgaaccagggagttggaggttgcagtgagccgagattgtgccactgcactccagcctggtgacacagcgagactccatctcaaaaaaaaaaaaaatcgataaaggccaggcgaggtggcttacacctatagtctcagcactttgggaggctaaggcaggaggatcacttgaggccaagagttcaagaccagcttggacaacgtgatgagatcctgcctctacaaaaaatacaaaaattagctgggcgtgatggtgcgtgcctgtagtcccagctactcagttgcctgaggtaggcagatggcttgtgcctgggaggtcaaggctgcagtgagctgtgattgcaccactgcactccaaactgggcaacagagcaagaccctgtctcaaaaaaaaaaaaaaagggctgtacatc

SEQ ID NO: 5329 - DNA, 1115 bp, Homo sapiens
agaccaagaaaatttttatacataaaaatccaaattatgaaacaaagcaaaaagcaaaaagtaataattagagggccaggtggctcaaacctataattctagcactttgagaaactgagatgggcagatcatggcaaaaccccgtctctacaaaaatatacaaaaattaaccgggcatggtgacatgcaactgtggtcccagctgctcgggagactgaggtgggaggatcacctgagtccagggagttcgaggctacagggaactgtgtttgtgccactgcagttcagcctgggcgacagagtgagaccctatctcaaaaataataataataattagaaagtgattatttgcattatgtcttttaataaatacagaaaggctaggaagaaacatttggttctgttgctacttggagaatactaagaaagacttctctaaacttatgtcagtctactgaaaaatgaggtttttgtaaccaaatcttggtttgaacatgcattttagaaaagtgactagcaaaatgaaaatgtattcttcctattctgaaggtaatgagtaatgtcccagtctttgaaagcaagggctaagatcagattcatatgtttattataaatctgaaatagatgacagcttttggttcagtaagggggtgggtactgagataaaagtttaacctcttttcagagatagttgattggcaccatcacaactaatttgtaatgtgacctggggaaagactaattttggacttttgttttgttattgttataagcatgatagtacttgttaaaaatagagaattttagataaaagaaaaatgaaggtgatctatacaaaagagctttaaaaaatataaatgactaaataagtggaatgcacttgtgcaaatagataaaaagctggatatcagtgtgtgtgttttattctgagaacgattttctgctataagtgaatttaataatgttagcttgcaaaataaatttttcccaacacaattttaatttttacatattaaggagaagaaactgaaggaatggatggtcaaatctacaagagacacttagaagctatacttacaaaaatatcactgaagaacaacttagaccatttgttg

SEQ ID NO: 5330 - DNA, 1046 bp, Homo sapiens
tgcttctttgttatttgaccctaaggaagcggccacaatcgacagggacaccgccttcgccattggtgagccatcttttaacttagaaaagctcttggaagcgtttgttttctggatgttactgttttttttttttccccttgttttctcttctgtcccgtcctcttccttagcagtttctagcatgttgatgtatatttttaagggaaagagaacataacagtcaggtgcttggtgcttgaaatgtttatgagtagaggtatctggatttcacagatgaagaaacaaaattagagaggtcaactaatatgtcaaagagaagaacagctaaaagggggatggaggcagtgactggggtgacggagaagtcctctcagaggactggcctagttattgtaggggatatccaaaaaaaaaaaaaaaaaagtgttccctgccacgaagtactttctgttctagtagatgagataggatttactctaaaagttgaaaactagaaatcagtgtttgggactgtattataaattatatgtacttaaagaattcagaaacttcttaggggtaagtaaaactgtaaaagaggggtgggatgaatttgcttacgaagaattgttaaataaactggccttttttgaaatttaggatgtactggcctggaagagttgcttggaattgatccttcctttgagcagtttgaagcaccgttgttcagtcagctagcaaaaaccttggagcgaagtgttcagaccaaagcagtaaacaaacagttggatgaaaacatttcattattccttattcacttgtcgccttacttcctgcttaagccagcacagaagtgtctggagtggttgattcacaggtagctaatagaattacagaaataactatgggttaatcactttggtcttgtaaaaaattaagtagttgagaacttatcaaattaaagctgaaaaattaggtatattaagagattgatacaatgtccattgtgtgagataagcatgctcttctgcctttaaattcttttttgttgatagtgaaaagta

SEQ ID NO: 5331 - DNA, 1033 bp, Homo sapiens
gcttttcttgctccagcaaaaactgcctttcaatttaaaacgattttagagatagggtcttgctctgctggagtgcagtggcccgatcacagctcgctgtaatctcaaactcttgggctcaggcggtcctcccatctcagcttcccaagcagctaggactgtagcatataccaccatggctggctaatttttacttgtttactttttaatttttttgtacagaccacatcactctatgttgtccaggctggtctcaaactcctggccttaagcgacccccccacctcagcctcccaaagcactgggattacaggcacaagcctccgtgcccagccaaaactgtctttctatatagggaaatgtgttttttagaaaatgaaagctccctaaaaactggatatgactttcaaagaaaacaataagaaattcctttagttgagtgtctttgatttagctgattactgaaggcagaggactgaatttggtatcatctcaccatcacttatacccaaggatcgtaatattactgctacaagaaaaatctgtgttctctatggaaggtcatccagtatatgaagtatgtagagtaagagaaatttatgagagacactgtggttcaatggagaatgttggcttcatagtcctgggctattcactaaaattaggtgtaatcttagatacaccctcttatttgcagaatttacactccctttctataaaatttgtaaggaaggttggcataatctctaggatcccttctttcttgaagaaactatgactttctgaggttcctcctcccttctccattaattcaacacatttttgtcctcaatatcctcactgaaagccagcctcagcatttaagaaggcaaaaagaaagaaaataaacagaagatcttatttctgtgaggtttttcattcttatttgtgcttacattttaagtgtacctcattcaatagttcatttagaaaataggtaaactaaaaaaaaaaaaagtaaactagaccaggcatggtggctcatgcctgaagt

SEQ ID NO: 5332 - DNA, 1052 bp, Homo sapiens
gtgagtgataaaagcacagtaaaaatctttgcttaaaagtaactcaaatttttctctaagtaatctacctacttcctgatgtttttctttaatattttggaattgttcaagacagaatggagcctacatatatgggttccactagtatgttgaaaatgtcatatcatggagaatttgtaccttccaggtgtctgttaacccatcttctgtgtgtacttctggcatcttttttggtaggatcatttgacgggtggtagagtacctgtacttttggcaccattgaaaccggctctggcccacttgtttaaatagctatcagactcagtgtatatactttatatttttttcattccacagttgagagaaccagtgtttaatgctcttgaaattgtttctgtatcttccatggttcagatcagatgcctttaacaaaatggatatattgcagctgtagttgcccagtgtttacttaatacatctacatttttttcttgtctattttggtccctttgataggaaaagctataattttaggcaggactgtacgtcgatttgtagccatgcttccttcccttcccttgctcatccatgttagctggcagtttttcttttgaaaagttaaacaaaaacaggatatgtgcaatagaaatgtatatatatatgtgtattttaatacttgtggacaaatgttaaaagttgtttaagaacaacaaaatcaccaatgtcttccactttaagatatgtatagttttgtaagcattagtgcttggtagcatattgtagtgccatgttaggggttagtgcatgagcctagtgattttaaacttcaggatgaattattgataataacagtgtaaaaagagtggaaaatctaaaacttttctttttccataatgtctaaatatgttatattctccctggggaaaagaggttaaggcccaaaagactcatttatgaatagaaatatggggtcaaaatctgagatactatgtttgaggacatttcagctttccataaggtgtctggaaaccagctgtctttgtgtcttatga

SEQ ID NO: 5333 - DNA, 1054 bp, Homo sapiens
ttaaactttgatatcagccgggcgcagtggcttgtgcctgtaatcccagcactttgggaggccaaggcgggtggatcacaaggtcaagagatcgagaccatcctggccaacatggtgaaaccccatctctactaaaaataacaaaaattagccaggcgtggtggcaggtgcctgtagttacagctactctggaggctgaggcaggaggattgcttgaatccgggaggtgcaggttgcagtgagccgagatttcgccactgcacttcagcctgacgacggagtgagactccgtctcaaaaaaacaaaacaaaacaaaaaccactttaatatcttctactctcagatgctgaaagctaagttgtggaccctttttcccaattaagaaaaaattaagagaaaatggtgcatgattttcattgctgctgttcatatcagcaaaagggcccttatcagtaattatatggtgtgtaaagacaggttgattatggaattattaatcttttcttaaacatattgtctttttccaaaaatgtggctgctatgaactgaatatttgtgatcccttcccgctcaagttcacatgttaaatcctaatctcaagggtgatggtatcaggagccagggcctttggaaggtcattagatcatgaaggtgatggtattaggagccagggcctttggaaggtcattagatcatgaaggtgatggtattaggagccagggcctttggaaggtcattagatcatgaaggtgatggtattaggagtcagggcctttggaaggtcattagatcatgaaggtgatggtattaggagccagggcctttggaaggtcattagatcatgaaggtgatggtattaggagtcagggcctttggaaggtcattagatcatgaaggtgatggtattaggagtcagggcctttggaaggtcattagatcatgaaggtgatggtattaggagtcagggcctttggaaggtcattagatcatgaaggtgatggtattaggagttagggcctttggaaggtcattagatcatgaaggtgaagccctt

SEQ ID NO: 5334 - DNA, 1047 bp, Homo sapiens
ccaaaaccatacagtttaaaaatcatcacacaaatagaagtattcccagctgatctctccttactaaacatccgcagttctcacttgagacgcatcagaatcacctggagtgctcatgataacacagattgctggactccatctttcagaaagtctacgtaagtcattttctgatggatccaattcaagtgttttcatgtttaaccaattctcagtgatgctgatgctgctgattttaagaccacactttgaaaaccactgccctagatgtaccaatgctcttcactttctccacagtgaatgtcaagagccacaaatgtcacagctgagatgctgctgtccaattaggtcctcacatttctgcaaccacccattgaactgtatagtataagagtccatttttgtttgttttgttccatttgttcccatagctgtttataattaaatatatggcatactgcatttaagtactttattaaaataaacctgtcgaaatttgagtataaaaagaaaaagatacttctgtgaaaattaagctgaacacaaaaacacttgataaagatgtcttaaatgttgctagcaaattaaatctgagtgacacttaaaatgggaaagtgagcttctaatgttgtcccatttaataatttcctgttctttcatcctgctgtttgctcactttgtacatgtgttccagttcatcaataggcctcgtaatcgtaaccaaacacaatatttgagatatggcccagccagcatatattataacttttaaaatctaacctgaaaattgcatcaacttcccccaaccagagcaacatgtaatgtcatttggggcttaaaataaaatactttaaaaattggattttttttctcatgtgctgagattacatgtccctaattttgtgttttgctgctaggtttcttcgttcattgtttacttattcactttagtgtatgttggctctttacccttctttccactaaatttatcttgtgagttatagctcatttttaaagctttacataattttttgaagtatttctttg

SEQ ID NO: 5335 - DNA, 1028 bp, Homo sapiens
ccaatggcaaggctagtgttgtgaagtaaataacccactgttgatatggagagtaggagtaccctggtgtcttctattgcaccatcagaaatcaaatcagcaatagaattcttgacttgtcactctcctcagtgccccatttaattcctatgtaaaatatcgagttatttttaaatcttcttttgagttattgcattcctattctattcttcatccacctctctattttcttaaatcaatgcttatgaaatgttagttagtgttgacattctccaacttggtattcccagcttgctctcaaattttatcacatgcaccttgctctctacatataaccaattattctgtcaaagttaataatctaactacacattttttccgagctgtgcttctattttatatgcatttgatttttatcttagcagtgccttttgaattttgttaagaagcttaatcaaataagctttgagagaccttactgaatttatgctagagttactttttagaaagtctgtgactgtaaacggtattttgtcctaaaatgtttattttttattttaatatagtctgtctatggtttacaaaatgatattagaagtcacagtcctacccacacacccacaccagaaactaaacctccaacagaagatgagttacaacaacaggtgagtcaacctatgagatgacctgttaaaggtttacagagtaacagctatgaaaaccagagggtaaatgttaatagtgggtatttttataggttatttgtatgactgactgtttcatgtggaagatttgcagttaaaagataataaaatgttgtaattttaagtattgtaattacttgaaaatgtatcaatatatggtaatggttttcaaaacccctcactctttatttacccaaatccttgttcctctaaccaattgtaaaaatcacatatgctgatttgtaagtgactccatcatcaatagttactttgtactccaaagctctcttttaaagagtaagaggacaagaggttgagaacatt

SEQ ID NO: 5336 - DNA, 1045 bp, Homo sapiens
cagatccacgctgtctgtggtacccacctgttaggcacttagtagtcttctaggttatcagatcgactgtcctggtattgcagtgcttgtgttcgagtcacccttactttacttcagaatgaccccaaagcccaagcgcagtgaggctggcatattttattattttattattacttattgttgttttctattttattattagttattgttgttaatttcttattgttcctaatttataagttaaactttatgataagcatgtgtatatataagaaaaacagcatatatagggtttggtactatccgtggtttcaggcatctcttttgtgggggtgggcagtagtaaaacatatccccccaggataaggggggactatgcatatttgaaacctgaattttcccagaatcatgattttttaaaactttctagggtgtacttgatgtcttgctatcagctctatttgatggtgcatttctaatcctccactcacctgtcgtttaggacactgttctcccaggtacacatcagctgcagtgatggaacttaaacacagctgttctgtattcctctctctcactgtcgctcttcaccacaggctttgccgagttgtcttgaacacaagtgtaccttctgctataactaacaaaaatgtactatcgcatgaaaggaactaaatggcatttagatgcttttacttaaaatatcaataatgaaaccaaaaactccagcttctcttttgcacctcatgaggacactcacgtaaatgttatgacagtagtatttctcaatgatatgctccgtttactccctcaggagtggcttccacaatgttaaatcctactttataataaataacgttataataatgttgcaacccagcttagttcggttgaaaagaaattcatctttgaatcactagaaataacacaattctcttccaggctgatgtaaatagcatttcattattccttacatccaacaatactatgtgcttaatactgtatccagcaaatagtatatatttgaagattttaatggaatgtc

SEQ ID NO: 5337 - DNA, 1011 bp, Homo sapiens
gcagtctcaagagaaatataaaaatatttcaaactagcttaaaataaaaatatgctttatcaaaatttttaggatccagtgaaagcagtgcttagagagaaatttatagcattgagtacatgtactagaagaaagaaagatctaaaattagtaatctaaacttccacatttggaaactaggaataggagaacaagttaaatccaaagtaagtagaagagaagaaatgataaaaattaaagcaggtatcaatgagaatggcaagagaatatagagaaaatcaataaaatcaaaactttttttggaaaaaaccagtaaagtcaataatcctctagccaggttaactaaggaataaagggagaagacacaaattactaatatcagaaatataaaagggtctatatctactgattctgtgacactaaaagcataataatgaaatattctaaacaactctatgcccagaaatttgaaggcctagatgaaatggaccaaaagaaaaaaaaaaaaaaaaaacaggaaagaaagaaagaaaaacacaatgtactaaaacttaccaagaaaatagataatatatatgggcctatatatattaatgagaaggcctacatcttaacatctattattaaagattaacctattcaattaaagaaattaggccaggagtgatggctcatgcctgtaatcccagcactttgggaggccgagacaggaggatcagttgagcccagttgttcaagaccagtctgggcaacacagcaagaccctgtctcaaaaatttaaaaaacagtaaattaaatgaagaaattgaatcaataattaataaccttctaagacaggaagcaccagcccagatgggttcactgatgaattctagcaaagagggacaaattatatcaattctttacaatcttttccagaaaatagcagagtggctacctcctaactcattctatgaggctagcattaccccaatacccaaagcaaacaaagtcattgcaaggaaggaaaac

SEQ ID NO: 5338 - DNA, 1026 bp, Homo sapiens
tagcctgtttcttttctccttaacaaccttgatcgcttgcagccttctgctgggcttctgtaatgccttctaccatagcacttcacttgctgcgttgacatttcctatttccattttccccaggaagctgaggttctgaagggcatgggcattttgttacttatatttgtatccctagcattgaacacgggacccaatacatgttaggctcttggaaaatgttctactgatttgaacaagctgtggtcatgtctgctgtatataacatgtttatggaaggtgttcacatctctggggaagcttagcaaggattcctagatacagtcatggtggtgaaggggctcagtgcaaaactatagaggctgggtttgaggactgactgcgccacatgatacgtgtacggttgtggacaagttctttaacctcttcaagcttcagtgttttcatctgtgaaatgagatagtaataattatagcacctactgaataaggcagttagaaggagtgaataagataacacatgtcaagtgcttagtatagtatctcagacagagaaacactcaatgcaagttagccgttatctgttgatgcaagcaaatgcatgcatcttggttctcagattttttgtgtgacttagaaaatctatttagtttttgtacttcaagttctctctacccacggaagttatttaaacagtgtgaatcagttgttaagcaagagaaggagaggaaaggcagaggagaagaggagtgatggggtgggttggggggtgcggggagagagagaaagagagagagattctttgaccaaataaagaagtcaaggcaaaaagctaggacgtgaagtctgtgctttgctatattggttggcttctgcaatccctttttcaggggttcctttcaaggtaactacagagtgtaattcatttgaatcactgctacctgataaagcatctaaacgagtttttataaccaagttgcaggtgattaaagcctgtagcagagagaataacagccctccaaaatgt

SEQ ID NO: 5339 - DNA, 1052 bp, Homo sapiens
ctagttagaaaacataaatttttattgttctgattaaaattatgcctataataattaatctacttgcaggtattattcttagaaaatatctcattgtaggccgggtgcagtggctcatgcctgtaatcccagcactttgggaggccgaggcaggtggatcacctgaggtcaggagttcgagaccagcctggccaacatggtgaaaccccatctctattaaaaataaaaaattagctggggtggcacacacctgtagtcccagctagtcaggaggctgaggcaggagaatcactggaacacgggaggcagaggttgcagtgagccgagatcgtgccagtgcattccagcctgggcaacagattgagactccatctcaaaaaaaaaaaaatctcattattcagtaggtttctgtattttacttgaatgttctactagctgagtatagaggtgtttaaagccctggaaggatagctctcggtggtcttcatactagcccacttatctgaaaaacactgattattgattgaatgcctactacatgtcaagctaggatcatggaatacagagcctactaaatgtcaggctaggagcatggaatacagagcctactaaatgtcaagctaggagcatggaatacagagttaagtcagacacaatccttatacttcgaaagcttccattgtagtggggaagagagagttgatcttcatagtactgtgtcgtaagtgttgtaatagaagtaaaaaggaggccacaagaaagacaaaccccaaacacatagtagagataatttcttttgcttcatgtaactattacagctttttatgagaaatgggaatgtttagtcttaaggacacactatgggcaacttcacacagctaattagccactaagccctttggaaaattcaaacctcccgatgttaacttatgcaaagtagagcacactgtatttcaggcccagagggaaacatttcttgtcctctctttccactataagttaattatttgtttcactggtcccagaggcttcttgacaaccaaacttctttg

SEQ ID NO: 5340 - DNA, 1046 bp, Homo sapiens
tactctagtaaatttcaaagtgagaagaaatttttcaataagacaaaataaaattctaattaacaactatcacatagtatattctttcctcttctttctttcttgtttttttttttttttttttttgacagggtctcactctgtcatctgtcaggctggagtgcaatagtgtgatcatagctcactacagccttgaactcctgggcccaagggatcctcccatctcagcctcccaagtagctgggtctacaggcacataccaccatgcccagctaattttttttaaatttttttgtagagatagtaaaattataccttaaaattaactgaacacctaaggcttaacgaagattctacacagtgttttattggagtctttcaaaagacttgtgagataagcagagctgacttcatcttcattttacagtaaagtgactaaagatcagagaataaaaatgttttgacaaaaacatcactgctagtaaatacaaaaaaaaaaaaaacacttaaacataggcctgacatatttttacttatttgtaattatatttgaactcatacatgttctctaaggcataaaaacagaaactaaggagttttgtaaaccagattctacatttttttatttttttaggctaatctagctttctattcgggtcagttcctaatagagaccacagaatgtctactaaatcactgccatgaaaggtgaatggatttcttttcattttttctttttattttccatgaatcccaaaatacccagcaagacatgctgtctctgagaaatatcctgttacctaaaatgtaatcagttcagtccaaaaccacctgcccagcaaggcagataggaaaattaaatgaagagtatgttcctccagctataaactaaggtgaaatttctatagaggcagaaaaaaagtaaaagtaccagagaaagctaggtttttatagaaaatgctacctgccaccaatatagttagaaaatagaggtttagtaaacatcagaaaaaggaggacaatctagttcttcttattctgtttct

SEQ ID NO: 5341 - DNA, 1027 bp, Homo sapiens
cttttctagcttaaacttttcccatctcaatatttcttctaattatacctaggagtcatcccccatagcacatgtattggacacaaagtatttatggttgcaaaaaaaaaaggagtgtacatgaaaaatgttataaaaggagaatatttgggattgatgaaatgccactctggagtatggctgcaataaattctctggagaaggtcttaggaatgcagatttcaaatgcaaaccacagatattctaattcattagtgctgagatggaaccagggaatctataatttttgtttttattttactttattttatttattttttcccctagattaaatattaagctcaggttatagaaatatgtatttttaagctgattttaaaaatatgggattggtgtctgctggtcttagatgcatgctaactacgtttttctttatatttttaattcaatgcaatgaacattgatcaaatactcactatgttccagtaactatactgggttttgtgggctagtattttaccgttgctggggaaatagattacatatacattagcaataaacgtgtaactaacttgtacgaggaaccaaggtaagttcctttagcagaggtttaaaaagtcaggtgtaggaacagaactgtttaaaggctataactttgtaatctcatcttcaacaaagaacttgaattgtctgtccttaactacaaaaaaaaacctttaagaagtttgagtataatagtatcaaagcctttagagcaggcagatagatgattatttgtatcttattttgtgatttctgcgaaattgtactaaaagacatttccttcatgttctctaagtttctaatgaaaaaaacaataaaataaatgtattttataataaactactaaaaaattgtgtctttgaagataaactttactttttcctttttaaaaacaataatgtataatttgtattttccttttccttttttctgtagttgccaagaagttcactgctaaatttaatgttccattctttctttttct

SEQ ID NO: 5342 - DNA, 1078 bp, Homo sapiens
ttgcattttatatacatatgtaggtgttcaaacaccacacacacacaaacacaatttacttttggaagagttcaggctaatagtctagtagaagtcccacggcattctgtcagtctggatttgtcatatggtttccccgtagtgtcatttaacttggtttcttggtttccatataatttggaagataggtctggagcagcactgcccgacagatcttgctgtgaggatggctgttcttcgttggtgctacccaatacagtagccaccagccatatgtgagagggctaggatgatagaggaaaagaaattctaacttgtttaacttaaattattctaaatttaaatctaaacagtcacatgtggctaatggctaccatattgggcagtgcaggatgggatgctttattagatccaggatagacattttggcaaggatagatgatgtcgtggacttactgctttcctttgctggagggcatctcattcattctctgtctccctttctctctctctttctctccctctgcctctctctctccctgtttcttattgtgaactcatgaatgctttttgaagctagtttttgaattctttcacatagtttgatttaaattagtgtttggcacaacaaattgtcaccagttcaccttgaccaaacctaaacttggtattaactggtttgttttttgtttgtttgttgtttctgtaaggaatggtatttagaaaccaggatcagggaactaaatttgcttgttgctactgtgtcaatgtttctaaaccctttcagtagaaaccctaagggaaattacgtttataatctttggttcacactatatttttcaattcaaatttagtattacagaaaaattaagtgggagaaaattaatattatgagtgttctttttcttggtttctttttttttatatttgtatctcctttcccttagaaaaaaaattatggtggctaatattatcaacctatctctttagttttctacaatattgtctcaaaattagaatatcactactaacaaacccattaataaatttaaggtatgctttcagaccttttcttttt

SEQ ID NO: 5343 - DNA, 1045 bp, Homo sapiens
gcgcaaaagggaaacgtaggttcagagcccccacacagagtccctactggggccttgcctagtggagctttgagaaggccaccatccttcagacctcagaatggtagatccactgacagcttgcactgtgcacctggaaaacctgtaggcactcagtgccagcccacgaaagcagccaggagggaggttgtaccctgcagagccacaggggtggagctgcccaagaccatggggacccacgtcttgcatcagcatgacctagatgtgagacatggagtcaaaggagatcattttggagctttaagatttgactgccctgctggattttggactagcatggggcctgcagcccctttgttttggccaatttctcccacttggaacagctgtctttactcaatgcgtgtaccatcacggtgtctaggaagtaactaacctgcttttgattttacaggctcataggtggaagagacctgccttatctcagatgagactttggactgtggacttctgagttaatgctgaaggcatgattggttttgaaatgtgggtacatgagattttccaggggccaggggcataatgatatggtttgtctgtatccccacccaaatctcatcttgaattgtagttcccataattcccacgtggtgtgagggaccctatgggaggtaattgaatcataggggtggttacccccatgctgttcttgtgatactgagttctcaagagatttgatggtctgtaagggacttttccgcctttgcttgacactcactccgtcctgccaccctatgaggaagatgccttcttctcctttgtcttccaccatgactgtaagtttcctgaggcctcccaagcaatgcagaaccatgaatcaattaaacctctttcctttataagttacccagtctcagggtttcttcatagcagtgtgagaatggattaatacagtgaatctgtagtggcccagggatctgcatttgagtgtggcatttgtgacagttacagcacgtggggattcccagctccttgtccctggctt

SEQ ID NO: 5344 - DNA, 1056 bp, Homo sapiens
catctgccacccccactctccacagagctgagctgtggttacttcttcactttgccttcagccaagagataaaaaacggtttattttttccaaactttgagattcagatgccattgcttctccccttaaaggagaactttcagtgagaagtatcttatcttgtatcttcctcaaaatggaaaaagcatcttgggaaatatgcaaagtaggaaaatattcaaggaaactatgagtttcactctaaacatcaccatcagaactgttcattaaactgggagtaagatcatggcatcacagaatatttatttttgtatttattatttaatttatttatttgtttgtttattttggacagagtctcactctgtcgcccaggctagaatgcaggagcatgatctcggctcactgcaacctccacctcccaggttcaagtgattcttgtgcctcagcctcaaagtagctgggattgcaggcatgtgccacaaccttggccaaactggctttgaaatcctgacctcaggtgatcttcctgcctctgtctcccaaagtgctgggattacagacgtgaaccatcacgtctggcccatagaatttttaaatggcagaggatcttcaaagttatcggatccaacctttatcctaaagtggaaatctcatgtttaaaatctggcttgaatacttccagtgttggtgggaatgcttttgttcatgtcacctcactggcttttatggatctctaattgatataagtctctgccttcaaactctgcctggagcaaataggtatataaaacatttctgtaatctcagcactttgggtggctgaagcgggagaatcacaggggcaggaggtcgagaccagcctggccaacatggtgaaaccccgtctctactaaaaatacaaaaaattagctgggcatggtggcaggcacctgtaatcccagccactcgggaggctgaggcaggagaatcgcttgaactgaggaggcggaagtggaagtgagccgagatcgtgccactgcattccagcctgggcgacagtgcgagactccatct

SEQ ID NO: 5345 - DNA, 1028 bp, Homo sapiens
ggagtgttcaatgggcttcaggaatgagttgcattcagtgatggaaaatagcaattgctattgatgaagctcccaattattgttgaataacttgaaagagttttaactaggataccactgctctgtcttcaatgaatgatcgtattttcaacagtgatgcaaaagacacactatctgcattttcctactttaaaataataaacatgagattatattataatatggtgttttacacatatttttaaacctggatggggtttttgttgttgttgttccagagttacagttaagagtatcaaacatacgtggcactggtctttaggtcgttattccccctttccccttagaactttggcttgcccaaagatctttttttttttttttggctgctaatgagctggaattattggcttattttgtcctctttttttcattttcactcattggaagcattgagaatgctgcttaagtggccaagaatcaggttataagaagcaaatgcatagaatgttctggactagctttgttgatgaagtgaatataccatgggcatagtttgccaaggtggctcagtccatatcctacaagagaggaagcacatggtaccatggagcttgtattccattcatgatatcgatgggtgccaatgtgaacatttatttctccctctgtgattaagttctttaacattaattaaagaggaattctacttcatattttcctggctcttctaatgcaaactttatcctatagtgtgtcttctcactaaccagaatagcaatacaatggaaatggagtcacctcattaggtgtaacccaagtgttgtggcagcctggtgttgcaggtgatgggttgatgggtgcagcaaacccatggcatgtgtatacctatgtaacaaaactgcacgttctgcacatgtaacccagaacttaaagtaaaaaaaaaaaaaaaaaaaaaagagttcctaatccatcctgtcagttcacttgacatctcctatctgcagtgtctttgacagagttgagtg

SEQ ID NO: 5346 - DNA, 1050 bp, Homo sapiens
actcacggattctctgatggctacttttggatacattcatcactatggccctttctcctggcttagttccctcaaaaattacatttaagttttttgatacaactgcatatgcagacacaaccttggaatgatgtaatttctattttaaaactcctcctgaaagaaggcatttgagttgaagatttcttaaatcatttctacaggtggtttgggtgttattaggttggggcaaaagtgatcatggttttttaatggcaaaaaaaactatcacttttgccccaacctaataattaatgtctaaccggattcaaaatgcattatccaccatactccttctgatttcacaccagtaaaatgcagcaagcgacaggagtccactttgcaaagtcctgctgtagatgacaaggccgggatggtttgataaggtcaggaaaagatgaatcaaatttcaataaaaagatttaataagctggaacagtaccccaaaatttgcagcttcttccataaccccagggcaacgtagatatcaaactggcgaatcgccatttgaattctgaattgattggttgccattaggaaacagttgttatgtgaagggtacaattgataatacagggaaagagccaatgtagaaaaatgactctgagttttgggagcatgaaagttacaaaatccaaacatatattctgcagccagttctagactgctacgtgtttcaccttattccacacaccgttcaggggatgagtccagttcttgattgctacgtgtttcaccttattccacacaccgttcaggggatgagtccagtttcttgattgctacatgtttcaccttattccacacaccgttcaggggatgagccactcattgtctctcacttggaagaggaacagaataatgtctattattcaacatctgacatgaattttgtaaggaaggtgagatcctacccagagctctttggactgttgagaatgaaggcattttgttgatccatgggctgagtctgtatcacaagatgacaaagcaagtgtaatggaatatttc

SEQ ID NO: 5347 - DNA, 1066 bp, Homo sapiens
ttgcatggctacttctatctgctggccctctgaacatccatctcaaaatatgtccgagaaggatgttttgagatattttgatttcctccaccctgtatttgaaaagaggggtgctatgcagtcatctccacaaaaagctactgagccctaggactgagcaggctgagtgaaatcaccttcttttcactgataaagttaggaggtcactgccaagtcttgcttcaggccccgtttcctggctccctcgaatgaaccccctttctgaccttttggctgtgttaagccgcaaatggttatgccttcctggccacggagcctgtctctgcttaatctgacactgctcatatctgcccctattatatagtttatgtagtggcaaattccaaaacaatttaactcccatcttcaacacattttttaaagtaatattgtcatttccaatgtgccaactctggaactatattctaaatatgacatgggctttaacaatggcaacagctatcaatagactataaacttggtttagaaccagagtcagactgccttacttcaaattctcctcttgtatttattagctgtgtgaactcggggaagaaagcttataactttaagactcagttttcccttctgtaaaatgggaataataatgataatgcttacttgatggtgtgaccagtggagaacctgtatgggtctgcagaaactcgatccttgcctcttcaaaggaaagaatttggccaaggggtagaagtgggtttaaggcagcgggagagatacaggcaagttttagagcaggagtcagagttgtttaaaaagctttagggcaggaacaaaaggaagcaaaatacacttgccagaggaccaagtgggtgacttgagagatccagtgccccatccggtccttgactggggttttataccttggcagggtttttgggcttgcatttcttctcccctgattcttccttcggagcgggctgtccgcatgtacagtggcctgtcagcacttggaaggggctgcgtgcgcagtgtgtttactgaagttgtgtgcatgctcacttgaggc

SEQ ID NO: 5348 - DNA, 1070 bp, Homo sapiens
tctttcctactgcccagcaagtcactttccgcactgctccctccagatctccatcagccttttgcacatcagctcttatttgtaattgcatcattgctctgccagtctgcctcttccatgacaacatggtagccttgaggtcatagactatacaccccaccacggtgcctcagatacatagtaagtttataatatatgtttataaaaataaatgcgtaagagatttgcaggccttctttctctgtttctgtctccgtataaggctaatgtgtatctctttaggatgattgagaagttgtctagaatctaaacacattaaatcatgattgcacctaattataaaactcaaggttgattcatgcagattttacttgtaaaatatgtatttttttaattttaaagagttatcatacatttgacaaataaaaggaagtaggcagtagagaaaggcatataaatgaaaattaagtttatctgttatttcaaatctttgggaaataattgaaagcaaaagtcggagtggtgactggaacacattgtacagaaaagtctaaatgatacccgtgatatatttgataatatggaattagcatgtcaagagaattccaaaagcagaatatgagattgctgctgtctctgttagtcaatggccatagtgatcccccaccatgctgatggacggtggcccttctgaaaagggagcccagggtagctatcccagagtcattgtgagatttcatcagggatgtctctaagatacccaccgagatctgagtatattcttttattgctgcagctatctgttctcagttgaggtaatgtgagaaattggctggttgagaaccctcctaagcattgaggatgcttgttataaatgcactcacacacgcatacgaacatacataggaagaaacataatcgatttcttacacagaaacaagtacatatatgaaacacaattgaatttcttctgtttaataggtaaattcctaattttataactaagaaatgacctcatcttatactagccatcagtaaagtcaaagtagcaatattctgttttcaattat

SEQ ID NO: 5349 - DNA, 1363 bp, Homo sapiens
tttcagttctatcagtttttgcttcatgaattttgaacctctgttgttaggtggtcatagagatttcatattaaaataaaatagagtaaacccttcagacaaatagaaacaatagaaatttctgtttatttcttgttaagaagttatcttaaaagcagaatgatctttatacgtagaccatgtggacagtttcttgtgatgtccttagacctgactagtggttctcaaagtttaatgttaaaaatgctataaggttatacacacaaattcatgtatatttcatggatgatttaaggaatgtacaagaataaactttacctgatttttctgttgtggacatactttagaatattacctcctgcaaaagtccacttccataatattttcttttgccttcattctgcttaagaatgtccaattcaaaggttacttcctcagtcaaacttctatgaactgctgttttcctcagtagattaattcaagcttttatagctcttcaaatatatttctgtcatggaacctgaaattctattgtacaggttgcctatctgttatccaaaatgcttcagaccaaaagtgttttgaattcggggtttttttttggattttggaatgtttgcacgttcataatgagatttcttgggggatggggcctaaatccaaacacaaaatttgttgatgttttgtatacaccttacccacatagccagaaaataattttatacaatattttaaataaatggaaatgaagtttgtgttacatccttatgaaacaaagtttgtgttaagtacttatgtgtgaaacaggaaataaagtggaaccttctacttgtgtcctcatgtcagcactcaaaaagttttggattttggagcatttccgatttgggaatttcaaattagggatgctcaacctgcatatcattacctatgagatgcctttggagaataacttaatcatctgtttccacattgtttgtcataccaacctgatgtgtggttaggtacttacaggttatttttaaatgatgaatagatgaatacatgaatataatttttctgctgtcgtcaacagagtggctaggtaatcatgtttttattggctcttgagctcaatgaataattgtggagtcatgatccctagactacttcactcaatacatttttttttctgctgatcaattaggcaggatgtttattatcactgagtgcaataataatccagtcactgaataaatgacattcattatttctctacttttcctggtataagcttcctttctctgttgttgatgggtgcaaagttgcatgaaaatgcctcgcctttgcttccaggatccacaggtgagctactctcagagggtag

SEQ ID NO: 5350 - DNA, 1043 bp, Homo sapiens
tgagaccaacctggctaacacggtgaaaccccgtctctactaaaaatacaaaaattagccgggcgtggtggtgggcacctgtagtcccagctactcgggaggctgaggcaggagaatggcgtgaacccgggaggcggagcttgcagggagcccagatcgcaccactgcactccagcctgggcaacagagcgagactccatctcaaaaaaaaaaaaaaaaaaaaaaaaaaccagagagagaaagaaggaagaaaaggagagagagagggagggagggagaaagaaagaaggtaaattgagacagcactaagtgctatggagagaattaaaggtgagccatgtaatgtggctgaagaattaggttaaattgggtgttcccatggcctaagggggtgacatttaagttagggttaacatggagaggtgagcaggaagagagtttcaaatcatgtgagagctagtcccaatgccgtaaggaggaaatgggattggtgtgtttgaggaactgaggaagggcagctgggagtatggtacatgaaaaagaccgtgacaaagaataagattgggcacatagatggcagttccatcttctcacgttgtatgccaaagtaagaagttcctaatttactgatagcaatgtgaacccaatgagaaacttttaaaagaagaatgaagccatctggttaagtatttaaaagttcattctttgggaggctgaggtgggcagatcacgaggtcaagagattgataccatcctggccaacatggtgaaaccccatctttactaaaaatacaaaaattaaccaggtgtggtggtgggcacctgtaatcccagctactcaggagacggagggaggagaatagcttgaacccaggaaggggaggctgcagtgagccgagcgccactgcaccccagcctggtgacagagcgaaactctgtctcaaaaaaaaaaaaaaaaagttcattctttaagtcatggggcaaatggatcgtaactgggtaagaatggcaacagcaaaaccaattaagaagctgttgcatta

SEQ ID NO: 5351 - DNA, 1068 bp, Homo sapiens
ctacaagcctgttccaaatttcattgttttattcatatttttctttctctgttttctttctatttaaagataggggcaaccaggcataaagtaaacttacctcagggatataatcagcccagatctgatgccaaagcatgtgatttttttttttaactaccccgtgcttgatctaatattttggaaagagcttcagactccagcactcttcaggaaatctaagttcttttcctggatctgcctttattaactgtgcatctggatccaagtcatttttctatgaaactcagtgtcctcacatgtacttttatgatcattttattgctgcatttataagattctacttatgattctatcatctagttgggtttatctctctgtaccttgggtttcttatctgttcagcgggctcaatgcccatagtagtctttatagatagataatataacatttatttcagtcattttttttatgtgtaacaaactccttttaacctagtggattttatctatatttatgtgattttgttgtgcgtaccgtttctgtgtgttagcaatttagacagggcatgttatttcagctccatgatttctaggggctcaggtggaaacgtaaatggctgggaggagatcacttctacaatgatttcctcattcacgtgttttggcattgtggccggggtggacagaacgctgggctcacctgatactctattgactagagcatcaacatgtggccttttcaaaatagcagcgtcaggctagtcagtcacctccatggtcagtggcttccccagagccagtgtcccaagagaatcaagcacaagccccatggcttttctggcatagcctgagaagtcactcagtgtcactttcaccaccacctcctgttggctaccagcaactcataaggtagcctagatctgaagagggaggcaagttagagttcccttcttgatggaggaatggcaaggtcacattggagaagggccggtgggatgagaaagattgagggggaacacctaccttcagaaaacacaatatgctgcaacactaagtaaaatcatga

SEQ ID NO: 5352 - DNA, 1051 bp, Homo sapiens
agagagagaaggaaagagagaaagagagagagaaagaaagagagagagaaagagaaagaaagagagaatgagaaaaaagaaaaaagagagaaaagggaaaggaagaaagaaaaataaaggaagaaagaaagagaaagaaaagaaaagaaaaagaagcattctacaatcagaatgaaaaacagaacaataaccgttgttggagtttattcattcattccgtcagctaaatcagtatgagctctgtagctgatgttgccatggaaaccaggcaggaacagagctgcctggttcctgcctgttccaggctttggatcctgtaaattctaagattttaaaaggatttttgcttatgttagttagtctgctcttgacaaccaaaggcactctaactgattctgagagtaccaagttggaagttagattatctgggttctgacatcagatctgccattcaatgtttgtgtggcctggaattagttgtgtcacctctctgaacatcagctttttcatctgtggaatcaaaattgtttaattgcttgaaccccattgttactatcagttttatgattttgtgagatctattattatagtcaattacaggccttctgtctcttgactatccatggaatcattgtataaatttgcttttccttctacatgaaaaaccaaacatcttattaacatcatgatgaataaattagaatagaaattagatttaaaaagctgagaggcctttgaaggccaaattgtatgcctaaaatgttaagattttattatcctggaaagagatttggtaaccatgtggagcaggatggatttgaaggtaatattccataaagctttttttcctttttttttttaacttttgctatccttttgcagtaaattagcaaacattaattaagtaactactatgtgtttggcacagcaccaggtactgaagatgcaataggatgtggtataaacctctttcgactaagtctggcaacagttaagagagacccaaggaaataacagcctaaagcagggagaattgtgtgtctttctcatg

SEQ ID NO: 5353 - DNA, 1093 bp, Homo sapiens
ataatttgttcctaattttgttctttgtggtgtctttttggcccttatacttatcatacctttatatgccacacccaaaggtccattaactagtgaacttcttgaagataggataatgcctaatcaataccacggctagtatagtgccacattatttgctgcttgataaatatttgccagagaaaattgaacggatgttcatgtgcttgtcaattttttggaacatgagaaagttgtagtagtatttgaaattgatgctattaactggaagtatggggagtgagcgaagaagtgaaaggtggtctttccattgtgggaaagggaggggcaggaactggggcgcatacctgtatctctctacaattttcctgcttgtgaagtatggccccctgctgtaattgacattgttacaccagtattcctagttatatgaagaaatttaaaagcaaaggtgtaacttttaggctgattgtctgttgtctttgaagcctgcaggataatactctgtgaattatcacgttgctaggcaaagttcgttggcgtagaaaagtttccttgtattttgcctcccgtagaagaccatctgaatagtttttccctcctgaatttttgcttgttaaaattcaggcttcagtgatgttcacagagtttctagcccaaatcagttcaattagaacctgcaagggtgtctgttccttgttaggactctaagtggtctgacttgtgtgaccttggtctttactaatagaagcatagaataagaacaagctgtggccacctgggaaaggatgttacattttatgatttcctccttttatctacttaattctgttcctttaaagaccttggtatgcgtgcatgactcctgaaagcttgatgtagctcccaataaatatgtaaccgaattaattgcttttgaaaaggtcaccagtagctttaaacattataaattatgagattcaataagttctgccaataaaaatccctctattacttctcgttcctgaaatgtgtaagacctttagtctagaatggttttctcatttctctcccattcacgtcccatgtcaatttgttttatctacattaagtc

SEQ ID NO: 5354 - DNA, 1087 bp, Homo sapiens
gtgtaggggaactccgctttataaaaccatcagatctcgtgagacttattcactatcacaagaacagcacaggaaagacccgcctccatgattcaatcacctcccactgggtccctcccacaacacatgggaattatgggagctacaattcaagatgagatttgggtggggacacagccaaaccatatcacagggatttaaatgtcataaactctactgatgacctcattgccacttgtcaattacaccctcagaaatggtttctacttttactgaagttcattatgttaaagggcagactgcctttggagctgagactcctgacacatcatgacttttctcagcattgatcagtttagaataattttgtgatgtctatatttgtcattgtccatgggctttttaaatactgcagctagttgtactttgagatttaaggaccgattatttccttatgacacacagaaatctatattctgcaggctttcacaaaagtatgttcagacagagtctttgcagggatttggccctgaaatctagatgtcccttgttgattgtagtgtgtggtgtaggccaccagacagaataagagggctgcaagtggcatgtttatggggctgtgaagtcactttaatgatattcctcttccttgagcagtgtggcataaccagagacttctggaaaattactatagttgggctggcagcagcaagccacagggtgctggcacttgttcagaaagcccaaaagacctgagagaaaaaccctagtttgggccaaatggaaaggagaaggaggagttccgaggttgaatcagactgattcctggggaggtaggtttgatataatctctttgttatggaacaggcagatagtttgtgcagtcaggcttgttggtgggatgacaccactgttcacttccttctcttcccccatccccatttttttgggggtgggaattcttagcggtgtttctgaactaggtttagatggaaggaacggaagtggcgtgtatgtgtaataataagaaacgatctctcatccctttatcagacagagctgaagaagggagtcagtgtgtaggatg

SEQ ID NO: 5355 - DNA, 1041 bp, Homo sapiens
taattttttgtatttttagtagaaacggggtttcactgtgttacccaggatggtctcgatctcctgacctcatgatccacccacctcggcctcccaaagtgctgggattacaggcgtaagccaccgcgcccggccggccgaagccaaagttttaagatgcctgcagctgatcctcccccttcactttgttccactcaccctcctgctgttcctgcaatgtgctaggcctgctctcacctcagggcctctacgctggctgctgtctctgctcagaatactttcccccagataaaccatgaatattacttcctcactttcttcaagtctttgctcagatgtcaacttcctaataagggccccatttaatgtcccattctgcccacagctctggcccagaactcctgatccacagtgctgatgattttctaacatatttgacatctatgaatgtcatagtatttttcttctttactcgatacttctgatatatcatttgcactaactactacatttaaagtatatttttggaagactgagctgttggaaatgccttttagaattgataaaggtaatgcacattgctttagattctattcaaaaggtcagcataagcttgtttctacacttaagtgcagaggtagaaaacttttaagagattacactattgtaagtatcttaaaattgataagtttcaagaggaaaaagaattatagttagatcagtttacttccaaaataactttgccattattttaataaattcacaatttttaatgaggatgctggttcttttgaattgtggcacacttgcagaatgtctctcactccatttccccattgtccttcagcaaacacttacacaacttaacatgctgctctctctaccagttcatcttgacctccataacccttaaccatcatccctaaatattcagggtaacatgctgtgaaaacttcaatcaagaataaatctccttactttgtggactttcaagcaaacactgatgattctatttgaacccctcagtgtcatgacctaagc

SEQ ID NO: 5356 - DNA, 1060 bp, Homo sapiens
gactgtgagcattgcctgggccttgttgctccattgatagagcacaggcagagtggatttagcataattcttaagagtcctaggatttttggaatggtcaatgagcattggcataaacttaaagtcaccagcggcattagcctctaccaagagagtcagcctgtcctttgaagctttgaagccaggcaatgacatctcctctctagctatgaaagtcctaaatggcatctttttccaacagaaggctgtttcatctacaaggaaaatctattatttagtgtaactaccttcatcaattctcttggctagatcttttggaaaacttactgcagcttcttcatcagcatttgctgcttcactttgtacttttatgttacggagatggcttctttccttaaacctcatgaaccaacctctgctagctatcaaattttctcctgtgacttcctcacctctcagccttcataggattgaagagagttagggccttgttctggattagggtttggcttatgagaatgttgtggcgggtttgatcatctatccagaccacaaaaactttctccatatcagcaataaggccgtttcactctcttatcattcgtgtgttcactggagtagcacttttaattttcttcaataacttttcctttgcgtttgcaacttggctgactgtttggcttatcttagctttctacatgcctctctcatgaagcttcatgcttctggcttttgattccaagtgagaaatgtgtgactcttccttttacttaacacttagaggccatggtagcattattaattggcctaaatttaatgttgttgtgtctcagggaatagaggggcccgaggagtgggagagacacagggcaacggctggttggtggagcagtcagaacacatacaacattcatggatgaagttcaccattttaaaggggtgtgggttttggtaccctaaaacaattacaatagtaacatcaaagatcactgatcacagatcaccatcacagatatcataataatgcaaacaagtttgaaacactgtgggaagaattacc

SEQ ID NO: 5357 - DNA, 1092 bp, Homo sapiens
tccatatcaaacattggaagcttgaaatcagcttccaaacgtgcaaatacttttgtttgtatttaccccagggaaatcagcaaacactacaaatcagtgcttgattgattattttattagctgtcaagacttcagaaagtgatggagaaaatgttaacattgcaaatataaacttaaaagtgcattaatgcctttcactattacatattactttacataatagtaaacacatatattattctgtatctgaaaactattaaatgatctgattcagcaacaaaaaagtggctcacatcattgataaacaaatggaattttgacattcatcttctgaaaaattgaagaaaaggggacacttctaaactcagtttatgaggccagcattaacccaatacaaaaactagataaagatataacaaaaaaagaaaactacaggccaatatctatgataaatatggatgcaaaaattctcaaaacaatactagtaaaccgtcttcaccaggtcattaaaaggatcatacaccaggaccaagtgggatttgtcgttgggatgcaagaatgcctcaccacatgtttggtattgtgaaatacttacatttggtcttccatcagtctcctgaatacagctcctcaaatccgggaatctccaaagtattaagtatctctttatgctaatgagttgactgattactggctaccctatgtagcttcaggatgtggggactggtcactggaaagaccaaggcatgattagaaggtagggactttcagccccatccttgctcccccacctccagggagaggagaagggctaaaggttgagctggtcttcagtggccggtgatttagtcaatcatgactgtgtaacagcactctccccaaacccccaaaacctgggttcagagagaggtgaacacttggaggttcctggagggtggcatgcctgcagagggcatggaaacactatctctaggtagatagtggcaggactgtactggaggacagctagtgtctgctcaagaattgattgcttgcttgatgtgtggggaagaaccccccgcaatgagtgtcagaagcatgttatgaaagtag

SEQ ID NO: 5358 - DNA, 1106 bp, Homo sapiens
gacttctgtgtctgtccaaataatttaggtacattgtgactctgtggaattggagttgggttgcatttcaggatagatgtgagtctgcaggttgactggaatcagaacctcagggtatcaggacctcggacagctctcgcgtctgttctccgttggcagctctgcttctctccaggcatcttcatctgcctgttttctactgattagctttccccctctactttgtctcttggactcgttcatatcattgacttacagtagttcattcttctgatttcctagtccagagttttgagattcaaatctgattgcccagtttatcctttaatacttgggcagaggtttgccactggcttgtgtgtgcatgggctgattctgactgaagatttacttcttattcctacaacggggtcagggaggaaggagaagactgcagttgtaagcctcctcctcttaggcctccacaggcgctgacaggcgcctctctagcttaaaggaagtagactgtatcttgcaaacatacatcacaatttaaatgaaaaaaattgtcacaacattcattggtatttaaaacattgcatattatttagaacttgatatattcattggcacttatagccacaaaaacatattatcaagaaattttctattatcacaaaatcagatgccttcatgttttctctcttatttttaagggaaaatatcaaagcagtttggggagtttgcagtgtatgataataaatatgatatttaaacgatgaaactaaatggtgaaaatctcttgttttttattttctgccttaataagatttatatttgtgttttttactgttagtagaatttagaaattattttatttcctggccctaccaatttgatttgtgtccttcagagtattcttagattacagtataaaaattcaaagtctgagcaatattcatgatcctatttttatttgtcctttatgtgagaattcatgaattacagtacctgtattttacattttgttaaaaaaaatcttgtggaaaaggtaaggctattggtgatatgactgtatagcacttaagcactccatgatctaaaagtatttccaaactaacatcttc

SEQ ID NO: 5359 - DNA, 1034 bp, Homo sapiens
catttatatatattcttcggacaatctatcagctttaaaaggcaggtcggattgtccgcactttaggaagggctttggcctatggactatacaaccactaagatttctgtctaaccaaaactctgttgtttttgttgaaacttctgagctagctttttgatcatggggaggtttttaaagtctgtgtaaattttgtaattgctttttacatttacttattagctcactatccgctgaggaaagatgaactgagctccaaaggctaatttgtaatttcattagcaattgaaataatctcatggaggttttttctcttcttgtagcaccatttgaccttattagagtgactgatgttactttcatttactgagatctccttcattccactggacgttaaaatagcacgtgctaaatctctgcctgggggtaatatttttagctgctggtgtgctgatgggcctaatattttcctattcctgcctttatagtgagatttttatgatattcgctctttctcataggactgttatttctagctgactaatatccaggcagtataagacttgaagagtaccagagaccaggtgtggtggttcatgcctgtaatcccagcactttggaaggctgaggtggacagatttcttgaggtcaggagtttgagaccagcctggccaacatggtgaaaccccatctttactaaaaatacaaaattagacaggtgtggtggtacgggcctgtaatttcagccactccggagggtgaagcagaagaactgcttgaaccagggtggcagaggttgcagtgagctgagattgcaccactgcactccagcctgggtgacagtgagaccctgtctcaaaaaaaaaaaaaaaaaaaaaaaagagttgaagagtgtctacttgtacctgtgtggatttgaatccaggctctctcgctaaccagctgtataaattggtcaagttactaaacctcttcaaggctcacgttccctgtctgcaaactggggtaataatagtacctgcgtcttagagttg

SEQ ID NO: 5360 - DNA, 1051 bp, Homo sapiens
agatcatttagaagcccagttgacatgatttcctccatttactcattggtagaagatgtcaagaacaatacaaatctacatgaccttcattgtccacacaaagctctccatgtcagccaaactggtttcatagaaattttttcctctagtacagaaatctgtggacattttttcattgttaatgcttaagatggtgtatgccaagggattttgaagaaaatttggtaccatgtagagagaatagattcatactaatatggctattaacacataattaatattattacaatgttttttctctttgaacttttctaggtgcattcgctctggaaatcaatgtcatttgtcactggttctaaattttatatttggtattttgtttttaggcttttggttgattgttaattattgagtgtttacttactgtgtgccaggtccattatgtatatgacttgttttctttaaaataatcttccatattggttattagtattctatttttctaaaaataaaaagctgaaaggcaacttacgcagactgagtgacctcccaagactagtggcagaactgtcgagctctgtgaggctggaaacacctgtttttcactgcagtgtctcaggacctagaacaatggcacaaaataggtgtcctcgaatattggttgcatagatgcatgaatgaatgaataaaatagtgaatgaatgcctggtccaaagtccctactcttgcctctttactgtgttgctctctagataaatgagtgaatggacaggacattcgaattcaagtccattcattacatatgcattggccttggctgtgtatggggcagctatgtgtatggtaagtgctgaagatagagttttggacagtgcagataggtctgaaccatcgcggagcttatttaccatggcaaacacagatgccaagcacctcatcataggatgattaataccatgaaagaggaagaactgactgatataaattatttatttttggttttctggtttctaaaataaatactatgttaacctctattttctgttgacag

SEQ ID NO: 5361 - DNA, 1035 bp, Homo sapiens
tctttctttttcagcaaggggatcagagctgattatgaataaagatgaaagactatgtgctactttaacctgcactaaatcaaaacttttcatccgtgtagcccagaatcattaaaaggtagtgatgaatatgtgtttgagggaatattgctatggctttaatggaaagatgcacaggcgtcctggtacaatgctagctgttttattctctagcctgggcgaacagtactatactgtgtacctatgaatgcatttatatgtgtctgagataaaacagtatgatgggaaagataaatcagaacttagctttctatgttagtcttaaagcattccaactgcataaatcaggaaaataatctacttgagtttaaattattagtattgtatttttaagttaattgaaataactggatacctgtctattctatttagagttggttttgagaagaaatattttggggggagttcggtggtttcaaataagtcataatattttgtgtttggtaagactctgagtattgtaatatgcaagctgtgagaattttgaattctatcttatgggtgtatacaatgtgaagagttagacttttggttggaaaattatagtagtaagctatttccgttaggctaaacaattgtattccctctctgtttccctttaaaagattaaggactgagtagattggacacctaatagttatcttcattagaaataaactaaatatgcagcaactagtgtgtgtcattcagtcagttattatgagaacaaaaaaagaaaaaataagaagacagggctttcagaaatagttatttgactgtttagtgtacctgagcctcatattggtaattttgggtttactctacacagtgttgtatagcatcgaatcgccattaattttacttttaagttaacagactgtaatgatttcaggaagagaatgtactacctcattttttaaagcatgattattttgttgattaagctgggaactgcttgtgctactcatttttcccttcttttattagctttttgct

SEQ ID NO: 5362 - DNA, 1029 bp, Homo sapiens
gagagaacaatggctctcccccaggatcaaccctctactcttcctttttcactggaatgttgcctccttaaatttccaattatatctcttcagtcctgtgagactttcacactctctggtttctgtcctccagctgtggccctccgcctgggaaaagttcacattctcagcctcttagtttgcaagtagagttgacaaacatcctcagttgcaaagtaaagctgccaaacatcagcttacctttctgcagtttttttactttccagaatcttggtttctttaatgtctgctcgttttgttactggaaagggctcccaatccagaccctgagacagggttcttggatcttatgcaagaaaaaatttgaggcgagtccacagagtaaagtgaaagcaagtttattaagaaagtaaatgaatatcctggctaacatggtggaaccccgtctctactaaaaatacaaaaaaattagccaggcctggtggcggaagcctgtagtcccagctactcgggaggctgaggcagtagaatggagtgaacccaggaggcggagcttgcaatcagccaagatggcgccactgcactccagtctgggtgacagagcgagactccgtctccaaaaacaaagagacaaacaaacaaaagaaaataaatgaataaaagaatggctactccataggcagagcagcctcaaaggctgctggctgtccatttttgtgattgtttcttgattatatacaagaaataaaaataataaataataaacaaggtgtggattattcatgattcccctttttagaccatatagggtaacttcctgacgttgccatggcagttaccatggcgttaccatggcagttgccatggtaaactgtcatggcactggtaggagtgtagcagtgaggatgaccagaggtcactctcgtcaccatcttggttttggtggattttggcgggcttctttcctgcaacctgttttatcagcaaggtctttatgagctgttatcttgtggcaacctcctgtctcat

SEQ ID NO: 5363 - DNA, 1052 bp, Homo sapiens
agaacttcctcaaacaaataagacgtatctaaccttatcagcaatgttgatgggtgaggaatattttcgaggctagaatatcaggaaaggagattgagatgacccacttccaattctgggcctttatttttatatttcttcctggcatctgacaaattacagaagtaagatgcagtgaacttgaaatgagtccagagaggtacaacagtggtgaccaaaaaggtgcaagtgttagtccgttagggtccagatttcaagaaattgaattaatttgtccagatgagaagactgaagaggcatttaattacagccattgaggagtgaaaagattttgtcaagggaagtagaacatctgttcaccctattcaatgaggccaggacaaaggggaaatgacttataattcagcaagatgctaattaaatactaaaaatctctggtcatgtatatgagctttgaagtgatgggaagtatgtctgaagatattttctttagaaaatacagacaatgtagatatggaaatggattaagtgaattctagaaatctttttgatcctttggaaagcttttatattgacattatctcacaaacttcctatcttttctgtgagaaaaatgacaggctctaattccttcaacacattccaccaacacacacacacacacacacacacacacacacacagaaaggaagctaaaaccaaaccaaatgactgatatttaagatttatatcagttatgaatatatttgcttatagggcagcaaaatatgtgactccagttgatatggtttggatttgtgtcctcacccaaatcttatgtctaattgtaatccccaatatcggaggaggggcctggtggggggtgatggatttctctcttgctgttgtcataatagtgagtgagttctcatgagatctgcttgtttaaaagtgtgtagctcctcccgcttcgctctcttcctcctgctccacccacggaggatgaatctccttccccttggccttccgccatgcctcctcagccatgcttcctgtacagcctgcagaaccgt

SEQ ID NO: 5364 - DNA, 1034 bp, Homo sapiens
tagacacgtccaggcgcagtggctcacggctgtaatcccagcactttgggaggccgaggggggcggatcacgaggtcaggagatcgagaccatcctggctaacatggtgaaagcccgtctctactaaaaaaatacaaaaaattagctgggcgtggtggcaggcgcctgtaatcccagctacatgggaggctgaggcaggagaatggcgtgaacccgggaggcggagcttgcagtgagccgagatcgtgccactgcactccagtctgggcgacagagccagactccgtctcaaaggaaaaaaaaaaaatgagaaagggatagacacccatttttgcagactccacaagccagttatctctgaaggctggacagtctgtggacagctgctgtgtgcagacagcagcacaggaaaaggaagacagaggagagggagtagaggatggtaagtgacagacacatggatccagggaagaagaagagaagcagtgaaaagagagataaagaggaaaatgagacatccgcaatgctgagagttgatgtcatttgtttccagagctcctaatcgactcaaaaacttctcggtataggccaaaatcctcatgacacttttttttcccctatctttcctactcacaaatctcaacatttgtctttgaaaggtactcatctacttctcaaatattgtacttacagatagaagtcttcagaacctgcatactattttgtgtctcagccaccaaaaaaaaaaaaaaaaaaaattatggagagtaattgggcaaattgagggtatgaacgccagaagaaacaatgtattttgacaagaaaaattggttggcaaacgttaaggtttttatgagtaatcacaatgattctttaagtaattataatttgttccacactctgtcacagttgttttgattgtggctttttattagtgaataaagttatttagttgtccttatttttaggaatagattcacagtattgaaatatttcaaataccaatgatgttaaatttcttgaatattttccct

SEQ ID NO: 5365 - DNA, 1056 bp, Homo sapiens
gaaatgcttagactttaaagccattattaaaataaaagtactggatatatattgatctcaagagtttaacatgcaaattctttctcaaagcatttctgctttaagaaagatgcccttttcagtaaatggcatcaataaatgccctttcagatcaataaatgcccttttcaacatatttagcattcacaaattcagttaagtaataaaagtaactatgcccatgctttcttttatagctgattaataattgcatattgacacatgccatcttattgatgatgtatactgcctcagcaagcttcttccttttggtcatatttctctgatcttgttttttttctcccgcattggtttcattttcattcctgctttttcttcttgacatatatatatatatatatatatatatatatatatatatatatatatatgttaagacagcttgcagaactgccctgcccccacttttattaatttgaaaagcaaataactctgaagtaaacagtatgcctgtgatcttttgtgcagtctgtatttctgcccagactccctatttgtgtccctgtaatgtctgggaggaggccagggtatagaagccattgcagtggagagccacatagagaagagccattggaagcagctctggaggcacccctccccaggccctgcctgcgcctgcctcactgcgaggacttctcccctctcagagccactcaccacagttgccagacgtgcagtgctttattttctgctggactggagcatttagcttgttaatgtttctttagaaagataattgtttctagttaaacatgttgtttgaaaaatatacccagatgtatatttttatgtcgtggtgctataatttctacttttttccccttcaaaatatctaagttactggaaaatttcaacttaggaacaaatctgttggagaaagtgaggtatgtttaagtgtttatttcttaaggaaagtaaatgttctacataaaaaatgattattgagataatcactgttaactaatttaaaaacaaaaaatgtcatttaagaggccc

SEQ ID NO: 5366 - DNA, 1053 bp, Homo sapiens
tatgatacctttggtgaactaaaggtgccaaatgataagtattatggcgcccagaccgtgagatctacgatgaactttaagattggaggtgtgacagaacgcatgccagtaagtggcatttgtggaaatgttggctattttggatgaagtaggctgtattcatgagtcactttactttataaatatttttcagagttaaaatgtaaagttattagaaaagatggcttcgtgagtaataagaggttctctttcactaaaatgttaaagaactttttgaagttttagcatgctattattttgagccatcgctttgaatattttggattttttaaaatttaaggccgggcacggtggcttatgcctgtaatcccagaactttgggaggccaaggtgggcagatcacgaggtcaagagatcgagaccatcctggccaacatggtgaaactctgtctctactaaaaatacaaaaattagccgggcacggtggcgcgcgcctgtagtcccaattactctggaggctgagacaggagaattgcttgaacccgggaggcggaggttgcagtgagctgagatcgcaccactgcactccagcctggcgacagagtgagactccgtctcaaaaaaaaaaaaattaatttaattttaagttccgggatacacatgcaggatatgcagttttgttgcataggtaaatgtgtgccatggtggtttgctgcacctctcaacccatcacctagatattaaaacccggcattagctattttttctgctgctccccctccgcccacaggcccctgtgtgctttgttcccctccttgtgtccatatgttctcattgttcagctcccacttacaagtgagaacatgcgggtttggttttctgttcctctgttagtatgctgagggtcacagcttctagctccatccatatctctgcaaaggacatgatctcattcttttttatggttgcataatattccatggtggatatatacaactttttctttatcctttattgatggacatttgggttgatttcatgtctttgctattg

SEQ ID NO: 5367 - DNA, 1055 bp, Homo sapiens
atatgcatatccataagggtttgtactcttaggcaaatttataaagcgatcgtgtataaatgatataaaaaatcaatttgaatggtattcaaatttcctaatattaaaaatgcaactttgacttagttcatgctattgtattagcaaaactgttttaattgcatgtgtccttatagcagcagcattgtgtattagtagccttttaagagaactgtgtagaagactataaaaagggctttataactgatcttttgacatactcactttgagtggcatatgcccaggaaaatatttaaaagaaagaaaagctatttgtacaaagttttctagcagttccactcagataactttaagggggaaaaaagcccaacgattggaaatggttaagtaaattttggtgtattgctagtgctatcacagaatgttatatagccattcaataatattgatatatgtcaaattgtatgcaaaaaagtgagattcaaaaatgttaataagaacataaattgtgtttactgatacatgtgaaaatttaggtctacattgaaaagaatcagaagataacatgtaattcagtttaacattaggggttctttatttttcttctgttaaatattgatgtatgcaataaaaaataaaagattaattggtaaagtggtttactgaactggtgagaaaattactgatttcttagaagtttctaaaattctattttaaattaaaatatacatttctaggtgttaaagtcaaaaaagatcatcttcagatatgtgtggcagaaagttttacaaatcttggtggggaggaattcttggtcaagatggacttcataatttattttttcttagttgatcaccattaaggaatagtaatagaaatattagtaatacattctaggacatcagcatgaagacgtcatatactaattaaagtatgcccctaaatgcaaacatgtcacttgggaatcttaaaaaccgtggagatgaaagttggattcatagatgtgaccgaacctggtttgcagagagacctgtgcgaaggccagatcttggggg

SEQ ID NO: 5368 - DNA, 1029 bp, Homo sapiens
gttccatgtggctggggaggcctcacaatcatggtggaaggtgaaaggcacgtcttacatggcggtggacaagagagaatgagaactaagtgaaaagggaaacccttttaaaaccatcagatatcgtgagacttatttactaccatgagaacagtatgggggaaacaactccatgattcagttatctcccaccaggttcctcccacaacacgtgggaattataggagctacaattcaagatgagatttgagtgggaacacagccaaaccatatcaccttcaaagaagaaataagagaattattagtaatttgctcagaatctggtatgtggaagagccaacatggggacccagccttttgtgattctaaaacctttgatctttctactaacattcactgttagagagtgtaggcgctgcaggagaaagagaaagtgcccacgaaaattagtctagcattgccgggggtaaaaagcacacactggtcctgcagcttattgaatcagagaaatgtgaagataagatgaactaaacaaacatattttagagcatggatctcgaagcagaatttggctaaattttaacaaaatgttcttcagtaacacatctcatgatctgaagattgtgttacaaaaaatattatcaggccaaaatttgttcggaatacactaatttttgctcctctatatgtgaggaaaatgagactagacagatttaagtaattgacaacttacttaaagtagcaaagtcatggattgtattgacttttaaaaatatagtaaaagtcatatttaaactttatcctaaagtttaaatctaacagaacaactgaaatacttgaaatagacctataaaatagtaattaaaatgagaaatacataagatgataaataaaatgaaggtgaaggtattccagatctaccgaaaagattttcagtatcacagattattcataagaaattgagaaaaggaacaatcagaagttgcaaaagatggtatagccgaatataatggaaataggaaaaattag

SEQ ID NO: 5369 - DNA, 1049 bp, Homo sapiens
gttctgcatattgattcaagaagctactatggaggaaactgggctagtttcagcttttcaggattgctatcctggttgaaggagtatcagcaaaacaatgacattggggaagaaagtactgttgtatggcaggacctgatccatgaaacagaagaagccatcactcttcgcaagaaggatgaaactattcaacacacagaagctttttgctacgccagtcaggatatggaggacaacgttgaagagattggtgctctgcagaaaaatccttctttgggggtgtctaataccttcactgaagttctggattctgcattacctgaagaaagccagttatcgtattttaatagcgacgaaatgcctgcaaaacacactcagaaaagtgatacagagatttcactagaagtaactgatgtagaggaatcagtggagaaggaaaagtattgtggagataaaacttgtatgcacacagtttcagataaagatggagataaagatgaaagcaaatctacagtagaagataaggccgatgaaccaattagaaataggattacttactctcaaatagttaaagaaggcaggaggtttaatattgatttggtgtcaaaactgctgtattctcaaggattgctaattgatcttttaatcaaatcagatgttagtcgttatgtagaatttaaaaatgtcactaggattcttgcatttcgggaaggaaaggtagaacaagttccttgttccagagcagatgtctttaatagcaaggaactcaccatggttgaaaagaggatgctaatgaaatttctcacattttgtttagagtatgaacaacatcctgatgaataccaagctttcaggcagtgttcattttcagaatacttaaaaactaaaaaactaactcccaaccttcaacattttgtactgcactcaattgcaatgacatcagaatcatcttgcactacaatagatggtcttaacgcaactaaaaacttccttcagtgtctcggacggtttggcaacaccccctttttatttcccttgtatggccaagg

SEQ ID NO: 5370 - DNA, 1064 bp, Homo sapiens
gaggtcaggaggtcgagaccagcctggccaacatggtgaaaccctgtctctagtaaaaacacaaaaattagccaggcatggtggtgtatgcgtgtcatcccagctactcagaaggctgagacaggagctgctggacccttgaaggggaagttccagtgagctgaaattgtgccactgcactctggcctggggaagtctgtctcaaaaaataaaaaattcttacaattatttttcatgcacaccactgacatttatttgtaaattatgttcatatattactgaattaaaattatataaacatcataaaacagacaacaataaaataatgagataataatttaaaggaaagaaaacttctagagttttctacccccatttgatggatcatcttgcataccccctggagtatattcgccctgctttgcagacctcacaggacatgggctgtctcctgatacagtttcaagaaagaacaagcactctttggctcttcttatgagagccccagtaaaaagaagaggtgggatgggcagacttctatagggccctgccataaagtggatggagcaggacagggccgactggtaaagttgacttagaatatactgtggacgtgaggtcaggagacctagattctggctgtgttctgttgctaaatatatgactttagaaaagtcacttaatcttgctgagctacagtgtctccacttatgaaatcaagggttgactatgacctaaatagtttcttccattcttaaaatcttagatattgtccttcccctatacctgcagctggggcaggggtcatgcagggcaactgtgcagcctttgtggatggcgtcccagagctgtggggggcacagcctgcacagcctatcgcagtggtccctggttggggtagacatacatgaataagcactctcataattcatcatactttctgagcagcaatgcacctagatgaggaggaagaaccaaaatcagaacaggctggtgggtggtgagagatcttgatttctggattctttgaaggttgctggctataaaattttgtattggaaagg

SEQ ID NO: 5371 - DNA, 1093 bp, Homo sapiens
aaaaaaaaaagtatgaactgaaatgattttaggttcagaatgtttctgaaagcagagacatatttttaaaaaaacaaacagaaataggatacactgaaattggagttaacggtggaattagtactaacttactttttcacgttgaacatgacctcccttcttctttcctgtaatgccatctgaagagtccttttgggcttctacgccaatcagtggaagaaatcttagactagtggggcttgatatctggaagccataaattagtcagtgagacacactcaaagtgattacttctgtaatatgaattcaggagttgggatgaggagtgagaaggcccagctgcttcaaaatacacaccccccttcttcccagttgctcagcattaaatctttattttattttattttttatttttaaaatagagacagggccccattatgttgcccaggctggtctcaaatttctgggctcaagcagtccccttgcctctgcctcccaaaatcccagggttacaggtgtgagacactgcattccgtctacctcttagaaattcactactaaatcttgatagttcaccctttagcatcatctgttagcttaagtatttgatacctgttacaacatgttcttaggaaagataacatctaagatataagttaatttgaaatatttggtctctggcttattatttcttgggttaattaattagttgtctaacaaaggttacctggggtggagacttgaaggatgagtagggattttgagggaaacaagaaatgaatgaattctgggcaggggggcagcacgggcacagtttcagaggtattagagagaccagtgatgcttagggcacggaaagtaatttcatgtggttggaatataggcagagtatgaggaaaaggtggtgaaaaaagagggtggatcctggaggttttataagccaagcaagggcatttggattttaccctgtagttgacaagccaacagagtaacgttcaaaataaccaccacgtggtatggcagagacaagggacccggtcattgacacacacagtccaagacttttctgggactgcacatgatacgtttttgg

SEQ ID NO: 5372 - DNA, 1067 bp, Homo sapiens
ttcaccccagaaagttctttcataccccttctaaatctctaaatctctctgtgatatttgccctctcttccagaggccaccattgttttaattttttaaactgagtgttagtctttcctgttgtagaattttataaacgtggaatcatacaacatgtattctttctgtaaagtttttttgacttaacatattcttgagattggtctatgttaatgcatgcattagcattttattccctttaattgctgaggattccattgtcctaccctaccatagtttgtttagtcattcttctgttgtggaaactaggctttttccttttttgagttattattaataactttataaaacttttataaagattcttgtttattttcttaaagtgtattttaatattaatatggctatattgattttctttaggttagtttttgcatcatacatcttttttcattcttttatctttaagagtttggtgtccttgtatgttagatgtgtttcttgtaaacaacatatagttggattttgtttttttaatccattctgacaaccttttaaacttgcatactttaacctattaaaggtttcataattattgatatatttaaggttaaatctaccatgttactatgctttttctatttctatgacccatttttcttcctttctttgccgtcttttatatttatctggagtcaggtctggactacatagaaataatttctgactttgagaaacttaggacattttcttccagataatatttctctaaatgaagaagacaaacatctagagatctgactggtacatttttctttttaataattctttttgtacaacacatagcatgacttgaaagtgccttttactgcacatgttctgacagtcattcttgctgtggagtaaggtgaccaatgggaggaagtggaaagctaaacattgataaccatattattttagacctactaatgctgttgatttcatttgttttcttatgtgtcagtttgctgacagtaaataagaaacaccgcctaaacttctggctgcttgctgcttgcttggtattc

SEQ ID NO: 5373 - DNA, 1121 bp, Homo sapiens
gtacaccaatcaagtgtagatttggtcttttcacatagtcctggatttcctgcaggcctttttcattccttttcattcttttttctcgctttatttcattaagttgatctttaatctctcatatcctttattccccttgatcgatttggctactaatactcatgtatgcttcacgaagttctcacgctgtgtttttcagctccatcgggtcatttacattcttctctaaactggttattctagttaccaatttgtctaaccttttttcaagattcttagcttccttgcattgggttagaacatgctcctttagctcagaggagtttgttattacccaccttctgaagcctacttatgtcaattcatcaaactcattctccatcccattttgttcccttgctgttgaggagttgtgatcctttggagaagaggtgttctgggatttggaatacttagtatttttgcactggtttctccccatcttcatggatttatctacctttggtttttgttggtggtgatcttctgatggggttttgagtggatatgctattcctttttgttagttttccttctaacaggcccctctgctgtgggtctgctggagtttgttagcggtccactccagaccctgtttgcctaggttatcactagcggaggctgcagaacagcaaagattgctgcctgttcttttttcttgaatcttcatcccagaggggcacatgccagatgccagttggagctctaatgcatgaggtgtctgttggccccacctgggagttgtcttccagtcagaatacatgagagtcaaggactaacttgaagaggcagcctgacctttagcaaagctcaaacctgtgctgagaggtctgttgctctcttcagagccattgggcaggggcgtttaagtctgttgaagctgtgcccacagccaccccttccccctggtgctctgtcccagagagatgagggttttatctataagtccctgactggggctgctgcctttttttcagagatgcccttcccagagaggagatatctagaaaggcagtctggccatagcagcctagctgagctgcggtgggctccacccagttcgaacttcctggctgctttgt

SEQ ID NO: 5374 - DNA, 1060 bp, Homo sapiens
tataataacacagattctgcaacatggcagcagcttgggattctgtggagactacattgtgatttgagtgttaattaacgcatttgtagctggcagcataatacaaacatccttctctctcgacagaatcattgcaacaacaccatcttgtcttcctgaaaacctatgctttgaaaatagcctgggaaagtcagcaccagagtagtcattggaaagcacctaggaagaaaaatacagccttatgatggatttgtgaagaaaaattctcatgataaaagcttcatttctctccaggacacagtgagggaccccatagatgagagcaatgcaagtgcattgtgctgggacttactgagttgtgataactgacgaggtttctattctgccggcagaagtggacttggaacatgggaagtctagaagctggaacacaagataggttagagcaccaataatacatgcagaaagatggaatagctaaaggtttataatgaacatataaatggcaagtgtatatatgggcgatcacaatagcatttcagcacatagagactgggtgaagatattatagttctagatgctggataagctttaacctggtaggttgttagaaatcattggtcagcacaaaggatagctcagggaatgtgtacatttgttatcaattaagccattttatctaaatgcagacagttgattagcacttatttcacctatttcaagaagtgggcaccagcccaatggtaaaagaccagtaattcgcatccagcctgggcccccagtgtcagagcctgaatctttgcaccggactcaccgtgttggtccctgccatgtgtcccagatgggtttgtagaccttgtggaaggcgatttggtaacttgctgcccgtgcacttttgggctcagtagtgacaaaggatcagtggaaatcccctgtctggaggccttgctagcttgttcctggatcccagcagagggggccctgtactccttttgaaagaggaatacttatttatagattttatggaaaattatgagattctcaagagttgccagtctga

SEQ ID NO: 5375 - DNA, 1084 bp, Homo sapiens
aggctgaggtgggagggtcacttgagcccaggagttcgagtccagcctgggaaaagtgtgagtccctgtctctaaaaaataataataatacttgaaggggtatacatcatcccatttctgtaaacaaagaaagtccccaaatatgtaggagcacacagatgtgcgtgtatacagatgtgggtggaaaagagtctggaaagatacacaccaaacacagtgtgttcacagtgatcacctgtggaagagggagcagagttagggcaaaggagggcttcctatttctattctagaggcatcacattgcttaaatgtatttctttgttagtgtacagtgtgcacatatatttaaatatagctatatttgaagagtcacttaattgtaatcaatatattgtgaatagcagaagcatttagtatatatgtgtgtgtacatgtatatgtacatgtgtatgcatttatatatgtgtgtatatacattttgtgtgtgtgtgtaagacaccatgatagaactatacttgcaatgagaaatatttagggcctgatcatgtagatagagggcccatcatcaaatacctttctgatgtcttgagcccctaaatagtaagtgccacagtaatgccgatccgagcctgcacctgcagggtatcggttgtaaaatggagttgggatgattccaccttccccacagggcactactcccgacccaccataatgtaccgacagcgcgtgagggcaagattccacaggaattcctgcatactttcaccatgtgtaaacacagacactacattttcagttttgttaatgaaaattcaaaggttttatttaccttctagctgttgtttttaaatatgaaagtcaaattcattttaattcacttgcatctgtctaggtaacatttttgccttttaccaatcctcaccccaaaccaaaccaatatcgacaaaaatagttcagatcattttcacaacctatagtatcttattctccacctcaaagcctgcctggttctcatttaatttatttccgtccatcccccttacataagacaaatgttcatgacccctcttctcttcagcccctc

SEQ ID NO: 5376 - DNA, 1031 bp, Homo sapiens
atgaatctcaaataagttatgttgaatagagtgggaaaaaaagaaaagtattctaagtagaaggaacagagtgaacaaagatacagagtcagaaagaagcatggggtgttggaagatctgtgagcagcttcttgcaggagcaaagcatcccagttgtaaagccttagaacatagaactggaaaaggcaagaataagcttgggaccaatgcagatgcccagggtaggatgtggagtcagacctacaggccaagggggaactaccgaagacctgtaatcagagccaggacctgacagcactggaacaaagctagagaaagtgcccaggtgagcagtggggaaagcggggagcgggctgatggccatgattaaggagggagtggcagggctgaattatgagggtgtgaaggttaatttaatgagtcaacttggctgggctccggtgcccagttgtttggtcaatcatgagtctagatgttgttggggaggtattttctagatgtgattcacattgacatcagtaggttttgagtaaagtaggctctgctccatattgtgtgtaggcttcatccaatcaattgaagtggagtttcccaaacaagagtggggtttcccaaagaagaaggaattctcctcaagactgcaacatatagaaaccctgccttagtttccaccctgcctgctctgccctgcagattttgaacttacagcccccacaatcatatgtgccaattccttaagataaatctcataaatctctctttctctgcatggatctgcttatatgcactttttttcaataaaaattacactgaatatgcctgcttctccttcctccacctcttctacctctgccattcctgaggcaggaatgccaacccatcctcttcctcctcctcctgagcttattcaatgtgaagacaatgaggatgaagatctttatgatgatccacttccacttaatgaatagtaaatatattttcccttatgattttcttaataccattctcttttctctagcttactttattat

SEQ ID NO: 5377 - DNA, 1035 bp, Homo sapiens
acgcaaatttttttctgtcctgttctgctaggggaatcatataaaaacagtcttttaagtcaataacaattataggccaattgtgaggaatcaccacgggggaagggagcccctgctgaaggggtttcataggttgcaaattggcattaatagcatgtaagtcatgcaaaagtctccatttaccagactttttgggaatgacaaaaatgggcgaattccaaggactatttgatggttctacatgtccagcttttaattgctctttatctaattcatgggctttctgtaatttctctcccttcaaaggcaactgttctacccaaatcagatcttgaaagagccacgtcaggggtaggagagagataacggtggccattatcagaaagaggttttttaaatttttaaattttactcaaatcttagcatagaattacaatctgggatgtcgcttgtacataaggagcacacaaaattttgccacaggccggagagctggagagctgagcaggcaggccccagggcggcagccactttgcacctgcttaggcgctgtgctttgtctgtgctgcttctttctgtactgctccttcctccaccccgctgcctggcggctgctgcctgctgcacaaaccttcctgcatgtgcctcctgcccatccccagcaggctagcttctgcatgctgggcctggctcctcattgcgttgctactatgcaggtcgagttcctgggagcatctgttggctccaggtctgcaagcctccctgctgctgagcctttccttctgcccaccgctcgcatggtcgcgcagctctggtctttaatgttttttcgtatttttaaataagcgttaaaagaaatgggtttatacatctgattgccttgttgatcttgcattactgggcaggcaaagagctccccttttaatgctgcttgcttaagacagggtctcttcgctgtagcatatcccctgtcctttttcctatctactggaggagggggcttaggcaaaacctccgtttccccttttttatttt

SEQ ID NO: 5378 - DNA, 1050 bp, Homo sapiens
tcctctctaccttggtgcatctccaaggcattcctctccagacaccctgtgtcatctcttcaacagctcaggatttgggaagacaaaatactatatagaaatggaagtgcactttggaaggccgaggcgggcgggtcatgagatcaagagatcgagaccatcctggccaacatggtgaaaccatatctctactaaaaatacaaatattagctgggcatggtggcacgcacctgtagtccaagtaggctacaggaggctgaggcagaagaatcgcttgaaccatggagatggaggttgcagtgagccatgagcactgcactgcactccagcctgggtgacagagcaagactccgtctcaaaaaagaaaaaaaaataagaaatggaagtggcttgtgcacagtctccgcttttagccctggatgaaaactgtcttgaggtcctgtcttctttcagatgaagaaatgaaggaaatatgtatcttagtaaattatcctgcatgttttgagagattcaaacatagaaagttaaggaatgtgtgtacaggaaatatttaaatagaaaatagattagctacaaaggaatgtgtgtacaggaaataacaataactacagttgcagaaaatagcatctggtaccagttggtgaccctggggcaggacgctggaacacacagcaatcaggagtgggattactttacactggggatcatctgtactttttgaagtttcttaacctatgcatgtaatgatttctaaaaatatgaagaagtttgctggaatcttaaaagtgcgtgaatagatttaagtcacaattattttattttattttttgagaaagggtctccctctgttgcctaggctggggtatagttgtgtgatcccagctcactgcaacctctgcctcccgagttcaaatgatcctcctacctctgcctccggggtagctgggactacaggtatgctccaccatgcccagctaatgtttttgtattttttgtagagacagggtttcaccatgttgcccaggctggtcttgaactgctgggcacaag

SEQ ID NO: 5379 - DNA, 1050 bp, Homo sapiens
ggtgggaggacggagagcatcaggaagaatagctgatggatgctgggcttaatatttacttgggtgatgggatgatctctgcagcaaaccaccatcacccacatttccctatgtaacaaacctgcacatcctgcacttgtacccctgaacttaaaagctggaaataaaaaaaggtatttcataaatatatttacttctcagactggatttggatgaaaaattgttttgtgattactgtaatgaaagcaatggaagaacagtagattactgtcatcttttgctaatgctgttacttgtcaaatatacatagacaaggggcccatgactcatatttacagagtgagaacacactgcttctctctctcctcaccttaaagtgaagagtgctgtgtattttaaatgcaaactcgaacacctagaaggcaatttcatagaggtcaaaccgtagcagtttccttaagacaaaatacctgctcatttcagtgcacattatcaggtattggtcattttcaacaacaaaaggtcatttttttttcacttggaggaagctaaaatttgctttaatttttatttttaattcatgcaactggaattagggtctggctatttcttctatcagtaactaaattctaatgacttaattctacttctcccaccatctggaaaatattattctagctactaggcattctcctttcctttgggtggttggactcactaccctggttactagataacatatatcatatatatgtgatataaatatgatatatggttgtatatatgggggggggggagatcttttctgaaacatacatcacctctaggtctttcctctgcagcttcttgccctgtgccctgtgtttctgttctgcattctcagacattacaacatacacttcttgtgtgtctgtcctggaactggtatcttgcttcccctaacttcacccccaggaagtttctgcttttgcccttctctccaatgcacaggatgaggaggtagggttgctgcatttccttataccctaatccagtttccaacctgttgtt

SEQ ID NO: 5380 - DNA, 1049 bp, Homo sapiens
aggcccccgccaccacgcccagttaatttttgtattttttagtagaaacggggtttcaccatcctggccaggctggtcttgaactcctgacctcgtgatccacccaccacggcctcccaatctcaatgattttttagtagtcatttcctccttaccgtctcagtcagccattcacatggttggttacatcttaggttgtattattagcaagaacagcatcacctgcgtaccgaacattctgtgtatatttcccctactatgccgcctcagtaattcttagcccattatgtggaattccatccactacttttaaaaaatatccaccactcccttcagtcttctgttcctactttgccccacttgccttccatggtctgtgcttatgtttgcgtccttgactgagtccttaggtagttacctaatggaaatgactgaagcgtcttctgaggtgaaagtagctaggggaaaatgtcagagctgtgctgacccatttcactgtaaattcaggaccacacatttcacataggtgctcatcacggcacagccatcctcctacattttcctaaagcattgactttcctactccctgcaaaaggcctcttcattccttcttctcttaaacctcacatccccttctgcaatcacactatcgtctaggttaatggttttgtctaatacttcattgaagaaggagaagacgacaacccagagagtttttgtttccaacgttaaatctgaaatgctttctacctctgtgacaatagtttctgttgtccctctgaaaatgtctctgatctaatccaaggcaacccctgtgtctgtgccgtggcttttatgatcatcgcctttttctcctgcattatcaatatttccctttctgtgggatcttttgtggcagtaaacaaacaacctagcaaacaagaccaaaccttaccttttcagtctctgtcaactacagtcttaatgcttagttttcctttataatgaacgtttccttaaagagttgtccatactttttattgctaccttctaattcctgtaaacagctt

SEQ ID NO: 5381 - DNA, 1030 bp, Homo sapiens
aaatatttgttgtgatcactgctgtataaacattgtctgtgtacaacaggggctccaataaatgtttactgaatggatgaaagaatgtatgtgaatgctgcattggcatcagagttggcacatatttatgaggctgactttttggcatcaagagcaaactgttcaccaaggaagttaccaggggaatctattgaatcaatgcctttgttcacaaataggaatttttgctttcatccaaagaaacaagattttatttgttttggtttttaatgagtttaatttagctgaaaatgtttccagggctgtcgaccaatggccaggaagtcaagaagttgctcttttttagcagaaggtgaggtaacgacttcaaatagggtaattatatttattttgccatcctttaaatttcatgttactaactgaatttgttgaattcttgcagctccaaaactactgattatagattcataaaactaagagatcctaggcttcttctggaagggttatatttgcatattctgtgtcatgtaacatactgaatccttctcttaagacacctgtaggaaattatacttcctacactagtggtaatcctttccttttcttttttaacatttgacatagaaaatttcaaacataaaagtatgtagaagagtataatacaaccttcatgaatccataatgtagcttccaaatttatcaatgtatggccaacctaatttcctttatagcttttctgattatcttctattttctttttcccatactgagaatcctagtcctcaacaacaatgaaaattatatatttagaatattacataatttttttttgctcaaccccaccaagacacctgaactgatcttagaaaacagtagccaatactgccaccaacaatacagttactgaaagtttaagagtttcaacacatcattttaacatcagttcttctgagtgtaataatacaagtacatacacatttaggttaatttgttttggtttatgttaaatttttaggtgttgctttttaca

SEQ ID NO: 5382 - DNA, 1053 bp, Homo sapiens
atttggtatgttcgcgatgatgtgatcacttctatttagttctaaaacatttttgtcaccccataaggaaactcatacccagaaagagtcacctgccattttttccttttccaagcctctggcaaccacaaagataatttctacttctgtagatttacatattctagacattgtatgtaaagggaatcacacaatatgtgacctttcgtgtctggcttctgtcacttagcataatgtcttcaaagtctatcatgtagcatgtgtcagcacttcactcctctttagggtggagtgctatttcactgtatggatagacaccatgttgtgcttctctattcattcatcgatggacatttgggctgtttccactgctgaccatggtgatggtatgatgatgaaaatgtatgtttgtttcaatccttgttttcagttctttggggtatatacctagagttggaattgctggattacttggtatttctgtgtttaaccttttgaggaacttccaaactgtttccacagtggctgtactattttatagtctcaccagaatgagagaatgagggtttcctcaccaccttttgttattttctattatggttttaaatttttattagagccacccttgcaagtttgattacaaagcttttggcctacaaaaatagaattgccgtaactgaggtaaggaaagctatgtgctaaatagggaagaatgggatgatcagcgttgagtttgggcagggtgagatgcctcctaaacatccaggtagcactgttgagtagacattggaaagataaatagatttgggctgaaatataatataggagccactggcacttacttgccattgaaatccttgggactaggggacaataaagggctcaaaggtactccaaaattaagaggttgggtcaaaaagaagggacatgtgaagtggacagaaaaacaagagagttgcatgtactgaaagggcaagtgagaaaattgtgtcaaggaggaggaatgaatgactacgtgaagtgctccgaaagattaagtaagattaaaatcga

SEQ ID NO: 5383 - DNA, 1049 bp, Homo sapiens
tcagataagctttgttatctgtatactatgctggtgattttgctttggggaagcaactgtgacgttatgagtcctgttttcagctcttcttctctggacctacacagcagtctgttctgattgtgcagccatagttctaagtgctggatggggatgctggcaggggttcgtgcatgttccctggacagcaagatgtgtggtgcaaagagcttctacacctgggcaacacagcaagaccccatgtctaaaaattttttaaaaattagctgggcatagtggcttgtgtctgtagtcccagctactcaggaggctgaggagggaggataacttgagtctaggagttcaaggttacagtgagttatgaccacaccactgcaccccagcctgggccacagagcaagaccctatcgaaaacaaagcttttacaaatacatgagaaaagacaactcaatagaataatggaccaaaatgtgagaaggtgaaattcagaatccagagaccaataaatacaagtggacaataaatacttgaaatgttgctgaactcacacattattatggccatacagattagagaaacatcacgattctgttttatgtctatcagcttatcaaaaaagaaaaatgattggtaacatctatggtcagcgtagggcaggaaagcatccccatttgggagaatgtaggcacagcttctctggagatcaatttggcatacctactaactctttaaacatctatacaagcaatcccacttgtagaaatgcactttcaagatacgctgatgcatatatttttaggatatttattgtggcattgtttaaagtagtaaacaaagaggcaatccagatgtccatttccagggggactcttaagcagtttgcagctaatcagtctagtgtggcagttacgactgtggactttggaaccagactgcctgagtctgaatcacggcttcactgctcactagctgtatgctcttgaggaagttatttttcttctcatgtctcagttttttcatcagtaaaggggataagaaatagtacctat

SEQ ID NO: 5384 - DNA, 1063 bp, Homo sapiens
ttgttggtagagacttcattccccacaaggtggagcctttcttttattgttttctttttttttttttttttttgagacggagtctcgctctgtcgcccaggctggagtgcagtggcgcaatctcggctcactgcaagctccgcttcccgggttcacgccattctcctgcctcagcctcccgagtagctgggactacaggcgcccgccaccgcgcccagctaattttttgtatttttagtagagacggggtttcaccttgttttcttgctcttccttttcccctctgtgggtgtgtgtgcgtgcgcacgtgtgtgtgcctacacgcacatgcatctctatgttacttgggcttaaagatgagtctctctcttatttgacaccaaggggagatagatagctggcctctgcttgcttagaggctcaagcctttcaatgcagcatttatttcttgactactggttttgccaggcactatgctggacatgagagatgcatgaataactaagaaacagctctgccctctaagctcataaattatggacaatatacatataaatacatatttataatgcattgttaaatgcagcaacagaactgtgagccaactacaggggtagcacagagaaagtgcaatcaatacggagcaggcagagaagagtttgcagagaaggtgatttcaggtgtgggtgttgaaagacaattaggaacctgtgtgatggatgcaggggcgcctatgtgatgtattttgagaataacagtatttatggatataaatgaaagatgaggggtagcagaagtgatgatactgcagagaaagggaggagccaggtcaggatgtaggccatgcttttactagagggttttaagcaaaggaataacctaatcagttctgtatttggaagacagcttttgtgactacatggagatggatgtaggaaaatgacagggagaccagtttaggctctattgcaatatcttaaataagggataatgagcagctcaattaaaaccctggcagtgggaattgagaagaaagggacataattgaagaatattttggacg

SEQ ID NO: 5385 - DNA, 1022 bp, Homo sapiens
agagtctatcatgttatctgcacatcaggaaagtttacctctctatacctagtcagttttgtgcctattgcattccttacctcatttcctgtgctgcccatggtccattgtctgaaaataaattttagatagtttgtccagattcctaactgtttacaacaggaggacaaatctggtacagtaattcatcagagccagaagacagaatttcatgagatcaattttagcacagcttattccaccaaatcctactttgtatacttcatttccattaaacaatatcattaaaatgtcttcatatcgtcaaaaaacttcataaaaacttccatttaataactagtattctatcatgtgaatattttgtaatctattcaattctttattatcagactattaggttgttttcatgagtttgaatattgctgtagcaaaccttcttatgtgctctctttgtgtttctgatactttttacttacttttggaatagtaattctctcactgtattataggatttttgtgggtttctcgaggaggagaacaatgaattacaactctttacatctgcccgatgcctagcagtccagggaatatcaaagaaactcagtaaatttcccatgaacaaatgggacttggtgctccttgcgaagtgattgacctacacagatgatgccttttatgtttgtaagcttgaaccttttcaagacacacttacgatcttcacattcctgggaggtcagaaagttgtatatcagttctgctataagatagaagaaacaaatacagagaggtaggaagtcaggccaagcagctagtccctcgcagtgacaggaccagggtctcagtcacctctctcctattcctgtgccttttctacctgctcctctggattctctgaaccaaggcagccacccagaggtctttggaatttctaggctccagtgctgcatgctgctctccaagtaagagcagaacacagtgagcttccaaaggccttcctaggacagagctttcctctgggaacc

SEQ ID NO: 5386 - DNA, 1042 bp, Homo sapiens
caaatgacagagcaagctaagtggtacagtgactttatgtagtatcctaatatagtgtgtgtgtatgtgtgtgcatgcatgtgtgtacagacactttctttgtacatacagatattgttattcttttctttccagcatgagtggtctgttgttggagaatcatgttctgcacttggcagtcataattccattcgtattccgtggttccccatttggcattattttccgacctttttttgtgtgtgtgtgtgtatgtgcttagaatatttggcctgcgtgcgggaaaggggtcttctatagtcagccatcatgagccaagacactattatctgagattcaaatctccttcaaaaactgacttggaactttccaacaccagcccattcattcatactaataaaacatctccaatgagaacgaagaaaagatggataagaagagaaggaagtatggtgggataggcattgaaatgcttcaaaaatccagtgctccaaggctgatgctaactttgggtggggcgtttcaggagtgtgaaagtgtgaagaatgtacatttatctctggagtccctagctctcatttcaagatgctttttctccacactgatcagcctgctcgtggtgctgctcccaataagccgccgagtaattcctgtcttctcatcctcctgacttcctggtcacaccaagagtgttggcgtattggtggcttattcataagtgtatcctataagccaaaaaatgaaattaattatcatcatcgttgtggcttttcttcactctagggaatgttacaaaatgaggtaataagaagacaacaatccccagagctttgttgaaggtggtttatgaaaaggagagctttactatctctctgcccattttctttaacaaaaaacaagatgaattagaaggcctcatgtcctctaagtgtaaaggaggaagaaagaaaggcaggggccgcatggaacagatggaatatccccgctgataactagcatttatattgacaaaacatcaataatgagcagtgtacaaggagga

SEQ ID NO: 5387 - DNA, 1075 bp, Homo sapiens
acctgtagtgagccgtagtatcttgatttatttagtaagtgcctcacacttaaaaaaagattgtctcctctaagtgtgaatttgcacctacttaaacagagtttatgttaccagtgaatagtaaataaatgccaagtgcacacttgcctcctggaataaattgtttacatgaggagcaaaggataaatggattggagcacacttggtcacagcggtctaggctcatattatgtaatgtcatttttgtcccacggagcagatccatgaaaatactgtaccccacagggtggatccgttaagcgccagaagacagagttcaacctaagggaatgaatctttaaaatgttcccttaaaaatccaacaaacaaacaaagagtctggcaaatgcttaagaacattaacatttactgggatcatttcctgcggttttagataaacaacacagacaagctatagttggaggcaggattctctgccgcctccaactcatcagtcaagacatgaaagtgtagatgtctcatgagtgtcttccagtggatctcagggcatgtccatcactgtccttgtcaccactacagtcgacatatatctacccactaacggacttctctcactgcaggttgacattgcagtgtcttttgaagaatttttggtttctatgaactctcttgggtgtggcttgacttattttaacataatcatagggacatatcatatttaatatatttaatttgagaagctctggatgattgaatacaagttttctttttcatctcttcttccatataatagctacatgccaatttctggctagtttctctaaaagtttttacttctctctatagacttctataactatctcaggtttaaacttaagtaacagtttttagttcttagttcttctccaaataaatctgatgagtcctttgaattctgggacatggcagtagttgtaataagttatgttctcttactgaattgactgatagatggcatagttagacagacgtggagtctgtggcacgatctcacaccagaaatgttgcttaaactgtatatattgaggacattaaa

SEQ ID NO: 5388 - DNA, 1236 bp, Homo sapiens
ttaataataggatttatattagtactcattaccattggacacaatgacataagtactctccacagtaaagcagacctttcacaacagtcactctgtgtcctaaaattttccaacatagatgtgatttatataactttgttgatacgtaaattgtcttggggtttacggaaattaactattatgtttgcactaagatttgctgggagtggtaggtggacatatctatatatcaataaggactaaccgtcttttttgtacataggagattgataatactgtatttgttttaagcccacagtgttttactccactttcaaaaagatcaatttggcactttttttcattttttttaatggaaataagatttggtctctcattttaggttaaatgataactagaaagattaaactagacagatagtttaggtggagtatatttttaaaactcagaacatgtatattggtcctgtgttaccaagtttatatgtgacagttgaaaaagaaattcccttgaaatgatcatgaggttaaaattttcttcattaggggacttggagaaccagtagtcgtaagattagttgatagtttcactcccaagcaatgaattgcttctgtgtgtttccctgtaggactcaatagtaaatgctgtctgtcttacacatttataaggaccctgcaagacgacgacaaaggcctttggcctgtgctactaaacaagaagcctatgaaaaatttcttctttaaacttgttttttctctttccagtaagttcacatttggataattttaaaaagaaaagtaattacctttgtgtttccagaacactataattggggtgtatcttaattcagttaaatattattagtagacctggattttcccccttgaccccatcagtctataaaggttaaactgcaacttttatgaaatggtctttaatatttccacaataatcctgtgctatatttgttttaagaaacaaagtaactctatacacttcaagactttacaggattttttaaatcctgtattgttggatcaattaataaagatgcaaaaaaactttatagagatgtaaaaacaaaactataatggatctcctatttttctttaaatacaaaaaaaaaaaggtaaatgaactattctccttgtaaagctaaattccccattctgtctaataaaggaagactgaaaaaaggttttaaagaacataaatggaaagatacaaatgctttga

SEQ ID NO: 5389 - DNA, 1050 bp, Homo sapiens
agaatcacttgaatccaggaggcagaggttgcagtgagctgagattgcaccactgcactccaacctggcaacagagtgagagtccacctcaaaaaataataataaggcaaatttttaaatagctaatttaaaacaatgttttgttggcagtttaaatcaatgaagtctgatagtttgtttctactatagttgtaataatatataatcttgcaaagattgtgtgtttaattgggtatacacataactagaactctaatttttaatatatcctttaatcttccaatatacccaaatgtacaattattttttccagtatacaacccttcagtgaaaaaaaagtgttatgactgagataatttacataggaaaattataaactttatgacttaaagtacatttctcatgttatctcaccattttttcttaagtaatgcatacttatttctacagaattgttgaaattgagtcagtggttctgacacttgggaaaacataaagactaggactaatgctagagaactgaacccttctgttttgttccttcagcactattttcttatccatattttgtaataaaatggaattaaatgtgaaaatatctattaggttttcaaatcaacaatatatgttgtatatacgttaagaattgctcattttaatacatattttactatatcacatgtggagattgctgttgtccatgttttttctaattaatttatactgttttccacaaatattagaaacttcattgtacagatcgtctgcataaaaaatccttaatgaaaaatagagttttggatacaatgatgcttatctgtattttatctcattaagcttggttattctgtttcttattctagttcatttattttggggaattgcaaggatttgctatattatataagggaacactttaaacacatttcaaaagaatcacatcaacagttaatatgttttaaaaaattatatatggagcaatcatgtgagatgtagcatgacatagtgaaaagatctagttatggcacttaactatgtgtgaccttggcc

SEQ ID NO: 5390 - DNA, 1008 bp, Homo sapiens
acggggcagcggcggtggggggtctataaaacagttttatttagcatagtaaatggaaaatcagaagttatacatacttccaattagagtcctggcgcaaaatagtgatttcaaaactaggaattcattgagctgatttaggagttttaattttccagttggtgctatatttggatgtgtgtgtcaaaattaaattatctggaagtatctggtttaaagtataggaattaacattgtgcttctaaaagcatgtgtttaacctttaaatatcctcacataattcaaagcccttaagaacttgaagaaaagcagtatatgctttattactcctttcagagttaaatgaaataatcaatgttttcttttttttccctacccattttgaaatgtctcacatactttacctatactttttaaagttaaatctgtttatagttggagcaggtgaaaactaaccttaatttatttcagtggaagaagatggattcatggggaatcactcagcgtatattggccaaactgggctgtagaaatttaactggttatgagcattatctcacaaagtgctgttatatcatttaactctagtaattaggtgtaattgaatataataactacaaaaactacttactttccaccagaatttaactgatgctgttatatttgtttgcttatgtgctttgtattcagagctgaggccattgagatacatgtgtgaccaaagagtaatgaggtggatatttgtttgtgtcctatatgcatgttctcattacttcataatgagcctcatatgtggacgtggctgcaaaggccagtgtgggaggccagctgttacaacggacatgaagatgtgtgattattttcagtaggcagacatctaagtaagccctaagtcttgagttaagagtggaggggaagttgatatgaaatttcatctttttatttttgattggtttacatctaccacaccatctcctacaagaccctaaaggaacagtactttgcata

SEQ ID NO: 5391 - DNA, 1042 bp, Homo sapiens
cttataatttgattatactcaataatattgtgaaagatactaactcatggagagcgacatctgcattttaagcttgaaatcaggaccaggatttgaaactcagatctgttatttatcagcagtgtaacctgggacaaatcacttaatctctctgaaattcagtttcctcatatatactaccttccaaagtgtgtaaacatgtaatgagttgaagtttatgaaagcaaagatgcaatgcagaatcttgcttcagctattaaatgatgaaataattcctgctctgtagtattgttatgaggattaaatgtaacagtacatttgagtgtgcgcttagtatagaactttaaagcattacataaatgataaatatactgttacccaaatgacagcctaagaaacatgccacaaaggtctttagcagccaaaaaatgtcaaaagtctatgaactaccaactatcatgcattttagtcataagagaacttgtagactattattcgcagcctatttactcttattatccatattattctagaactttaagtatcaggttaaaagtagtacttttggaggtaggaggacacagtgtagtggttatgaacccagctttgatgtcaccttggacaaattacctaagttctctattcctcaattttttaaaaaatagaaataataaaatggtactcacaggttgtgtgagcgtgttgtatgtgttgtaaagatataaataagctaataattttaaacaacagtacatagtaagcattcagtaaatgtaagttatttttattatggtaagaaaagcagcaaagacaagtttagcaacctgtagcctatatacttttcaaagaattcactgttactgtttagaaaaatcacttaccaactaaattcaacttaaaagtgatcatttccactcctgtcccctttcaccctagcccagaatacactcccaagggacctagatctacaatttacagaattgccaccagaaatgaggttgttctgcctgagaaagctacagtcggttccgttgctgatatt

SEQ ID NO: 5392 - DNA, 1033 bp, Homo sapiens
tatatttattaactgacaacattcctttcagtctcgtagtgtggataagcaacacgctgtcatcaactatgatgcgtctacggatgagcatttagtgaaggatttgggcagcctcaatggggtaagtcaatggtttattttttgtcttgtttgaacatttgtttaatattgtaagaataaaaatcagattacatttcctagctacattttctttttctttactttgtatgttattttcaaatgcttatcaggtacatagcactttggggaccatccaatagaatatgaaactagcccatattccaaagaaactataagcagatgaatccagaaggtggttgtcattgtctgtgatggctaaagaagacttctttaaggagttggaacctaagcttgacttcactatatggctgtaatttatatgagggaaaacggtaaaaagtcatggcagtgagaatgcaaaaaagtactctcagggacagagaagtaatggttaagtttagaaaataaagatggagctggggccgggcgcggtggctcacgcctgtcatcccagccctttgggaggccgaggcgggcggatcacgaggtcaggagatccagaccatcctggctaacacggtgaaccccctctctactaaacatgcaaaaaattagccgggtgtggtggcgggctcctgtagtcccagctactcggtagtctgaggcaggagaatggcgtgaacccgggaggcggagcttgttgtgagccgagacagcgccactgcactccagcctgggcgacagaacaagcaagactgcgtctcaaaaaaaagaaaagaaaagaaagatggaaaggtgccagagagtagacaactttctctgctagggtaaaaaaggtgaaacaacacaaccatttgccttcacaaatatagcacattatctaaccgccattgttcattattcttggaattcatactttgaatatatttttgtgttactgaagtgaattttttcttatttcttcatttggtctgtctacatttggcataat

SEQ ID NO: 5393 - DNA, 1035 bp, Homo sapiens
tatcatgaggtgttttttttgcaattttttttttttttagttcatcagctgttgttagtgtattttatgtgtgacccaagacaattcttcttccagtgtggcccggggaagccgaaagattggacacccttgctataaaaggacagggactggagtctttcattcttaccagaagtttaagtaacaggaaaaaaagggcctggtcaaaattgcctatctttgcagttttaagctcagatcagctaaggttttcccattagtatcagaaacgtgattaagttagcagtctttgttaggatttaaattatgtatttctgagagatttttattaaattttcattgaaatatccaaatgggttgtgaatatcaagttgtcatgcaccttctggttcagtttaatctagaggaaatgtgaatttgattatatagaaatgaaaacagtttaatgcttaagtggttagatatccattacatattcttcctattccctcagttttccttgactcggtcactagatgtattatgttctgtaatcttggtcttctgcttaattcctgtcatgggtgctgaaacacattgatactttatatacatttcataataactaaaaacataggaatttttttttcattggctgcttttttaaaaaaatagttacacaaatgggattgtcttattctgtgagtactaaactgatcttctttgccttgagttcctgactactcttcttgaattgttactgtctttattaaacaaacaaacgatgtattcttgtgatcccacataacaggcccactcctcactccctaatccccagagttgtaatggcatctcactcgactcagtggactctgttgttctcttaggtcttaagtgtgctctgtcttttgctgtaggtgtttatgtaccgtcagtgttcaccataagcagttggagggcggggtacattgtagattaaggatattccagatttcaaacaagttgttcacttagtgaagcagcctgtcctaaattacttcctccccaaatcacttt

SEQ ID NO: 5394 - DNA, 1044 bp, Homo sapiens
tcaaaattctttctatttctttaggttctgacaatttgactgtaatgtttcttgtgtggagctctttgagtttatctgctggtagtttattgagcttctaggatgtgtgtattgatgtattttggaagtatttttccattaagacttcaaatacttttctgtcatatttccttctgggacacctatatgtgtatattagtatgtttgatgatatcctactggtgcctcaggctctgttcattttacttcatttgtttttctgcttctcatattgaagataagacagcctcactgttcttatcttcaggttcactgaacctttctaactcctcctcatatctgcttttgagcccctctattgagtttttcttacttcagttagtctgctttttagctccagaatatgtttggttccgtttcataatttctgtcttcctactgatattctcatttttttcatacactgttttgctaatttttttgttgatggttttctttagctcattcaacatatttaagacagtagatagttgatttaacaccttcaactaataactacaatgggctttaacgggagagtttctgtcaaatcttttttgttgtttctttattttcattatgttattttttggtttttgagaactgtattttgtatcttatttttatttattcatttgttttgaggcagtgtttcactctgttgcccagactgacgtgcagggcatgatcatggctcactgcagcttcaacctcctggatgccaccatgcccagctatttttttttttatttttcatagatatgaggtctcattatgttgcccaggctggtcttgaattcctgggctcaaggaatcctcctgcctccacctcccaaagtggagagattacatatgtgggctaccatgcccggtgagaactagaccttttaaacattatgttgtggtagatctggaaatgtaatccttccactctccagggattgctgaatcttacttgttgagggttaaagtgatgatctgtttgtgacttttgtaaactgtttt

SEQ ID NO: 5395 - DNA, 1050 bp, Homo sapiens
gataccaggattactaagtaatagccactttactcaagcaactcagtttataagggaaaatagacaaaaatgaatatattttgtacaaagaagtttaggagttgctgtaggtatatgtgaagggcaagataggtggtcagaattgagaggctgggaattctatgggtgtttttctgggggaagtgattgctggagaaagctcactatgaaaggtcttgggacagcatagagctttcattttcaaattcagttggacatggaatacaagggaggagcagagtaacatggggagataacagggctttttactcaaaactgaagagtttgaattctatcttgaactctatagggagctattgaaaattagggagtgaaattattacatttacttttataaatgtaattttgatagctggatagaggaaggatttggagagtgggaggctagagacaagggattcaggtaaaagagttctgcagtaatttattggtaagaaccagtgggataagaggaaaggcacaaagaaagatatttaggatgtggaatcaaagggacataatgacttacctaactaaagcgggagtgggagagaaaatatctggtcagttggtgatgccattcgctaagacggggagaacaggaaaaaaggcacatttcgttagatgaaagggttctttctgttttttaaaaattaaatctgaggagtccaggaggaccttgaactggaaatgactcgtaagcagagggaaggtctgatcttgtaaaaaaggttttgacttgaaattatatgtgtaacattataataagcaatattggaagcccagggttttcaaagaagtcccaaagagattatgtatagggaagtaaccccgtaaaaacagaatttaaagaaaaagtagacactttcaaagagattgaggcgtgcccacagaagtgagaggaaagcagactgatacttgtagaaggcaagaatggtcaaagatattgagaggtaatttaagatagcaatactagagatcattagatttaacaggaggacattttcaacc

SEQ ID NO: 5396 - DNA, 1034 bp, Homo sapiens
ccttatttcaagccatacacttgtgtttaaagtctaaaattgtatcaactctttaacaacagtcatctctgctaattcaaagcaaaaagcagagagagagagagaaatgttacatggcttttcaagttatatttatgtaattcaaggtactattttttgagattttgctctccttttctaatgttcataaatggcctttattaaatgatagtgttagtaacacctattaagtaatgataggttaagtttcttttgatgttggtcatggggttttgttttattttagtgttcctgattaaccaataaaaagttggcagccttatgttgattcttaatttgttttctgaaaaattggtctggaaaccactgatgtagtcaacataaaccaacatttttacacttagctagatttctcccattgtgtataaacacacaggtgatgtttttaaaccagtattttaccattgcctcctattaaatttcatctccgtgaacgtagctatagttaaaacttgagatcttcttgaatcatgattctgtcatccaagggattagctttccttcctggctttttgacatttataaattcaacaagccaaactcttatgtctccatcctggccatatacttaatatagccaaggacaaagccatgcacatttataaatagaatgaatgttacataaataaaagatgctgggaggaaaggtgacacaaaaataatgaaaaccattcggatgggttttttttgtttgtttgtttttggggcctttttgtttgtttttgtttttgtttttttgagacggagtcttgctctctcgccaggctggagtgcagtggctcagtctcggcttactacaacgtctgcctcctggattcaagctattcccctgcctcggcctcccgagtagccgggactacaggcacgcccggctaattttttgtattttagtaaagacagggtttcaccatgttggccaggatgatcttgatctcctgacctcatggtccactgcctaggcctctgaaagtgct

SEQ ID NO: 5397 - DNA, 1115 bp, Homo sapiens
ctaagtacgtttttaggctcctctcaaatactgcgtattgaagaaaaaaatctgacaccaccgagccaaagatgcttttttgtctgttttcgttgtttaacagaatggaaagagtaatgcatagtgcttcctggtgtctcctgattgattgattgtgcacaaagtaggacgataaataaataaaatggagtctgatgggacattgattaaaggtgaaggatgattgatatatagatcatgaaaagaaaaatgaatggcaggaaaaaaagtttggtccttaatatactttggcctagttaaaatatgtgcctttttggtgtgttttgttcatcactacaagataaaaaggaaacattacaactcaagtctttaaaaagttcatttattgaaaatcatatgtataacctagcatacgaatgagcagatttaaacacataacttcaagccatttctgaaaacatacaccaggagctctgctcagctagagtcagactccagctccagcccgactgcgtgcggggacagcgcccgcgttgatgaggaccagccccactgcaggctgaggcggtgtcaccctgggaaggtcgtggtgcgttgtggcatattaagtctaaaccagatgaatgtaaatatctctttgtaaatcatttatttcactctgttccatccaggtcagcaatcagattgtggcatgctgggtaactggaaaaaataataaaaagtaagtttcaatagctcatgttcttcaatgttatttgtcttctcatttgctggtttagtcaccttttatgatgaaaactgttgttggagaaaaaaacctgttgctaaaaatgtggaaattatatgaaaagtttgtgcctcatcttgtccacatcaaagcccttcacatatgaaataaggttaactggtttaatgggttaaatttgaagacaacctagacaaaagacacgcctgcctcttaaataaggacagtctggtgttaggacatggccagagagccatctcttctgtccgggaaaggacacattgatttgtgccataatctgtttactgaaaatttatctgaccttaacggcaggtaattctagaacaaaaacagggtgtaggccaagtgc

SEQ ID NO: 5398 - DNA, 1050 bp, Homo sapiens
cattaaggttttagctgcccgtattctctagagagtttttatactctggggctcaaccacgggtacaccatcattcccagctccttccgtttttactgtagctaaaaatactgctgaaggtatttgatctaaaagatgtgtgtgacttgcttggtacaaatattggaaccaataactttataaggaggtagagatttccccaaatctcaataccttctagaaatgctgactgcagttacagtggtctatttgcagaagaagagagggcctccgagttcagtgtcttacacagagcagggagccacaaatgcttcttgatggatcagttctcacctaatacgaggatatcttctggtacattaggggtcagaaattttggctaatgccagcttgatcccatttctagaatcttctgcattaagagtgggatacagaaaagaaaaacagtgatacaagaatggaagtgtttattcttcagacaaaggcagagccccctcctcttcggagtgacagagtcagagcctcagtgcagtgggatctggcctgtatgctttctttgtttacacccacatccagcggatgctccctggagaggttagaatattcaaaaaaattggtaatgtacttcctatatgggtttgaggacatcgaattattttgcttgaagagaaaagggttgagtattggaaagattcactgatttccattgcaggacagcatatgattaaacaagcttagaggcaagcacgggggatttaaaatggagcacctcccccaggagactgtgaggccagggggcccttgggactttgttcaaagttctgcggtccttgggcctgacgggtgctcagcccagagcagatgcgtgggagcgcatgttgactgagtggctgaccacgtggccacataccaggaagagcttccaacagcacaggactgtcatcacaggacatttatgagaacagggtgctgatcatctgtgatctttgaaatacaggaaaccaggaaagctgacaggaggaacactgtgattgtcagcggcctgttttg

SEQ ID NO: 5399 - DNA, 1045 bp, Homo sapiens
tttatcttcaggattatactaatagaaccatgtttcatctcctgttacaattcttcaaagaaatgcttcaggatctttattccacttgtttaaaatttccattgaaagttctgctcttgtctgcagccgatctgggtgcaatggttttggcacccatcaagtggaaagtttgctcaacttaaatttttcagtcagaattctgtaagctgaaccagatgagatgtctatggtgttggctgttgtttctgctgttaatcattggtccttttgaattagggcacaaacaagattaattttttcccttgcaaattgatgtggatggtctgtcgctgctggcttcgtcttccacattgtctcatcccttcttaaaataagttatccatttttagactgctgatttatttggggcatacttcccataacttttcataaagcatcagtgatttaatcattcttccacccaagcttcaccatgaatttcatgtttgttcttgcttcaattttagaattcatgttgctcttacaggggctctgtccaaactgatgtcttatccttcttagtccctcaaacttgatcctgtacagtcatgttataacaaatcagtatgagttaattttggtgcagaaattttttgaaatctgtgcatggttttttcataatacacattttccataaagtttatgaagactactcaagaatattatatattctagaaatttgtaatgaaatctgaagttggggcattctgatgatttttgtgggactgcttctgttcaagtactgtggcagtttttttttgttgtttgacgaggtcttgctctgtcacccaggctggagtgcaatggcatgatctcggctcactgcaacctccacctcccaggttcaagtgattcttctgcctcagcctcccaagtagctgggactacaggcatgtgccactacacccaactaaattttgtatttttagtagagatggggtttcaccatgttggccagtctggtctcaaactcctgatctgcctgcctcagactcccaaagtgctg

SEQ ID NO: 5400 - DNA, 1070 bp, Homo sapiens
tatatttttattaactgttgaatgtttgactttgatattctttttctttttatatttaaaagggttggtatttctttattacaaagaactgcaaaagaggatatcgccttaccttacaaaataagatttaggtttgatttacaagcaccaccaaaaaacatttctgtaagtgaatattttataatagcaatagattcccaggagaaattgttgaaaccatctgtatatatctagaagaagatgctcatctctttgggattgtttagatcacattttcttttttaaaaaaagaggattgatgtttgctttgaaaagttgattaggctttaatttcagaacttacaaaataatggctcttaaagctatatcacttattcccatcggtttaaaaatagataattttatcatcgtgaagtatttgataaaacatgtttctttttacacgtgaagcaacagagtttgtaagtactgagcgttctattagctacaactatgtcctgtttccaaaataccttactcagcattcagtagttttttaaaatggtattttcatgttgttgaagactatagaacaaattatgtcatttttcttaatacacagttggagaatctaatgctggacaaagatggccacataaaaattacagattttggactttgcaaagaagggatcacagatgcagccaccatgaagacattctgtggcactccagaatatctggcaccagaggtaggcttcggttccattaataggaaagtaacattgacataatgatttgcaaagtaaaccatttaagcattaaaagttaactgtagtatctactacttttatctatatttcaacctgaatcaaaattttttggctcttaatttgttataatggggtattgtaggatcaagaatatactgaaattaaattttataaactataagcacaaaggtactagctatagtcagttaaatcaatttttatttcttggccatatccattttatcttggctatacccattttgattcatttattaaaatagaataattgatttcagcaagagtatttatatttataaac

SEQ ID NO: 5401 - DNA, 1046 bp, Homo sapiens
ctgcatattacaacctccccacacacctcgggctcaagtaactctcccgcttcagcctccagagtagctggcaccacaagcgcataccaccacgcacagctaatcttttgtattattggtagagacagggtttcaccatgttgcccaggctggtcttgaactcctgagctcaagcgatctgcctgcctcagcctctcaaattgttgggattacaggcatgagccactgtgcctagcctgtgttttgttacttaaaataaattattgcatattgaaaagtatttttaatgcagtcattgagccaacagaaatgttttatggggttccactcttgaactttgttcttttctttaaaatacagtgttttttagaagagcccacatcatgacaatttacaaataagccattaaactcttcatgttttaagaaaagatgagttcatttattcaattcttatggtatgttaagtttgcatttagcatctcatttctcaaaactgtcacattggattgttactgttatttacttttgttttatagatgaaattgaagcacgtagaaattaataatatgcccaaggtcacacagtgaataagggataaagctcaaattttaatatgaaccctctgacttgaacccatagtcttatccattttgctctctactgcctcccaggcagtatgctaccagtccccatggccatgacccttaccccatctctctcagtcatcccttaggcttatcttatttcttactatatcattgtaatttttttaaaagctaatttataaaacaagtagggtaaccagctgtcttggtttgcccaggactgcccagttgtagcactacacgtcctgcattctttgaaacccctcagttctgggcaaactgggagttggtcaccctcagcctattccttacccaaacctatccttgcatctcatttcattcttcttctcacaaccatgatctgaggctcagagatgagatacgaggttacagaattagatgcaagtcagaattttacacacacgtacacacacacgga

SEQ ID NO: 5402 - DNA, 1015 bp, Homo sapiens
agtgctggccagatgcagtggctcatgcctgtaatcccagcgctttgagaggctgaagtgggcagatcacttgaggtcaggagtttgagaccagcctggccaacatggtgaaaccccatctctactaaaaatataaaaattagcccagtgtggtagcacatgcctgtaatctcagctactcaggaggctgaggcaggagaattgcttgaacttgtgaggtagaggtttctgtgagccaagatcatgccactgcactccagcctgggtgacagagtgagactctgtctcaatcattcaatcaagcaatcaatcaataggatgtccttccctattgcttgtttttgtcaggtttgttaaaaatcaaatagttgtagatatttggtcttatttctgagttctctattctgttccattggtttatgtgtctgtttttgttaccagtaccatgctgttttggttactatagccttgtaatatagtttgaagtcaggtagtgtgatggctccagctttgttctttttgcttaggattgtcttggctctgtgggttcttttttggtcccatgtgaattttaaaatagtttttttctaattctgtgaagaatttccatggtagtttattgtgaatagcattgaatctataaattactttggccagtatggccattttcccaatattgattcttcatattcattagcctggaatgttttcccatttgtctgtgttctctcttatttccttgagccgtagtttgtagttttccttgaagaggtccttcacttcccttgttagctgtatttctaggtattttattctctttgtggcagttgtgaatgagagttcataaatgatttggttctctgttgttgttgtataggaatgcttatgacttttgcacattgattttctatcctgagcctttgctgaatttgcttatcaacttaagcttttggactgagaggatgggattttctagatacaggatcatgtcatctgcaaacaaagacaattttac

SEQ ID NO: 5403 - DNA, 1027 bp, Homo sapiens
tggtaaaagataggggtccagtttcattcctctgcgtatggctcaccagctgtcgaagcaccatatattgaataaggagtcctttccccattgcttatttttgtcagccttgccaaagattagattattgtaggtggctggctttatttctgggctctctattatgttccattggcctttgtgtctgtttttttacagtaccatgctgttttggttgctgtagctttatagtatggttcgaaggcaggtaatttgatacctctagctttcttctttttgattaggattgctttggctattctggctcttttttggtttcttgttaattttgtagttttttttttccagttctgtgaaaaatgatgttggtagtttggtaggtatagccttgaatctgtagattgctttgggcagggaaatatggctattttactgatattgattcttccagtccctgagcatggaacgttttttcatttgtttgtgtcatgtatgatttcttttaacggtgtcttgtagttctccttgtaatgatcttttaccttcttggttagatgtattcctggatttttttgtgtgtgtggctattgtaaatgatttggctctcagcttggatgttatcagtatatagaaatgctactgatttttgtacattgattttctctcctgaaaccttgcaaaaatcatttatcagttctaatagccttttggtggagcccttagggtttcctgagtatcgaatcattatcagtaaagagagatagttatactttttctttgcctattaggatgcctttttatttctttcttttacctgattttctctggctagcactctccactaatatattgactaggagtggtgagagggggcatccatatcttgttccagttctcaaggggaatgcttccagtttttgcctgttcagtatgatgttggctgtgggtttgtcatagatggtgcttattattttcaggtatgttcctttgatgcctagtttgttgagggtttttatcataaagtgat

SEQ ID NO: 5404 - DNA, 1029 bp, Homo sapiens
ttaaagtgtacaatctgataacttttgacccatgaaatcatcaccacgataaaaataacatccccacaaatgttctcctatacaggagattttaggaggaaaggtgcatttgaactaaatcttcaagaacaggtatgttccccaaataagattagctcattcaatcaaaagtatgtattaaatgcttactgcgttcgctaggatgaataaaacagtcatgatttctagaaggagatgcatattataaaataataaaacaaaataaacccaataaatataatggcaacagagtgctgtagtatgagagagaatgatggagaacctactataaatttagttatctctttgaggaagtagtgttaggttgacatttgaagggtatgtgggaaggaacttcctgtgctctgatgagagaagcctgttgagcatgagactttagggcacggctgtagatgcagtcatctttttgcaaggatgggctgaatacctgttcacttactaaaccgtgggagtacagctacactctagtgcagttcctgttaggctattatgagagagagttatggagaaaatttcttcctaatagaatgatgaaatatgcttgtatatttagtagtttgagttaatgcattttacattactgtattcctatagcatggctaagcttaacaataaaaaaaaactatgtagtctttgcctttataaaggaacttaacttgataaagataagctccctattttagcagcaaataattcactttcctttttgaacaaagataagattattcaactattatatatgatttttaatacttccaatgaaaatattttacctcaaaaaccttaaggatgatttttcttataattttttgagaggtatttctgaatttaattttattttttgcaatacatatttatgaagaatataatatgtgtcatatactaggcatggtgctgaagatgcaaagatatggtgtactgtcataattttctcattttcctatgcctttgccaagaaaaaaatagagc

SEQ ID NO: 5405 - DNA, 1052 bp, Homo sapiens
ggtatttacatgattcctttccatgtggttatggcagagcatggccatttcaaggtagtcaaacttcttacacaaaggctggcttaccacagagtgggtatttcaagggagggaaaacagaagaagcaacatatgtataattggaaaccctgaggaggaaaaagagggcagtgacacaaaacagtatttaaatatcaaaaactataatctgaaaacatacttacaggcttttgtgttctccatttttcacttagcataatacttttaaaatttatagatactgttccatatatcagtagtttgtttctttttatggctttgctccgttgtgtgatgtacagtcatatgtttatatagttgcccctggatagacgtttgggttctttacattttgggcctattagaataaaagctcgtgaatattccagtacaaatctgtgtgtgaatatatatttttaatcttcttgggtaaatacatagaaatgcaatttctgtgtcatttgttatgatcaacttcattaaaaactgcagactcttttcaaaatcagccataccattttgcattcccaggatgttacttgacaacatcaccacacttggcatggtagtctttttaaattttactcattctggtggatgtatagtggtattttttagcttcaatttgaatttctcaaataactaatgatattgaacttcttttcttattctgatttgccatttatacatcatcttttttgaagtatcttaaaatcttttgtctgttttaaaaattaggttgttgtcttaatattgagttgtcagatttatttatttcatgtaagggctttatcatatatatattttataaatattttctcccattttatagtttgtcttttcatttcataatgggaaattgttccaaaatacacttttgttgtaatctattgtaatcagcattttaatgcatagttagcattcagtaaaattaatcaattttgactgtacaatttagtgagttttgacagctgtataaagcagtttcccatcaccacaatcatgatctagaa

SEQ ID NO: 5406 - DNA, 1050 bp, Homo sapiens
gttctcccttacagccccgttgacaatagtggataacctccactttttccttaatatcacttatcagaaagagtaattatttaagttggataatttacttgtttgtgttttccactagcctatgaactctgtgagcaatgggatcttattttttttattaagttaccttataccagcactgttcttaccaattagtgagtgcacatcagcagttttttttttaagtgaatggacttggttcagtatatcacaaaatagccacttgtataatgcttaattatgtatttcatattccctctgtgatgctcattaactgtagtatccccttctctggtttttcccattaacactgatcaccatgtaagtagaactaaagctccatgagagcagagaattttgtctatttgttcagtgtcctgtctctgatgtgcagacgaatacccagaagatacttgttgcatatgtgttgaagaagtcggtgggtgggtgggtgggtggatggatgaatgaactcttgcacacttgacatcttggaattctttcctatgatacacaattcagttcaatagacatttattaggtatctgctgtatgcttaccattatgttaggcacagtgtatatggaaatcagtaagttctggtgtcatttctgcttctgatttattttgttttacaatgtttgctattctaattaacttaggaactatagtacgatatgacattggctttcaaattgagcacttaaaactgactcctataaaacaaataagactgagatgatttcatgtttatgctttccttcactcgttgttaattatactttctgttcagacacaattgatcttaccttctttgaatggttgtgggatcttagcttctttgattaatctagttatcattatctttcgagtttaaggtcaaatatttttataaagataacaaatataatgcagtgtcctgatgttttgcttttcatgtctttcttccatctaattttgattttctgacagtgttaagaaattgattcagcaagggctttatttaagatc

SEQ ID NO: 5407 - DNA, 1034 bp, Homo sapiens
atgagaattgcttgaataccaagatcgtgccactgcactccagcctgggtgccagagcaagacttcgtctcaaaaaaaagaaagaaattgccacacccactctcacctttggcaactgccaccctgatcactcagcagccatcaacgtcaagagaagaccttctgccagcaaaaagataacaacttgctgagggctcagatgacccttagccttttttggcagtcaagtatttttaaattaaggtatatacatttctttagacatagtgctgttacacacttaatagactacagtatagtgcagtgtaaacataacttatatgcactgggacaccacaaagttagtgtgactcgttttattgcaatacttttgttgtggtggtctggaacaaaacctgacgtatgcctgtatggaaaaaaaaaaaagaggctatttggttgagacatgaaacattggttcttgagaagcccaggtctattgatgtagagtaacctttccttcattacaggtctgaccatactatttgattgtcccatgaataatattcatttacttacaccattggaaacaccaaattggcgttcagtttttaggatttatcaatagacaaagcaccgaagacttaagtatagttacagaacagactgaaaatgttataaaccctgtcagtgtaaaagaaatggtatagttgatggatgtcagctgaaagcatgttataattttttttttaaaaaaaagcaagaatgaattggaggccagagacagggtgatggagccaccagggttgcaaaggcagaggttgatggagccaccatgggcctagaggacagaaatacaaattactgaggattagttacagaccttgaaatcgaatttcccttgctgggtttagaacttgcttggaatcagtgatgtttttatttcttccaatttctccctttctgagtgggaatatctgtcctaggccttttctaccattgtattttggaagcagataacttgttttctagtgtgagaggtccacagatttaga

SEQ ID NO: 5408 - DNA, 1044 bp, Homo sapiens
atattttgaggattgggatatgtaaggtatttagcatcctagctggcacttattattaattaagctgatattttctgggaggtagtataatgtcaggtaggttttgctgcttagtaagtgatccaactttttatgcctttattttcttatctacagagtggggctaatagtagtacctgcctcatatggttattttcagggttaaatgaatagataaatataatagtacatgccatcagtattaaataaacttaacaaattaaattacaaatcaaatgaaattaaaatatgctattgttataaatatttgctataattattattactattattactacctactgtgtattattactacctactgtgtatcaagcatcagtaaatatctattccattctgttttttcttttatatattagcctcacttgtatcccattatttaatttctgttcatcagactggggaatatcctattagacactgtcttatctcactacttacacttttctgagtaactgtacagaactacgtatatttcacaaatgatagactattctgattgaagtagtgccttgctgctttctcccaacaaatctatttatcgtttcttgaaagaaaatatgctcatttatagcaagatgattaacactatgaagatttggagtgtgacaagacctggggtttggttcctgctgtgcccttctcagagcaacatatcagggaagaaatgattttgatatctttttactggtgatgttaattttgattgcttgactacagtggtgtctactgtgtttcttcactttaaagttgctattttttccattcataagtaatcagtatcttagaggaaatactctgggactatataaataacctattttttcttaaacttttaggtactaattttaacacccatatcagtggattttgcccataataattattactgttgtgttctaatggtgattttctatttccctcattccttatacatttattcttagttaagctaagggtttatcaattttgttaatcttttca

SEQ ID NO: 5409 - DNA, 1093 bp, Homo sapiens
agcctggccaacatggcaaaaccccaactctaccagaaatacaaaaaaattagccaagcatgggggcagacacctgtactcctagctacttgggattctgaggcagacaatctcttgaacccaggaggcagaggttgcagtgagccaagattgcactactgcactgcagcctgggtgacagagtgagactccgtctcagaaaaaaaaaaaaaaaaagaattcttttctctaaggatgttgagtattggcccccactctcttctggcttgtagggtttctgcagagagatccgctgttagtctgatgagcttccctttgtgggaaaccctacctttctctctggctgccctcaacattttttcctacattttgactttggtgaaacctggcagagacgcaacaaaaaaggaaaatgtcaggccagtatccctgatgaacatctatgcaaaaatcctcagtaaaatactggcaaactgaatccagcagcacatcagaaagcttatccaccacgatcaagtcagcttcatccctgggatgcaaggctggtgcaacatacacaaatcaataaacgtaatccatcacataaacagaaccaatgacaaaaaccacatgattatctcaatagatgcagaaaaggctttcaacaaaactcaactccccttcatgctaaaaactctcaataaactaagtatcgatggaatgtatctcaaaataataacagctatttaagacaaacttacagcaaatatcatactgaatgggcaaaaactggaagcattccctttgaaaactggcacaatacaaggatgccccctctcaccactcctattcaacatagtattgaaagttctggccagggaaatcaggtaagagaaagaaataaaggatattcaaataggaagagaggaagtcaaattgtctctgtttgcagatgacatgatcgtatgtttagaaaaccccgttgtctcagccccaaatctccttaagctgatatgcaacttcggcaaagtctcaggatacaaaatcaaggtgcaaaaatcacaagcattcctatacaccaataataaacagccaaaccatgagtgaactccca

SEQ ID NO: 5410 - DNA, 1035 bp, Homo sapiens
gctttttattttgatatacttctactcatctattactgcttttgtcagcatcaagaaatcatttctaaagaccaaattatgaagcttttctcctgtggttttttcctaggagtttgtagtttcatgtcttatatttattctttgatccattttgagttggttttgtgtgtggtgtaaaataaggctccacttttgttcttttgcatgttgatacccagttttctcagcagcattatatttccacattgtgttagttgtgacgcccttgtcaaagatcatttgactgtatatatatatggttttattacctgggctctctgttctgttccattagtctatatgtctttatgccagtaccaatctgttttaattactgaagctttagaatgcattttgaagtcaggaggtatgaagccctcagctttttgctttctcaagattgtttcagctgtttgggattctttatggtttccatacgaattttaggattttttttttctgtttccgcaaaaatgctgtaggattttgaaaaggattgcattgaatctgtagcttactttgtggtgttgacatcttaacaatattaaacctttcagtgcatgaacatgggatgtctttccatttatttgtgtctcctttcatttctttcagcaatgttttgtagttttcagtgtacaaatctttcaccttcttggttaagtttattcctaaagtactttattcttttttatgcttttgtaaatgggatttgccttagtccctttgggctgctacaacaaactatcataaactgagtagcttataaacaatagaaatttatttcttacagttctggaggccaggtgtttaagttcaaggtgctggcaaattcagtgtctagagagggccctcttcacggttcatagaaggtgtctttcccctgtattgtcacctagtaaaagtgccaaaggaactctctgaggacttttctataaatgcactaatttaatctatgagttctatcatgacctcatgaaggcccacttcctaatacca

SEQ ID NO: 5411 - DNA, 1028 bp, Homo sapiens
actggtaccattccttctgaaactattccaatcaatagaaaaagagggaatcctccctaactcattttatgaggccagcatcatcctgataccaaagcctggcagagacacaaccaaaaaagagaattttagaccaatatccttgatgaacattgatacaaaaatcctcaataaaatagtggcaaactgaatctatatgactttagtgtaatatcattgaagacttagagagggttagtgtgagttagaaaaactctctatttttaatattctgcccagtctaaaatttttacctgtcataaactaaatctgtatatctctcacctgtcttatatttatttcagtacatgatataagggtggactctatttttttctcaatggcgagcccatcatctcatctccatttattagataatccatttttttctcactgattgtggataacacatatacatatttgcgcttttaggatttagtctttttttcccctttgacctttctgtactctagcattaacaccacatggccttaattagagaaactataaaatttttaactgttaatatagcaacatatcccttattttttttaacaaaaatgttcttagctacattagtgcattcttttaaaaaattatggtaaaaattacataatgtgaaatcctctttcatttttaagggtataatagagtattgttaactatgtgcatattattgtacagcagatctctagaacgttttcatctggcatgactgaacctctgttcccattgaacagtagctctccattcccatacccccagcccctggaaaccaccgttctactttctgcttctgtgaattcgactactttagacacatcacataagtggaatcatacagtgtttgtcctgttactgtcttacttcccttagtataatgtcttcaaagttaatccatgttacagcatattagaggattttcttcttttttaaggctgaataatattccattgtatgtatataacacaattgccttctttcttttt

SEQ ID NO: 5412 - DNA, 1050 bp, Homo sapiens
gcagtgagccgagatcgcgccactgcactccagcctggtgaaagagcaagactctgtctaaaaaaaaaaaaaaaaaaaaaatctcataattatttttcagattttaccatgttatgtaatgaatggttaaatatcctgtgtacatctgagtaatttacttctgtttcatgcattatgactataaataaactgcttattctggtgtatgagtacaatggagttttatgccactattaaatataatgatgtagatctttatttactgaaatggaaaatatccaaaacatataatatcatcaataatggtctcatttttgtttctaaaaagtgcttagaataggtctaaaaatgtatgtattcaaacactaataatggttataactgaatggtaggattatgagtatttttattttgcctatacttatgtatgtatttttctgtattaagcatggatgatttatacagtgaaagtaaatcaagaaatatgtttgaaaaccatcttgcccacacaacaatttgaattcagtaatgtcaccaaactgtatacttaaaatggttaaaatggtacatttcatgttatgtatattttactacatttttaaaaagcccatggctattatactgcaaaaaccaaaatcaaagccaaaaaaccaacatgcctaattccttgagtccactagatgtttgcatgcctcttataattcttttagtaaatgccttatgtcatttttatattttaactattgtctcaaaatgaccacagtacgtttatttggaatttcaagtaggcagaaagtatgccaagaacagttgttccagaagactcttgaggtgtatgtttgtttaattagaggcaggattcggtgggcaaacaagacagagaaatgttgatggggaaaatattggctctgtaagtgtgcttttggtaaatggtagtatctgtagtgaccatattcaaagaagaaaaatgtgttaggagaagttcacattaacatatcgtgacttcaaattcaactcaagttcataaatagtatttcatgttaattccaa

SEQ ID NO: 5413 - DNA, 1567 bp, Homo sapiens
atgcaatggggattgtttttaaaggaaggcaggcaagtagttatcagcttcaatagtttatactgaggacatagaagagattccagcatgaccaccttcctttattcctttctttttccctctttcctttcctctgtatctgccttcccccctttctgtctcactcaactttttcgaaggtcagcaatcaactattacttgttgataggtgcttaagtaagggaataccctacatataattagtatcactcaattatttttaaatacttaggactccttccttgattttcttttctagccatctcaaataacaaccatttgcacctactgtgttttgaagttttctaccttgtgtgtatgtgtttgacttaaagtaacacaatttggaaacataggagtcatcaaaattaatatttaaatatattttttaggaagtctaaattgtaatgaatatttaggaagtttttattgagggttattatgttctcaacattgtaccaggtactgaggggaaaaaagaaggaaataaggaaaccaacctttctttgagcgttactatgtatcaagccctttcacatatgttttctcattttatcttcacaacaacactgtgaggtaagtattatgctccccattttaaaggaactcagagtggttatatgacttgcttaggccactgtttggcaaatggcagagcccacagcatgaacccatgtctaacagagtgaacctagagttttgtgttcattttcttattccacagatacaagatctagcccttggctttaaagaatttatagtctagtagcaaaaatatgccacagacccttgggattggtattttgagatgttttatggctaagttttgaagggagttttgcaattaatacatgcagttacaatttaggaaaaagaggtatcattaaagacagaatcatcaagaaaagcttctttggacattgagattgtttggagaaatagtaagatttcaaaagataaagttactttccaggtaacaagaatagcattaatttgaaaaattatttctgagaaactttggctgaatttcttttcatcttgtcaaagtaagtgggtatgaaatcttcagaaatgaatgaaagctccagatggtatgttatgtccttatccctgtatagagtgaaaaatatcaaatgaggaaaaagaataaatgataggaataaatatggcgtttgaaatacttagcagaatgccctaatcatgtcagacattgttttctcagggccacagttaggcactagctaccctgtttgttagcttacctcgtgttttatttgtagtttctgtagtaacattgctgttcatcttttctcctggtagaatataaaataattttactgacaaataaatactccattttaaaatcctacctacagagtttttaaaatttaagctaaaaaggttataaactgtagcttggaaggtggtacattatctctttatatatttattttttaaaaatttgccttcttgtatgtagggaagttggagtattgtggatgggaagtggagggtggggtaggaggat

SEQ ID NO: 5414 - DNA, 1051 bp, Homo sapiens
gtagccttccgtgaagaggtccttcacatcccttgtaagttgtattcctaggtattttgttctctttgtagcaattgtgaataggagttcactcatgatttggctctctgtttgtctgttattgttgtataggaatgcttgtgatttttgcacattgattttgtatcctgagactttactgaagttgcttatcagcttaaggagattggggctgagaagaaggggttttctaaatatacaatcatggcatctgcaaacagagataatttgacttcctctcttcctatttgaatcccctttatttctttatcttgcctgatttccctagccagaacttccaatactatgttgaataggagtggtgagagagggcatccttgtcttgtgctggttttcaaagggaatgccaagaaagagcccatatagccaaaacaatcctaagccaaaagaacaaagctggaggcatcacgctacctgacttcatactatactacaaggctacagtaacaaaaacagcgtgctactggtaccaaaacagacatgtagaccaatggaacacaacagaggcctcagaaataacaccacacatctacagtcatctgatctttgacaaacctgacaaaaacaagcaatggggaaaggattctcttatttaataaatggtgttgggaaaactggctagccatatgcagaaaactgaaactggaccccttccttacactttatgcacaaattaactcaagatggattaaagacttaaatgtgagaccaaaaaccataaaaaccctaaaactgtaaaaccataaaaaccctggaagaaaacctaggcaataatattcaggacataggtatgggcaaagacttcatgtctaaaacaccaaaagcaatggcaacaaaagccaaaattgacaaacgggatttaattaaactaaagagattctgcacagcaaaagaaactatcattagagtgaacaggcagcctacagaatgggagaaaattttcgcaatctatccacctgtcaaagggctaatatccagaatctacaaggaa

SEQ ID NO: 5415 - DNA, 1884 bp, Homo sapiens
aattgtaggcttatgtattttcttttgtaagctaagttaaaagaaaattgagtaactaaatttttggaggccagtgttgtaggacatatattgtaccataatttattttttgcataaaagctgctgttcatttttttcagcattaacatgcgtgctttcctcatgtaggagaatatataaaaaactggaggccaagatacttccttttgaagacagatggctcattcataggatataaagagaaacctcaagatgtggatttaccttatcccctcaacaacttttcagtggcaagtaagttaattataattgttgattcatcttgtatttatttatttttatgattttatgtgtcagatatcttaggctatatgagaaacctgtgaaaaagtttgggtttatatttaatagagaaattttcagctttgatagaatttcagtcccttagcatagaggttatcgataacatttggtcttatacaatgcaatagagtttaatatttttatgtagaacttgaatgtgataaatataattccccaaatacatacttcaagtttttgtttataacataaaaacaaggacctttgaacttggttgttagatttagcatgattataagatgttgtggtacttaatgcactttaatcagtttcctgtcataatcttagctcttttgattgtgtgatgagaaacaggtgatttatattagaaatcatcttctggggagattttatgttcgtagttaaatttttcttccttacaaatatctaacaaaaatgtttaaaacttacttagaaattttgtatttgcatgaacatagcacaaaataaactgaaagatgacaatgatgataatgacaatgattattattgttatgttattaccaggctcttccaactcttcaaatatattgattaatcaattagagaatctttgtgttaatttagaagtaaagtgttttaaattacgctaagttaaacttgcctaagatctagctcgtctgtattattaagctaaaatctttaacgagacaatatccttaattttgattttggttatatgttatctattagccatatttgggaaaaaaagatacaagggaaatttgaagctaaaaaatgcaataatataacaaaaaattcaagaaaataagtctttgaatgttacaaatttcattttaccattataaaagccgtgatctttttttactcctattgtttaattcaggttagcccttattagtgggttagaatggctactgtattttttttaagaaaaagataaaacaataaaccaaagggttaaaagatttgtgaagtcatttgaacgatatggatactaacttaaaaaaaaaagctttctctgtttatattagtggattcttaatatagatattttttaaatgagatcactatgaagtgtgtgtgttagttaaggaaaacatcttttttcccaccaaaatgctcattagataataatggttttctttcaatagaaaattattttttaaaccctattgtcaactgaaataatatattgtattttgtattgacttaagaacagattttcattttaaagactttttgagtgaacatttgctttaaagtgatagaaattagcttttagaacataagcagcatacattatctaaatgccctacctaaagccagtgtagctttttagtttatccattttaccagcaaatgttattggtttttctgaaataatttataaaagtacagaattcttgtatctgctgatcaaaatgcagcattttttgaccttatgaaatttcacaccccaacgagttttaaagacatactgtatgtcacagtctgccaacatctgctccaacacttccactggcagaggctgaaataaat

SEQ ID NO: 5416 - DNA, 2457 bp, Homo sapiens
atgagatgctatttagaaatgccaaagaataggggctattgccatccccagtatgacattctggatcactaagaatggttaaagaaatgggagaaattttcacttaaaattttaattagtcaactcatccccttttcttctccacctctcacagctgcctactagacttaaagctccacgagggctgggactatgcttgtatcatttattaaagctccatgagggctgggactatgcttgtatcatttattgctgccttcttagtacttgtacatattttgacactcaccgagtatttttgattgaataactgttagcccgtttttcttaaatctaagtaaagatgtttaaagtggcttttttgatctaggtggtcttgagcagcagcaccttaaaatgagtgagctgggcaggagttcataatgcttagacattgctcaattttcacagactatcaacacacatccaaagctggttgatgacaagtggtcaaagacattgcatagacatcagaatagaatttaacacttttcagttgcctgagggcaaggaaagaacatgtttcaagactcaataaaagataaatgataacctaaaaattcaggtttttaggagttggaaaatctaatcaatatatgtatttaataagtacctataatatgcaaaatcactttaaaaagttacatttcatattgtccctgtgcagttgaaaacttacgctagtttattgcaatgtagataatatgaacaaaattcttcaggatatttttctttttcttttttttttttttttttgagatggagtcttgctgtgttgctgagattggagtgcagtggtgcaatctcggctcactgcaacctcccgcttcctgggttcaaacaattctcctgcctcagcctcccgagtagctgggattataagggccccgccaccacgcccggctaatttttatatttttagtagagacggtcttgccatgttggccaggctggtctctgactcctggcctcaagtgatccgcctgcctcagcctcccaaagtgctgggattacaggagtgagcaaccacgcctggcccaggattatttttaagacatcaataaaacatggttatgataagttgagtgagaagcacatttctttgattctctaagagacatgaataggcttccactcagaactaattgtactcctctgtataaaactgtaatcagtaattttaaatactgcaaatgtcttattatatttattgtcatgcatttcttcagcaactataattgattactgatatttaagatgtatcacataattatggactatacagtattttttgtgctaatatttatttatgaaatccattagtagaaaagattttgccatattcttttaggtagttcatatgtgaaaatttggtgtctgtcaacaggcaactaaatatttactacattgtgaatgatgaaattaaatagattttatgctgaaattaacattgtatctgtttttgtcttaggtaaaaattggctcatgaagacttttatttaaggagtattgccaaagatagtttcttgaagcatgtacatttatttttactgaaaactgcctttttctggtttaaagctgctctttgaaaattcataaaatgtttatatttttatggtactgtacatttgtgtgtatcatttataaaaattcagaagaatctgacttctgctcttttctttggaagactagtttacccctctgatatcctgatattcaaaagaactaaaagtattagtcaaattaatactgtgtttagatgttggataacctcttcatttccttacataaaatacatgttttatatacctgacactagccaaagagacttaaaaaattcatcgttgcctcatttatgtaaatacttctgaataagtgcagtactgattagtagaacatttaatgtgtggtttgtagttggattataaattatattatcataagtggtattagtattagtatcacttgctaacaaccaaatcaaatacttgaaatatgtcaggtaatgttctaagggctttttacattatgtccttacaaaaaccctttggtggataaaaactatgatttctgtttttcagatgaggaccctgagatgtaaagaggttaggttcatgcatctaataaatgatgtgattaggattcaaacccaagctgtgtgactccagagtccttgctcttaaccattacattgttctgcctggagcattttaatgatgaggttgagtgggaaagaaactgaaggctaatttgagaagtttgttgacctcgtattgatcacaacaatttgttgtaccttttgttacacaacatagcattggtttaaattaaaatttcttttattctgaaaatgtgaccacatgcttttcacattgacagtatggccagcttttttttttttttttttgcataaattct

SEQ ID NO: 5417 - DNA, 1045 bp, Homo sapiens
gcaagtatacatattaaggtgattgaaatattaaaggcagaatgtctttgaagttacaaagaccagatttaaatatcacttaacttagatgagtgaatttactcatagtcacttaaactatttaaatgtgaatttcttcatcttttgaaagaaggaaacaatacttgctattcaaggatcttgtgaaaacaaaatgagataatatatttagaatgtcttgaatgaattcagtagtagctgttagtatttttattaggtgttatgtgcaagtctagagctctgtagctattacaattggagtatttatataatgctctgactatcatagaataagaataccaagctgtagaggctgtttgagagaatggtcacagatagaaggttgtttcttggaaccttatgtttatttagggatatatgattgttttataaatgtggagggaaataaattatttaaagaaaatataaagaaaacagttggataaaagtatttcggatgtatggtattagtggttatttagtgatgatgatttcaaattttgttcttttgtttgtttgtttttgagatggagtctcactccgtcacccaggctggagtgcaatggcatggtctgagctccctgcaacctccacctcctgggttcaagggtttcaagcgattctcctgcctcagcctcccgagtagctgggactacaggcacgtgccaccacacctggctaatttttgtatttttagtagagacggggtttcactttgttggccaggcttgtctgtaactcctgaccttgtgaaccacccgccttggcctcccaaagtgctgggattacaggcgtgagccactgtgcctggccagctgatttcacattttgttctacaaaattatttttcatacttaaaaaagtaacctcagtttattttggagctgaacttttctctgctacggccagtacttaagctgtatttgggttattatctttaaaatgagactttggaacacctagctaaaaataatatttcttctcctcatggaggtttaaagcatta

SEQ ID NO: 5418 - DNA, 1037 bp, Homo sapiens
tcagtctttgacttaatatttgcaagtatttaataataccccatacattataaattaaattgtatttggtacctgctagatcttatgagaaattattcacatttaataagaaaacagcaacttgttacttttgtggcagatatgagctcttaaaagatgcaacgtaggtaaataaaaatgagaatgtttaccagacccactaggatcatttggttctgtaattcttatttatgaacattttcttacagctttgttctaatttaattatccctattcccctttaggtaaaggatatcagaattgtgattatatgaagaagaattcttcttaaaaatcatgtattcttggcaaatatttcttattagaagcttttaaaacagtcttaatttttccttacagacaaatttttctgcagtgttgtcattgatataatcaaaatggtttcaggtagttcagaaattgttgacagacttaactaagaaaaacttttgatcaaatggtgtaacaacacctttcctggacaaagccatcattattctgttaaattttcagatcttatattcacatcccatttaccctaagtattatcactaaatggagtattcagtgtacacacatatcctcaacttgattttcctaaatggaaacaatttttttttctccactaagaatggctttttattcatatgtgataaaaagataagtcatttggtaacacctttgaacctgttttcaaaataatgaaaagtttctcttctaaaaatactttttttctttccctcgtttatttaacaagaagagttattatgtaatgtttttctgcagatttttagaaaaagaatgatctctctccactttgtagagaatgatcccattttttgtttaacaccagatagtatcatgacattgttaatacagtaggattcacccagtttgaaagtatgcagaatcagacttctgttgttggtcacatatttctcaatcaaaacatctgtctatgtcgaaaccaaagtcggcccagtataatgaacttttaa

SEQ ID NO: 5419 - DNA, 1050 bp, Homo sapiens
acttgctttgggggagaatgaggggcaagagacaggagggcaggagaagatgagagagatccaggttctgaggctgcttctgataccttccagtgcaaagtactttgtgtgctgaagtgccatattttggagtattgttttctgagctccagcattagccctatttgccagtagaatatggtgtggcaagtactttaaaagaatgctttacatgcttattttctcaagagtatataccgtgagcttttcggaatagttggaccatctgggaatacgtaaaaaataaaaggaaaaggacaagagattattgcattttgattggctccaaattgtattaacccttaatatttatctactttataattttaagatactaatatttgaggagatctctttattcgaattactggtttaagataatattatgatattaacaagtctctttttttctcctcacatcttttagaccagagcagacaggccaagtcaggctgagatcctatttatgataaaaatcatagaactctatgtagtattgataaaacacatgaagattatattatacttagcttttaattatattttgacatttgctcatgtttgatttagaacttttttttttttttttttttttactatgtcttttggtctcatcaaaaagattttaagatcctttttattttggcaaaaatatatgtaacatgaaatttaccattttaaccatttttaaccatttttatttttattttatttttaattttttttgagtttgagttttgttcttgttgcccaggctggagtgcaatggcacggtcttggctcactgcaccctcacctcctgggttcaagtgattctcctgcctcagcctcccgagttgctgggattacaggcatgtgccaccattctccgggcaattttgtatttttagtagagatggggtcaggctggtcttgacctcctgatctcaggtgatctgcccaccacagccttccagagtgctgggattacaggtgtgaggcaccgcgcccggccaccatttttagatatac

SEQ ID NO: 5420 - DNA, 1029 bp, Homo sapiens
tttgaaatcgtgaagaactgacagcatatgaccagacagtttttctacaaaagcattgggattgcctgtcctgtcctatctgttcccataaagttttaggtgaaatacaaaggtttatgatctaaattcacaattgctagtatgatgcattagcacaccataagttcacagtactctttgcactatattcctgaatgattaaaacttacagctggcatagtatcaagtgctggctgcccaagtgtctccctcacaacctatagatagagtttattgcctgtcacagaaagggagtacaccacctggttagaactttggcggtttcttggagggaagaaagcaaggatagtatgtactgagaatcaaagtttggttgaggttgagtgaatactgggtgtgtgtgtgtgtttgattaaaattggatgatgaccattatgcaacagcaagggattcaaaaaatcttacatactgttggggctttctattgaatcgttgatgcgtgtttcaggagtttgctgtgatgaacaatcaaaccgtttgccagggtgaggctctccctgaatagtcaagtcatgttaacgtacactgtgagttgtttagggagttgatagttttagtcttcaagttgtatgtggtttctgttaaactattaatgtcataggactacaacatactacttcaagctcttaaaatggctttcccttatttttgagagatgtagctgagtgctgcttatagtcaggtcaattcttataaaacaccaacatccctctatgcctaaatatcaaatcagtgttataattatttttttaaactaagattatatcaaattttttagtttgatacttacaaaatagttatgatgcttttttttcttggttctctttttttctttgctagaaagactttgaactataaggatggaggttccttttctgcagacttaagaaagaggatgtgaaacttggtgtcatgagttctaaatacctcaagttattgttgcaagaatagggttttcagttttgcaat

SEQ ID NO: 5421 - DNA, 1033 bp, Homo sapiens
atgtatccccatcattaagcaatgcatgactgtaatggagtaatgtgacctggtattctttttcctttttatagttcacactgtatatttttaaacaatacttcagtgtttcagtttatttgtgaactttgatttgtgcactcatttacacattcatacatacattgattcactccttcataaatactttattgatgaaatattacttactggaagtgccagtgaggtacaggagatacagcagtacacagtgctgaaatagtcacagccctcatggacttgacagtgtgtttatcattggattggatttaagagaattagctaatttttttctgttgagagttcatgccatatttgacttttggattttctgagatttatattaatacatttgaaaattttggttttagaattaggctaatggttacagttgtacctcagtttattgtgctttgtttaattgcactttgcacatattgcattttgtacaaattgaaggtttgtggcaactctgttgagcaagtctatctgtgtcattttttccaacagcatatgctcacttgattagcatttttagcaataatgtttttaattaagatacgtactttttaaaagacataatgctattgcacatttaatagactatagtgtagtgtaaatataacttttatatgagctgggaaaccagaatttcatataacttgttttattgccatatttattgtagaggtctgtaactgaacccaaaaggtctctgagatataacttgtatatagattttgatttggtcactacatatgtttatgattgttagcttatacttattggcattctgaaattttccttttttcacttaatattgtttttgtgctctgtccgtgtgcaatgtagttacagctgtagctaaagctattggtaggttatgccttttagctgctgtatagtattccatttgaatatgtagcactactttttatttattctttaattgatagacttttagaatatttccccttttcctcttctagtcagt

SEQ ID NO: 5422 - DNA, 1325 bp, Homo sapiens
ttctagtaaattccattaacagtgggcatcaagtacagccatttaaggccttttatgtttttcttgaccccaggtttttggaatctgaatgttgatttatcactaagacaatgattggtaattgtaatttctaacattgattactcactatggtatgtgccaggcactatgctaattggtttatataaaataacctaagctttagaacaactttctgtggtaggtgttaccaaattattatcatccagttttctagtgaaatgggagtttcagagggattgttatccaggttacactgataataagtggcagagccaggatttgaatccatgtatttgactacaaagcatatactttttacccccatctcaagctttctgtctagcacttgcattttcttatttttacagattaaaaaaagtatgtggcagatggtttaggctaaatataaccaaagctaaatgcatctccccctaaattacttaccactgtacttaatatttatttaggatgtattttgtgtttagcactagcacaaggaagaataattttactttttaataatatttgaaatacatactttgaacttcaaattcattctcccattctatttattcttccatggcattgtctcaaatacctgtcattggcttctctcctctacagtttgacccatcagttgggtttacatttgtttcccacaggtgattgtggtgagcatgcacccacttttgcagctatctaataaaaagatggaaatagttggacaactcatatcaactatgagaatgactggtgatgactgatagtaagagctggctactcatgctaacgtttgttgctaggtatgttacagtagtctctaataaaaatggtggaaaatgttatgagaggaaacgcaacgaaatatttttctgggtataaagtaatgttacaaattgcttttggtatgagtagccagttaaagtttcaaatatcatacttagatgatatttttagaaacatgttgaaaaatagtcatgtggtgcagaatgatgtttcagtcaatgatggactgcatatatgacagcgatcccataagattataatggaactaaaaaattcttattgcctagtgatgtaacatcatagcacaatgcattacgtttttatggtgatggtggtgtaaaccaacctattgcattgccagttttgtacaaaagtgtagcacatacaattatatacagtacatagtacttgataatgataataaatgaccgtgttactggtttatgtatttattatactgttgtcatttcagagtgtactctctctgctttattttc

SEQ ID NO: 5423 - DNA, 1034 bp, Homo sapiens
cctgtggattctcatagttgtcctatttattgtagaatttttggctcaagaggaaagctactgaaatccttaaaacaagaattgctttattttactaatatcttaaggaagtctaccctgtcccttttctccttttcactttcttttgtttgttcatccctgtattgagtgctcactttttcttttgctttctacttcttcattagttcttttctttctacttttcatctttcttagcaaaacattgtagaacccacactttgataaatgctgtggtagggaaagggaatactagtaagaagaagaagaaggaataacagaaggggctcctaacctggatttaggagtcagggaataacaattacacccatgccttactgagctgttactacacgccaagcactattttaggtgttttacctgaattaatctcatttaattctcatagcaaccttatgaggaaagcgctatcacccccattttgcagatgagtatgaggcacagagaaataaagtgacttgtccaaactcacattttgtgtatgatagagccaagaaaggctttctagaagttttgagcttgaagctgagatccgaaggtagagtaagagttgcctggtacactgtgaatggaagcaggttatgggaagagggaccagcaaaagtgtgacagaaaggactcttgcacctttctggaagtgaaagtagattagtagggtttgagggattctgtgagaaagggactagtgagaaatgatgctggaaagattgctctatgttcagataatttacatatgttatttgtgtgtgacggttcatttattcagcaaatacttgtgtctatgaaatgccagttgcatggctgttatctgttgggaaggtggaaagaaaatagcaatataggggtggcatacatctggatgaagttacgtggactttgaggtgttttaaagtagatgaatcttaagcaaagtcttagtacgtctgttttgtttcaaatcagcatatgccttgactttctcattttgttaggct

SEQ ID NO: 5424 - DNA, 1098 bp, Homo sapiens
caagtggaggtctgagtttgagagccaaatgacctgctgattgaattgcagaaccaggccaactttttcaagcactcttcaggtaatataaataagacagtgccatagagcagggatctttatggtttttgttgcaattgtagctactctgtgattgtgatgcaagaaaacagccatagacaacaggtaagctaatgagtgttccaataaaactttatttagaaaaataggcatcagccttttgtagtttgctgatctcttgcatagaggaaaaagacacatttgcattttctgcagcctactagtttcaacaggaagaaaaggggcccagcagaatcctgcataccaaggatttttcctcaccagtttttcaccagattaaaatactccatcttaccagaattagagggagtaaagggagagaaagaaacctgaaataatactaatgagctctccttgtaagaaggggggcaaacgcttttctcacaagtcccttgacactagaatttactctgttactcaggtatactgcctttccagtggactcaaaagaacctataaaacacaaagtattactttgtactgcattttccaaacttgagagtctaagtgttttggtgctaattttggcgtagtttctctcattttttggttagtgatagtaaaaccatgtaatgagctcccaggaagacccttctcttccggccacatgtgttgacatgaggacatgcctttggcctattttgggcagctaagattactctgtggattgattcatattttttgagtgcctacaaaatatgaggcattttgataaatgctggggatacaataatgagcaatagtgatccagttcttaccctcacaagagcttgtgctgtgtaacagaaagggctctaaaaagaaaaagtgatttctaatttgaaacctgagggactagcagcacatgccaaaggggacaaagttcagcatgttccgggatttggggaaagcattgtttatctggggaacagagtgtaaggggaaaatggagatagatagctgaggctggaaaaggaggagggagcctaggttgcaaaacctgtgtaagcacttggg

SEQ ID NO: 5425 - DNA, 1035 bp, Homo sapiens
caatactcttattttatttttgagacaggatctccctctgttgcccaggctggagtgcagtggcatgatcatagctcactgcaacctcaacctcctgggctcaagtaatccttccacctcagcctcttgagtagctgggactgtacaggtgcacaccaccacgccgggctaatttttaaattttccgtagaggacgggcttaccatattgcccaggctggtcttgaactcctgggctcaagtgatcctcttgcctcagcctccccaccccaaaaaaatcctgctaggattacaggcctgagccactgcccccagcctacttttattttagaactgagagcttcagtaagatcataacaggaaaatttaaaatctcccccattacttgtaaaagaacatctttttgagaaattaaaacaattttttttttttaatgagccaaggactcatgaatacagtgatcacaaatgagatcccctcatggtgatgagaatagccatttcagaaattaccactgaacatagtaaagaatactggaactaatagttggtggtgtaaaatgtgatcaatcaagagagtctatttctgttatgtataataattttttttttttttttttttttgagacggagtctcgctctgtcacccaggctggagtgcaggggcgcgatctcggctcactgcaagctccgcctcccgggttcacgccattctcctgcctcagcctcccaagtagctgggactacaggcgcccgccactacgcccggctaattttttgtatttttagtagagacggggtttcaccgttttagccgggatggtctcgatctcctgacctcgtgatccacccgcctcggcctcccaaagtgctgggattacaggcgtgagccaccgcgcccggccaataattttttaaggtaaactttttcttaaagtatgagatacataaaagtgaaagaatcataagaatacggctctgtaaatattcatgaagtaagcacaccatgtaacacctatatttaaaaaacaatatta

SEQ ID NO: 5426 - DNA, 1077 bp, Homo sapiens
aaattaaatttggcaagtgattaatgcttaataaggagtaattgttttatctattttagggaaaaattaatttaacaaacctattattatgtgaaatttaggtaatgaacatgggcagtacataatttccgtaacatttatagcatcgaccacaaaaaggctgaattagtgtcatcaaatacaaagaatgttcatttcagaatcaaagctgttcggaaagcagtgctcatggttactataattaattcaacatttcaggactatttaaaattgttatgtcatatcactttagtagatatacctttcagatgcatatatgcctgattttggataagtgtattttttgtacttttcagtttaaaaatttttttcttagttaaaaatgttctctcatttaatgatttttggttttgtatcaaaagcaaagaaactttcagttatctcttaaataataaaacagaggtcgcccaacctgcactgttttggaccctgtatacagcattaacccagctcaacagctggctgtgattggctagccaatcagagtaccaattctgtagtgtcctccacctttccctgaagctagtagagttttggttgagtggggtataaatgtgaatagcagattagctaattaaaatggtcctagatagttgtaggctccagtgctgaagttcctggaggataatccaacctccctaaactctcttgataccgaagaactcacctggaatagctacagcctacttttctgtccccctccccaccttccctgcaagctctcttcccctgtgggctgggtcctgtttcagctcttccatgcatgtctcaggaactgttcctgtagacaaaggtccattcagcactagaatgctttttccaggctgcatttctaaatctgagtccctgtgtatcttccagatcaaagtgcccctctccccacaacaatggactagatttgccagggcctcatagcagaatatcctgtctgactctctcttcactagactaaggagaaaaaataacaaaacaaaaatgaagaatttattttaaaagatgaatatagcattcccccct

SEQ ID NO: 5427 - DNA, 1095 bp, Homo sapiens
tcctgtgagaatctgttgccacagctgatctgataggaggtggagctcaggtggtaatgctcgctcacctgctgctcacctcttgctgcgtggcctggttcctaacagccaccatccgcggcccaggggtggggaccctgcacttggtaacagcacctcctatctctccatccctcagcacattggcagtaaccaagaatgtctctatgtgttgccaaatgtccagtgagggtggggagcacatcactactcctggttttgagtaccactgctcacagtaaaatcaaatgcagatacaggcattctacagctaatcattcagtgtaattatcaactgtggtaaatgctaattatggaaagtacagagggccatgagactgtaaccaagaaaataatgactccataataaatttggagttcagtcaaacaaatcaaagtttcccttgagtgtatagtaggtatttgatgtcagaaaagaaacttaagacatggtcttttactttaaggataagctggctgtgtatcttccaaaccagtaccctgttgagagtgaaagcgtgctctataataaggaaactgggaaaataaatagagatgaggcaaattgtacataatctacttccaggctttcattatctacccagagaataagaccagtatatgaaacacacagagaataattcaagacagtatatacattaagcgctaacctatgtcacattattagaagagagggttcattgttacttctccatctttgctttatagaaggcttcatgggaaaagatgggattctagcccttcaatttagttctggaggtttgccataaaatatctcaatgttcctattcagttattttacactctactacctaagcccctaacctgttcaagagttgtgtttgacatagcagacaatagagaacaactggagagtcttgatgaggaatatattatgatgaaatggttacaactcctagaagaaacattcatttctctaccaaccttgatcagcattgaggtacaaaagaacagtattatacaactatcagatgtacatactgaaaggacatttctttcttaaaccaaattcta

SEQ ID NO: 5428 - DNA, 1039 bp, Homo sapiens
taatgcatactttggggattcccatatcccaccaaagcttatgctttgatctttaggtggaattgctttatgataaaagggttcttttactgttcattttggatgatgtggatgagtcttagagttttattctggtctttacaaatatgatttgctattttctaaacttatctaatgactaacttaaggcttgttatgataagattataagaaaacactttggggaatcttgagagttttctttgtaattataatttataattctgtaacatagagaacatgattaacatgaagctctaaatgtatccaatagttttgctttcttatcagtgaatctatcagtatactagtagtaactggagaatttcaaagatatgcttacactttaaaccctcaatttccagtgcttcaggtgggtttgcacatatgacaagacaggcaaggagtaagaaggagccagtataagaattaaaaaggagaccgggcacggcgacttatgcctgtaatcctagcactttggtggccgaggcgggcagatcacttgggctcaggagttcgagaccaccctgggcaacatggctaaaccctgtctctactaaaaaaaaaaaaaaaaaaattaaccaggcgtggtgtcgcccgcctgtaatccccactgctctggaggctgaggcatgagaattgcttgaacccaggaggcggaggtggcagtgagccaagattgtgccactgcactccagcctgggggacacagcgagactctgtctccaaaaaaaccaataataattaaaaaggacttgagtgatacatttattaatttggcaaatatttattgatgatttcctacatatcaagctgctctgctggaagactgtaagtcaaaatagggttcttgacttcatggaatggtttcctcacttcagcatttttgaacccgatcattcttcctcgtcatagcaggctgtcctgtgcgctataagatgattagcagcatccctggcttctgcccgtgaggtcagctgtctccagccttcttggcacc

SEQ ID NO: 5429 - DNA, 1032 bp, Homo sapiens
attttaccaaaatttatatgattgtaatctgttgtataagccccaaattttctgtcattcagaaatatcggcagtgaaatccgagttcagggtaaaaatgtttctgttgtgctgcagagccagccactggagggtgttcatgttaacttcgtagtctcagtattctgctgattagattgatgaaaaagtgaagactgtccatttacaagtcttttgaaattaaagcaaaagtactattcgtgtctgaaatggaaataaacagaaaaggagttttaaaccttaaaggaaatatgatatttaaattctaaaattagtaagcaaataactttcttttgctttttactcaaagacactggtcagtaataactgtaattttgaatatacttacaaaattatatgcagttatgaggttctgataagtacacaaacatcccaaatttatttactaaacttttttgacattgttctaatcgttttcatttaaatttgagtatgctatagaattttgatgtgtacatctgctctgtgactccttccttattttaaatctgttgcaaaattttccccaatcagttggcatgcttttaagccagtagtgataaacagatatccatgaagggctggtagagtcttttgtcctgaatgggttttgagctcaagcctaaagtaaatattaaggtgaacttccaagtgattcacagtaaagcactagcttctcattcattgaatataattgataaagtttgtattattacatagttatgataggattttaaagacagcaggattctctgaaatatagcttaccaattggaaaattactttagtgtgatgtattctgaggctgtaaagtttatatcatttttaattgataaaattgttctaagttcttattagaatcttgagaaacaaaaattctactgagtaggctgtttattcactttttaaaaatgtatgcgaatttcagtagaataaaatgatgatttagaaattggttttagtttattagttaacagtagtaaaataaacttt

SEQ ID NO: 5430 - DNA, 1046 bp, Homo sapiens
cctttccctggcagaacattgtgtataaagtaatcttaattctttgtgaagccaatgaagacagtagattctctattaaagtaccctgtacatttccatcataggactaattgcaatttaaaattattattaattttcttttttattttctttctccccctgggataccctctgtaatggtagtcttacacacagtagggccttagtaaatgtttattgaatatgaatggatgcccctcctcaccagttgagagcagtgcacatatatgtaatacaaattatttaacagtgattacaaaccttaagcctttgctctatttgctaccagactgattttctaaaatagtgtttttaaaagttcactcaaacttactctgtgccagacttacaataagttttgagaatacaggcacaaataaagacataattcctgcattttatggaatttggaaataaagaggaagaaatgcttaaacctctttggacaggccaagaaaagctttgtagaggacacctgatatctttaaggttcttttcagccaaaaaattgtataattcacaggtgcccttttctgtggcagtaggtaaaaaccttggtagctgcaaagagaagacagctgccagcagggtatttttggctgttcctgaggctgccctcattctgattaacttgaacgtttacttcggcctgaggagtaactttgtaacttaaatctaatttcttactaaatagagattatttttagattatccattattttgttagcagagataattgaaaggagaatttagtaatgttttctgtgactttactgaagccagttcaaactttattgtttaatttttgtttggttaacaagggaatcaggagacattagcacttcctactaataatacatcatataacttatttatcctgttaattttctctttcaatcccgctagaatgtaaactctataagaagggatttttgttcttcgctcaataaatatttgtgaaatgaatacttaggaagtcattggtagccttaccagggtagtttaaa

SEQ ID NO: 5431 - DNA, 1034 bp, Homo sapiens
ctgagtaggtgggattacaggcgcatgcctctacacccagctcatttttgtatttttagtagagatggagtttcaccatgttggtcaggttagtatcgaactcctgacctgtgatctgcccacctctgcctcccaaagtgctgggattacaggcgtgagccaccacgcccggcctatatctcagttttttaaaagttgtggcacctaactaaaatgaactgtttttgatagggatagagaagggttctgtaggagtatacagaatgacattttgacctactgtgtgaagttgacagcaaactcctgaaataagtaatatttcaacagagacctgaaaaatgaattggagttactcatgtgaaaaaactgttagcaatggaaatgaggaaacatgtaagaatatatcagttaaaattaacagctgaaagccaattttagctgtaacaggtataagctcctacttgtgtcactatgtaagattttgtcaaagactttttgccttaagtaatgtaattatccatggagaaccatagcaatataatatttgttataaaatatatatattatatatatgtatgtatatctcctagcttctggggaaaacagggcatttattttttattttttgattctaaatatttttaaattatagtttatggcattttataattttaaatattcttgaagccagaactaaattctagagtttgtttatgctttatttttttccccctctctatatattttataaggcaattttctaagctttgatcctatggaaattttaccgttttcattacttttgacagtttgagattagtttcagaaccctgtaagcaaatagtaaatataattagggaaaattaaaatatttctgtttcctggtaggcaataagacattaagaaaaaaattcagacttataccaaagtagaggcaagtataatcagcacccatgtaatcatcaccagcttcaaaaattttcaactcatgaccaatcttattttatctatatatccacttactcctttaccca

SEQ ID NO: 5432 - DNA, 1076 bp, Homo sapiens
aacttgagagaaaaaatacaaacaattatagagagacagtctctgattaacatgaacataaaataaccatcaggtgacaaaccttttcacaagaaaaatgatctgtgcccaagatcaattttatagacattaactcaaagctgtgattttatacacaaagcagtattgtagcaatggtataaacacaggaaaaattcttgtgaaaggagtggagcctgcaaatgtggaactatgtggaaaagggaaaagtttgtagtatgtagaactatggcaggtgtttatatttcacagtgtaaaaaataaacttaaattgatatactggtttactaatgaatttatgaattttcaatgaatttatgtagagcttattctgttagatgggactaatagtaagaaatactacaaagtaggaaaagtttgtctctaggacccttttgtgaccttttttttcttgctctttcacactcctcatgtaatggtcaccatccatagatccttctctgttcactctgttcaaaagagatctccaagacctgtaggctttgttaagttatcttaaaaatgatgaataaacacactagagtattgatggattgtttcacatttaattgggactcttgaaagtccaaacagaattttcttatggtaaaattcaaacattgacgtctgttaggggagatatttatagagaagagaactttttgagtctgctccttaatttacaacctgttgtcagttgggaaggaaattaacattgttaaatgcttatatgctagtgtctgggtgtctgtgctaggtcatacacagtataatttgattctcacaatgagcttgtgagtatgacattcttattctcattttataaaacttttttttgtggggggcgatggggtctcactgtgttgcccaggctggggcacagtcactattcacaggtgtggtcatggctcactgcagcctggaactcctgggctcaagctatcttcccacctctccctccccagtagctgggactacagcttattcaagttttataagagataaactgaaagaggcatagaaagatgaagtgacct

SEQ ID NO: 5433 - DNA, 1049 bp, Homo sapiens
atttagactttttcttctctaagttaatgagtccaggactgattttgttagcctttctggagctgttaagaattcctattctttcgtttttggtagtcattgtctccacatttgctttatggagtcctctttggtggatcccacaggtggggaggagacacaggattcataagatggccggtgggtgagtgacttagaatttgggttagaactggccgggcgcagtggctcatgcccgtaatcccagccctttgggaggccgaggtgggcagatcacaaggtcaggagattgagaccatcctggctaataaggtaaaaccccatctctactaaaaatacaaaaaattagctgggcgtggtggcaggtgcctgtagtcccagctacttgggtggctgaggcaggagcatggtgtgaacccaggaggcagagcttgcagtgagccgagattgagccattgcattccagcccaggagacagtgtgagactctgtctcaaaacaaacaaacaaacaaacaaataataggaacaaggacgggtgcggtagctcacgcctgtaatgccaacactctgggaatttgaggcaggaggattgcttgagttcagaagtgtgagaccatactggggaacatgacgaaacctcgtctttacaaaaaatacaaaaattagctaggcgtggtggcacacacctgtagtcctagctactcaggtggctgaggtgggaggatccattgagcctgggaggtcgaggctgcagaaagccatatttgcaccaatgcattccagcctgggtgacagagcaagaccctgtctcaataataataataattggaatacaatgtgaaatttggacattacattgtcttggtgaaatctgtaaatacaatgtaatggttttgagttttttccttatgtgaattttattaataatttatatggcagagctatcatgccatctgtatgtactaggatgttaccaaaatacatgcagttgacagtttgggaaagcatagagcaaatagtatatcctaagtagatcttttctttggct

SEQ ID NO: 5434 - DNA, 1055 bp, Homo sapiens
taattcagccctgtataaaagttagaacaattacaaagtttatatgctcattactcaaattttaacatttttccatagttgtattatctttcttttttcctcttcttcctttcttccctctgttccctctctttctccccttctgtatatattttaaatatatttatatagattttaaacatatttttaaatacttaaatatatttatgttcaaatatatagaattttttcctgaaccattttagggtaaatttgagacatgatgcctcctttagtcttatatacttaagtgcatgtttcctgaaacaaaagtggtatcctacataattatagttaccaaaatcaagaaattaacattgatataatatggttatgcagatattgccaataattgcctttatagctctcattctacaaaaaataatcttgaatcatatgttgaattcaattgccatgtctttctaataatctttaatcaggaggcacatcatattgatttgtcctagtcctagtaatgttaattttgatcacctggttacagtagtgtttaccaactttcttcttcattataaagttatttttccttctttataattaataggaatcttgtcgtatgattctttgagattatgtgaatatctggttgctcctcaaactttggcccaccaattttggcatccatttagggttcttacttgaatacattattaatgatttatggtagttttctaattctgacattcctttttcattttagttggctttttactataaggaggaaatttctttctccctcgtgaattctgtcttactcaatgggttataatcttttactatcatcatttattttgaaatgcttaaatgattctagattgggcccatgaaagcactttcaggccggcttttaaattcttttgacatgtctccatcaatttttgaggacttgctgggacaacaagatattccagtctcgtcatatactttcctacctctagaagcagctctctagggagctctggttcttcttagtggaaaatagtattaactttccttta

SEQ ID NO: 5435 - DNA, 1043 bp, Homo sapiens
cgggaagagctttaggagctctgtgctagggacccaggagcttgggaggaagataaaaatacatatttcttgtaatattacaatatcacaggcttgaataccagggtgtgaggatcattagaagccatcttggagggtagctaccagagtctcatatatttccttataaaatacctaaagttctttcacatttactgcttctttaatccacccagaatggggtgtgtatgtgtgcatgcgtgagtgcccatacgtgtattgtgtatggtgttaaaggaatctaatcttttattctttcaaagatacgctaatcgtcccagttccatttgttaaataattcatcagcattgttccatttatatatgggtttgcttctgggttctctgtacttctctgctatgatctgaatgtttgtccttccctacctccccaaattcctatgtcgaaacctaatcccggatatgatagtgttaagaaaaggggctttgggtgaggtgattaggtcatgagggctctgcctgcataaatgggggcaagaaggtaccccagtgaagtagttagcttcttcttctgtatgaggacacaacaagaagggtgccatctatgaagaatgggcccttcccaaacattgaatttgctggtgccttgtacttggacttccagcctccagaactatgagaaataaataagttgtttcctatgtttataagctccctactttatggtatttttgttacagttgcccaagcagacttaagatgttttcctgtagcctatttttctattcttaggccaataccgctttacaagttttgatctctcttaggcaagtctcccctttttgttcttcatgtttggcttggttctcttgtctccaaagggccattaagagagactagttggctgggtgtagtggctcacacctgtaatcccagcaccttgagaggctaaggtgggcagatcacttagcccaggaatttgagaccaggctgaacaacatagcaagactccacttctacaaaaaatacaaaagttagctgggc

SEQ ID NO: 5436 - DNA, 1035 bp, Homo sapiens
ggagggggagcacaggaggccgtgaaggccagccctgctggctgtggctactgtgcgtggaccaagagcatgtgcagcatgagggctatggtggtgcccagagagcagtgtccagcgtgagggagattgtggtgcctggagacctggcagtatcacccggcatgagggagatgctggtgcaccggctgtggatgtgagcttgcctggtgccagaactcggaggggccagactctaatttagtacttttttatgtgattggcagtttctaaaaatttgtaatttgatgtcgtttcctttcttattctgaataaatattcaatttaggacctaaatttgtttttatagttttatgttcctttttttttttgaagagggctgttcccccaattttataagctttaaaattccgttaaaacctggattgacccctgggtttccttgtctgcctttttaatcttgtctcatactcaccccctcattccctgcagtctaggcactttcatctttctgttcctcaaatggattatgtttgttctcatgtcaggatttctgcacttgcctggtctcctctttccttagctttttgaaggatttttcattatgtacttctcaggacgggtgtcttctcagagagtcttagaacacccaatctaaagtatcttttctccctccctcatctctgtcacgtcatccattttgttttcatagcatttatcagcatcttttttatttgtttatatttttgttggctgtctctgccttttagaatataagttcagtgtattaatatgagagctgtattgttcactgctgtcttcccagagtctagaataatggctggacttattagcattcaacaggtattttttggatgaaaaattactaaaaagctggaatttgtacattttcccatgggtttatttataatactagcataatttcttattgttaattttgtgtttgtgtatggtactgctttctattatcaattgtataaactcgtttgatcttttctgctgaaaatgttgactaag

SEQ ID NO: 5437 - DNA, 1035 bp, Homo sapiens
ttgttaacaaaacatagttcagatcccttgattaaaaccctccactggtttcttgtctcatgaagaagaaaaaatcctaactgttcttgatgatctttaaggctcagaatgatctggacagaggtatttaccttgaagctcataaagcataggcctttctcacttgcagagtatctttctgaagctggactaaattggttaaggccactgtacttttccactttgtcttctttcctgtcacacaccctatcctttcaggctgtgttgggatggacaaaagcagttctggagtcctaaggagaagatgagtgggatatgtttctgtgacctgcagtcattttaaagtttagctgttgctagctgactccatgtaagaataccttccaggaatttgatggctgtgcactctggcagtgcagctggcatggttatagggtgcttggccgaaggtttgcatagcaatatgaacgcatcctacgacacatctagccaacactggaagactgtgggtaatggacgagaaaccaagattgactttttgcaagtttttaaaaataatcttcttgtaactcacatgtgaaagaaacatgagaggttttcacaaattcagtaatttgagacatttacatagcatcaccaatagttgtgaagctgaaactttagttctaaactataagtagtaaaaaaaaaacgttgattctctattgtaaacaaaagacaactattttctgtgttctctgtgtagaaaattatattataaaattgaggtggggctgggcacggtggctcacgcctgtaatcccaacactttgggaggccgaggcgggcagatcgcaaggtcaggagatcgagaccatcctgactaacacggtgaaaccccgtgtctactaaaaatacaaaaaaaaaaaaaaaattagctgggcatggtggctggcgcctgtagtcccagctactcacacctgcggctgaggcaggagaatggtgtgaacccaggaggcggagcttgcagtgagccgagattgcaccactgcactc

SEQ ID NO: 5438 - DNA, 1067 bp, Homo sapiens
ctgtatacaggataatgtgtgtaggttatatgcaaatactataccatttgatataagagacttgaatatctgtggattttagtatccttagtgggtcccggaatcagtcccccccacgaatacccagggatagctgcactcacacataatgaatttatagtggaaattctatgaaatgtatatagagttgttataatatacctaggatgatcattggtatttcggaatagcttttagaatatgaccaagatacatgacatctactattatataaacctgtgtttgtttcagcatgtttttttcctatgttttgttccatgttagatgtcatgagtttgcaaagtataataagctatattccctgccttcaagtagcttaccatccatgtaccatttcccaaagtgtacatcattagcaggtaggtattcctcaaaaatagattattgtctctgattaagtttcagagatacctggattaatcaaaattgaaagtttttttttagaatagggttctcaaatgcatacattagggaattccagaaagcgactgtatgttgcaaggttttccaagctttgtcgacacactattttttttctcatgaaacttctgtggtgggatctgaggggaatggaggtggggaagagagtggcagtggtgtttttaggaagaagattaatgtaggagaggagtgggaggaacacctaggacagtagctgtgtacctggcctaggttcctcagtccagatggtagcaagtctgaagacagggagagacttcttccagaagatgaaattcatagaaacctgaggcaaattggtatactcaaaggagctttgtcagactggagagtctggggtgaattgggataaatatatagtagataagtatgtagaaaactaaagaaatgagaaacaaattattaattgcaagggaaacaaaatgttatgcaggaaaagaaaagtaattattgtttactgcttggttcagctctgaataccctatgtagttataatgacataagcctcaaatattgatctaaccaaagttaggattgtgttgagacat

SEQ ID NO: 5439 - DNA, 1914 bp, Homo sapiens
acccattgtgggttctgcatctgtggttctatcaactgtgtgtcaaaaatacttgagaaaaaaaaaaaagaatggttacgttcatactgaacatgcatagactttttccccttattttcccctaaacaatacagtgtgactatttatatagtatctacattgtattaggtgttttaaataatctagagatgatttaaagtacaggcctagcttgttttattgcactttgctaatactgcatttcttacaaattgaagatttgtggcaaccttgagtcgagccagtctatcagtgccatttttccaagagcatgtgcttatgttgtgcctctgtgtcacattttgggtaattcttgcagtatttcaactttttcgttattattataccggttatggtgacctatgatcagtgatctttgatgttactgttgtaattgttttggggcaccacgaaccattacccatgtgaggtgatgaacttaataaatgtgtatgttcttaatgatccagcaactggctgtacccctgtctctctcactcctgagacacaacaatattgaaattagtccagtcagtaaccctaaaatggcctctacatgttcaagtgaaaggaacaatcacacgtctctctggaaatgaaaagctagaaatgatgaagcatagtgaggaagctatgttgaaagccaagacaggcaaaaagctagtcctcttgagccaagtgaatgcaaagggaaatttcttgaaggaaatgaaaagtgctattccagtgaacccatgaatgataagaaagcgaaacagccgtattgctgataaggagaaagtttgagtggtctgggtagatcaaaccagccacaacatttccctaaaccaaagcctaatccagaggcaggccctaactctctttaattctatgaagagagatgagaaagctgcagaagaaaagttagaagctaacagaggttgattcatgaggtttaaggaaagaagccgtctccgtaacataaaaatgcaaagtgaagcaatcaatgttgatgtagaagctgcaacaatttatccagaagatctagcgaagatcattgatgaaggtggttacactaaacaatagattttcagtgtagacaaaacactcttctatttggtgaagaagatgttatccaggacttcatagctagagagagaagtcaatgcctgccttcaaagcttcaaaggacagtgactttcttggtcgtagctaatgcagctggtgactttaagttgaagtcagtgctcctttaccattccaaaaatcctaggacccttaagaattatggtaaatctgtattctgcctgtgctctatcagtggaaaaagagagcctggaagccagcacatctgttcatagcatggtttactattttaagcttactgtggagacctactgctcagaaagattcctttcaaaatattactgctcattgacagtggacctggtcacccaagagctctgatagagatggacaaggagatgaatgttgttttcatgcctgctaacacaacatttattctgcagcccaggtatcaaggactaatttcaactttcaagtcttattatttaagaaatacattttctaagggtatggctgctgccataggtagcaattcctctgatggccctgagcaaagtcagtgaaaaactttccggaaaggactcaccattctagatgccattaagaacattcatgaatcatgggaggaggtcagaatatcagcattaacaagagtttggaaaaagttgaatttcaaccctcatggatgactttgagggattcaagacttcaaagaagaaagtaactgcagatgtggtagaaatagcaagagaactagaattagcagtggagcctgaagatggaactgaattgttgcagtattatgataaa

SEQ ID NO: 5440 - DNA, 1411 bp, Homo sapiens
atgattaatggatgttaaagtagatgagctactcagtcgagctcctagaccctagggagtcaataaatagtcggttttcttcaccctttttttttttttttgagacagttttgctctgttgttgaggctggagtgcagagtgcagtggtgcgattatagctcactgcagccttgatctcctgggctcaaaggatcctcccttctaagcctcctgaggagctagggctacaggtgtgcaccattgtgtctggctaattttatttttttatagatacagggtttcactgtgttgcccaggctggtcttgaacccctggcctcaagagatcctctcacttcagcctcccatagcatgtgggattataggtgtgagctactgtgcccagctgttgttttcagttttactcttctgtggtatgtggtaagagggagcatttgttttctagagcctgcagcatgtgtgggtcagttgaaaatgtataaaaattttgagttacgcacggtggcttgtgcctgtaatcccaatactttgggaggctgaggagggaggactgcttgtgccaggagtttaagactagcctgggcaacatagtgagaccctgtccctaaaaatatgtaaaaaaaattttaaaataaaaattttgaaatgcaatttgtgtcttaaaattctgccttatttatttgcaacgtgtgtttcttgtcatgtatttgctgctgtatgctggtagaaaaagcatagagagtggactcaggcagtccatgctctagcctcctgttctactctgaactagatgtgtgacattgtaagtgctgctgcttcacttcgggtgttactcctgatttgcacagtgaaaagtgttttattacaagatgatttctagaagtttgtttctgttctgacattagatgacctgtgatatgtgaagcttaagacatcttttttcattactgggtttatacggggtgttgaggcttgtgatacatttactgttataaattcattttaatgtgtttggaggacttgagatgattggagattattagattgatagctgatgtttggctttattattggaaaatagttctagctacgaaacctgtttttgagtgaaagtatgctaggaatggccattgcttttcttcctacagagataagtgatctcttggtgttgtacacatgaagctctcacctttatttttaaagtcatggattttaccttggctcctataaactcttctcccctcccccatgtagctgtaagcattcctactcctaggatgatttggaatgtgtgtgtttcaaatcatgtttagtgattgtaaggctaatctcagcttaattatcactgccaaaggaatcctctgacccccagggccagatcatgttgtttgctttcatggtatatttttcc

SEQ ID NO: 5441 - DNA, 1032 bp, Homo sapiens
gaaacctacgcctgaactatagaagtgttagctctcttcctctgctctccttccagaactgcacagtcaagcctgtcctatccttctcctgtggaagactgaagataacagcatcttcagatactgataggctttctgctgagagtaccttaagtgaattctaccagtcgttaagccctgttttcccacacagatctttcagttagttcttttcaggggcttattcttaaatatgagcaaacaatctaacaccattggtcatctgggggaagactccaacattaaaaaaaaaaaaaagtagacatagagaggtggagagggagtgatacttggaacactgggagaaaacagataccataagggatcaaaagaaaactttaaaaatctccagtattatcagagaagacatgtatttccttccccacttaaatgatagtgaacacatataaaagcagaaatccatgagggtaaagagaacgagatgagagatgacagcaggcaaacaacgtcaactaaatattggaagctgagaacctggtgcgtgagtggtaacagaatttagcagagctgagaaagcagaaagtcctatggtgtgggtagttgtgcaaaaactggtattcttttaattaatgatgtgctttgctctatttggactgctgggttcttatttttgagcagtatgctctctcccagttgaagctgttaatgggctgtccaccaatggagaaatcagaatgattaaaatgtagttcttgtatttttatggttctcttaagcagtcatgcattatactcttcttcttgtgtctgagccaacatttcataggagtagataacacccatttctggtggcactgacagcagggttgaaaagaatgttataaaagaaaatatgaataacatttaacttaagaatatgttccaaattttgtttgtaaagtagttgtttaaaacttggtagttctttttgatataatgttataaatggcagttatcctagaccaaactttaaaatatgtttcattagcaatta

SEQ ID NO: 5442 - DNA, 1560 bp, Homo sapiens
ttgggtcataaatagcaagttttctctcccaataaagcaatgtctgagaatcccaagattctcatttagtagatctgggttgagacctagaagacagttaattcatttagccaccaaatgtgtattgagtgtcttcctattatatatttattaccatattgtgtaggtagtgttagaagacatcccaggtgcctactctgtaactggcggagagataataaacaaacaggataattttatatagtgctaagttctgtgaagaaagtataccatgatatgtgccagataattacctggcaggggaaaggagagagagagctttgcatagagtgatcttgggaggtgtcttttgaagagataactcttattttttatcttgcttttttttttaaaaaagtattttttaggttgtagtaaaatatatataacataaaatttaccattttaaccatttgtaagtgcacgtttcagcgacatcaagtacatgcacattgttttgcaaccattcaccaccatctgcctccagaacttttttcatgttgtgaaactgaaactctgcagccattaaacagtaattttttattttctctctcctctcagcccctaacaacaaccattctttctgccttcttaaatttgactgctttagtgcctcatgtaagtggatcgtacagtatttgtgtgactggcttatttcacttagcgtagtgttttccaggttcatccatgctgtggcacatgtccgcatctccttccttcttaaggctaaataacactccataatatggatgtaccacattttgtctgtccacctttgaactgagatctgaaaaatgagaaggggccatgcaagaactagaagaagaacgttacaagcagaggaaagaacatgtgcaaaggccctgagatagcaataaactggttggtggtctaggccagtgttgtcagaatatattaatagtagagaaaagtgcctggaaagaatggtattaaatgggatcagagatagacatacattggccgtattattttaggctttgaaagaccttggcttttaagtggagtgagaagctgcttattaggaagttttaagtgggggagtgacttaatctgatttccatgtaacagcaaaagcaaaaatcacccagactgctgtgtggacaagcatccttgtggattctaatgcaagtctgtgatcggactttgagaaatactaatttagtccttaagtcagtatcctgagatagctgatttcaaaagagctctctcagggcttctgaccaaaagtgacagattggctacacctgtacatctcttcttatttcctaatccctgcctaaatggaagaaagaaatcagagactgggagaggttacaacaggagacagaagctgctatacctctttcaaataagcagatggacaggtagtgactgactttgcagaggaatcacacagtacctgtaagtgcacaaaaatacctgtaagaaatgcagtactgtgtttgtccgaagctcccaagagtctcagcatttggaggcaccagatactaaggaagatag

SEQ ID NO: 5443 - DNA, 2194 bp, Homo sapiens
agattgctcaatgaacatgtttaagagaaggatgagaggatagcactctggagaatactgacatttaaaagcaagtaaaggaaatagaaacttggaaataagacagagaataagagctaaaaaaaaaggaactttaagttatagacagaattcagttacttggatccccccactccccaagaattgtcttcatccttttttaactagaaagaaatatttttcttttcactatttaataagtgccccaaagtgctagatagttttcctttgaaatatagtaaaagagcatttattgaaagcagcttgtttatgtgtgctttgtttaaaaattagagacattttattttttcttaagtaacagaaatcagactttcaaaaaagctctttaaacctagactaacttatttatgacaattttgtcatatatttgaaagttaattttaggaaaattacagagccttttaaccaccctatggccagacttcagtgttgttctttttatttctacctcatttcatgttgagtcttaacttcgctgtctctctttatcatcccctacccctagtctgaatgttgaagaatgctaaagtatattttattgcttcattgactaaaactatgtttctaaaactatgaatttgcttaatgagtcagcaactgtaactataattaacagtatagtttttacaaccatagttttgtggtaaatgtgcagttctcagaatttaaatgtaaacgttcaatgaaattaaacaaaacccaaatcttcatgcaataggtagtatatatgtattcagtaagggtcaccaaacattaattgaggttctattatggttaacttttctactttgtacttagggataaaaagatgagtaaaattgtttcctgcatttttccccacccattccctccccattttctttctttcctaccttccacagccccattgagtgtctacttaatgtgccaagcacacagtatataaagatataaagagctcaaggatgtaaagataaatgaggatctagtgcctgccctagttcagttatcccttaggaagacagaccagtcctatgtcagtcagctcagaaaagtgcaataactgttgaagccagggccacacccagtcttgtctgggttcactaccccactttccactcatactttagcgatgaacagaatttaagtcatctaaaaggaggagcaagattaaaacagtgaaggaggtatgatgagtaacagaaaggagctcattggtgactaatgaaagagcaactgctgtgttaaggggttgatgaccatattcgccagtgtggagttgaaggttaaggagtgaatgggaaatgagaaagtagacttcaaaaaagctggatgttgtggagaggaatagagaaaattagaggttgaacatgtagtaagagtgagtgaatattttttagaatggggagataagtgtgtttgtttgctgtctaggagtgagctatagaattgtccaggtgagatggaaagataacagagagaagatatgagaacaaaatcctgtaggaaattagataatatcaagaacataaatagaaggcctggcacaaagtctcatgcctatgatcccagcactttgggaggctgaggcaggcagattgcttgagcccaggagtttgagaccagcctgtaacatagcgagaccacatctctacaaaacaaaaaaaaaaaaaaaaaaaaaaaattaaaaattagccaggtgtagtggtgcatgcctgtagtcccagctatgtgggagatcaggaggctgaggtgggaggatcgcttgagtccaggaggtcaggctgcagtgagcagtggtcatgccactgcagcactccagtctgggtgacacagtgagaccctgtcttaaaaaaaaaaaaaaaaaaaagggcctggcacagtggctcacgcctgtaatcccagcactttgggaggcctgtaatcccagcactttgggaggccgaggcaggcggatcacgaggtcaggagatcgagaccatcctggctaacatggtgaaaccccgtctctactaaaaatacagaaaattagacgggtgtggtggtgggcgcctgtagtcccagctacttgggaggctgaggcagaagaatggcatgagcccaggaggtggagcttttagtgagccgagatcacaccactgcactccagcctggg

SEQ ID NO: 5444 - DNA, 1037 bp, Homo sapiens
gaaatatcatgaattcagtttcagggatttgaggggagggaggaagctagacttttggggaataagggaagagtgatgcttaaataccagatttaaaccattcatttgaaaaatctgtcagtgaaaagtaggagagcaataaagtgagcagcttggttaagtgaaatattttttttaagttagagaaaatttttgtatatgtgatggcagaggggaacgtgctagtgtggtaggaaatactatagctggcagagaaagaataagatggagtgaaggttgggaggagatgagaacataggtgatggggttaatctttgaaaggaggagaggcaaactcccagttggtccagagggaaggtgagcatgagggatgagcagagggaaggaagaattactgaggaacagaagaggaaaaaagagggaatttctctgtgatggttgtgatgttctctgtgaatttggagaaggcagaatcatcacggttttagaacttcctcttctatttatgtatcccgggagtgtgaatgaagaaatctctgcccacctaacataacctatagttggtgagtggtatggcagaagtttgaaaagccaagggagtaaagttgtggtatgttctaccattagaaaaatgttaatacaaacaaaatatcaggcaatgtaacactctaatactatttaaaaatgcagttattgtacagcatgatgactacagttaatgtatattatattcttttttgtttgttttttttttttgagatggagtcttgctctgtcacccaggctggagtgcagtggtgcgatctcagctcactacaagctccacctcccaggttcacgccgttctcctgcctcagcctcctgagtagctgggactacaggtgcctgccaccacgcccggctaattttttgtattttttagtagagacagggtttcactgtgttagccaggatggtctcgatcttctgacctcgtgatccatccgcctcggcctcccaaagtgctgggattacaggcgtgagccaccgcatccggc

SEQ ID NO: 5445 - DNA, 1014 bp, Homo sapiens
ggctccacccagttcgagcttcccggctgctttgtttacctactcaagcctcagcaatggcgggcgcccctccctcagccttgctgccgcgttgcagtttgatctcagactgctgtgctagcaacgagcgaggctctgtgggcataggaccctccgagccaggcatgggatataatctcctggtgtgccgtttgctaagtccgttggaaaagcgcagtattagggtgggagtgacccgattttccaggtgctgtttgtcaccccttcacttggctaggaaagggaattccctgacgccttgtgcttcccgggtgaggtgatgcctcaccctgctttggctcacgcttggtgcactgcaccccctgtcctgcacccactgtccgacaatccccattgagatgaacctggtacctcatttggaaatgcagaaatcacccgtcttctgtgtcgctcacactgggatctgtagactgtagcttttcctattcggccatcttggaactgctccctatttttctcatttataaatctgtgggatgattgttcccaatagccttttacctccattgatgatattgcctgaatcagtttttacgttatgaattatagggaaattgctttttaatggccatatgtaatccatatttgagatccatatttgcaaggaaagatgcattactaccactgaaagaacccactcttgccttttctttttaaaagttaatatattatttggatcatggatttgaaggtatttgagttccatgtatgcatattttccttaatgagtaattttgaaaaactgatttaatttaaaacaataagttaatgacagatctctcagatagttttagaactcctaacaatgagacacatcaaatagctatgtgatatttattgagaccctactaaggtacaaggaatcacactagataatacaatgtacttaacattaaaagttgtagtctgaaagtacttacccatttaagaagataagacacatatgcatgtaaa

SEQ ID NO: 5446 - DNA, 1400 bp, Homo sapiens
atacttaatctaaactaaatctcttcaagataagcccctctatcaatttactaatgtttacagtgattggaaagaagagaatattactttcccttttaactttttattttgaagatttaaaaatatatagaaaagctgaatgtattgtgttcatgagcacaaaaatatccttaacattttgtcacatttgctttacatatatttaaaaattttattttgtgacctgatctcactctgttgcttaggctggagtggatcaaagcttggtgcagcctctaactcctgggctcaagcaatcctcctgaatgagcctcccaggtagctgggactacaggtgtgcaccaccacctggctaatgttttaatttttaagagttggggtctcactagattgtccaggctaatcttgacctcctgggctcaagtgatcctcctgccttggcctccaaaaatgctgggaatacaggtgtgagtcactgtgcccagtccatatactctttaaaatttttaattgaatcatttgaatggaagctgtagatatcactttatctctaagttcttctagcatgaatttccaaggttaggctattcataatcacagtatcattaacacaactaagaaaaatcatatttcataattatgcctaatatggtagtccataaaagtttataaattttttaaaatccagggtccttacactatatttggttatgtcacctgagactgttttattctagaaaataaaaatctaacgttatattgctttctatgacactgattctaattttttttttattatgtactttttttcttttttttttatttccataggcgtttggggaacaggtggtatttggttacacaagtaagctctttagtggtgacttacgagattttggtacacccatcacccaagcaatatacactgaacccaattttgattctaatttttttgagggttttatatcacttgttttgtgaatatcccacattctgaatttgtccagcttttcctcattgttagattcaggttgaaccttttttggtgagaatactgcatacatgatacatacttaatcaagaaggtgactgctggatctcttcactgtaaagatatatttttctctttttttttatactttaagttctagggtacatgtgcacaacgtgcaggtttgttacatatgtatacatgtgccatgttggtgtgctgcacccattaactcgtcatttacattagatatatctcctaatgctatccctcccccctccccccaccccacaacaggccccggtgtgtgatgtcccccttcctatgtccaagtgttctcactgttcagttcccacctatgccacctatgagtgagaacatgcgatgtttggttttttgtgcttgcgat

SEQ ID NO: 5447 - DNA, 1030 bp, Homo sapiens
ggctaacatattgtctgcaatttcatgacagaccctggtgcagaaccacctagctaagtcactcctttcccacagaaactgtataataaaaccttattgtattgaaaatactaattttgggggtaattatagcaatagataatagagattttgagcagggcacggtggcacacagctgtaatcccagcactttgggaggctgaggtgggtggatcacttgagctcaggagttcgagatcagcctgggcaagatggtgaaacctcatctctacaacaacaacaacaacaacaactagctgggtgtggtggtgcacacctgtggtcccagctacttgggagactgaggtgggaggatcgctatctctaagttcttgagcctgggaggtgggggttgcagtgagctaagattgtgctaaaagtgacagaatgagatcctgccaaaaaaaaaaaaaagcaatatagattttggtatcagagtggttttgttttgttgtaacaaaaatgtagtactgtcttttgaatttggaactggctacaagcttgaaggattttgaaacattagtgaaagcatgtagagccttgagttgactgttagtagaagtttgagtagaagtagaagcctttgagaaggctttgctcgagggcttaaaggaaagtgagaaaaatattaacggaaacacgaggaaaggggatccttgttctgtggtggcagaaagtttagcaactctgtcatgtgcaataagatggaaaatagaaaaatgtaacctatgaatgaagtgatctagctaaggagatttcttatcagaatgttgaagaagctacctggtttcttcttgctacttatgtataaaatgtaaaaggagagagataagcaaaatgaaatactattaaagaaaaaagagcagggaactgtagggcttgaaaattcccagcctcttcgtatgatcattgatactaaaattaagaaatgggttctagaaaagatccaatctaggaccctcatgggaaaacttgatctacagatcaagct

SEQ ID NO: 5448 - DNA, 1034 bp, Homo sapiens
gatttttacacattgattttatatcctgagactttgctgaagttgcttattagcttaagaagcttttgggctgagatgatgggattttccagatatagggtcatgtcatctgcaaacaagacagtttgacttcctctcttcctgtttgaatacacttaatttctctcgcatgattgccttggccagaacttccaatactatgttaaataggaatagtgggagagggcatccttgtcttgtgccagttttcaagggaaatgtttccagcttttgcccattcagtaagatactggctgtgattttatcataaatggcttgtatttgagctatgttccataaatacctaatttattgagagtttttaacattaagggatgttgaattttattaaaggccttttctgagtcttttgagataatcatgtggttttgtttttagttctgttgatgtaatgaattatgtttattaatttgcatatgttgaaccagcattgcatcctgggaatgaagctgacttgatcgtggtgagtaagctttttgatgtgctgctggattcactttgccagcgttttattgaggatttttgcattaatgttcatcagggatattggctgaagttttctttttttgtttcatctctcctgggttttggtgtcaggttgttgctggcctcataaaataagttagggagaagtccctccttttcaattgttgggaatagtttcagaagaagtgatactagctcctctttgtacctctggtagaattcagctgtaaatccatctggtcctgggctttttttggttagtatgccatttattactgcctcaatttcagaacctgtattggtctattcctggattcagcttcttcctagttcagtcttgggagggtgtatgtgtccaggaatttatccatttcttctagattttctagtttatttgcatagaggggtttatagtattctctgatggtagtttgtgtttctgtggggtcagtggtgatgtcccctttatcattttttattgaatctat

SEQ ID NO: 5449 - DNA, 1069 bp, Homo sapiens
gttctcaatcagatacccaggagagacagtagcctttctagaggtcagattgaaaatttgacataccaacattctctaaaatttactcttgtcgggtattattctgaaatgtagccattttgtctggtcctaggagtactaggtttatgctcctttcttttttttttcttttttgagatgaagtctcactctgtcgcccaggatggagtgcagtggtgccatcttggctcagtgtaacctttgtctcccgggttcaagtgattctcctgcctcagcctcccaagtagctgggattacaggcacctgctacaacacctggctaatttttgtatttttagtagagatggggtttcgccatgttggctaggctgacctcgaactcttgacttcaggtgttctgcctgccttggcctcccaaagtgctgggtttacaggtgtgagccaccgcacctggctatgctcccttcttaaaaaaaagatagttttggtatcctgaagtgataatgaattatggggtacgtttggtaaattatttcaattagttttattccccttgtagaatccaaattcctgtttgtagccggtaatctgaggattgtgaatttttaatgtaacaagtcaattatataagggttttcattgttgtttttaagttacagtgtgcaatgaaacggatagtcacaggttttacagcttatgactccacctctaccaacccaaataatggtcagccaaaaatatccaaattacatagtttgaagtattaggtgttacagttacttggattgtcttaaagccacatattttaatggttattatcccttattttcttattcctctgtcactgactccttttaaaatactttatgatgcagatttgaatagttgtcattgtgatttttttaagttctgggattcatgtgcaggacatgcaggtttgttacataggtaaacgtgtgccatggtggtttgctgcacctgtcaacccatcatctaggtattaagcccaacatgcattagctatttatcctgatgctctttctcccctcatccctgacaggccacagtg

SEQ ID NO: 5450 - DNA, 1341 bp, Homo sapiens
tatttttcatcaaggggaagtggatcatcataaaggtcttcatccttgatgtcttcaagtcaagtaggctgaggaggaagagaaagggttggtattgctatctcaggagtggctgaggcagaagaagcaaatccaggtacaagtggagtcattcagttaaacccatgttattaagggtcagctgtacctatatatgtcatttgagtgtaatggttaagaggatgggactgaattccaaatcctggctttgccatttattagtgtctgtgggcacaatccttaatctgtcttaaatttctggtctgtaaaatggagatgataaaagtgcctactttatatgggtataggaatccaagctcataatgtgtgattagctcttatcagactgcatgggacatattaaatagtaaataactatttaataatctgtagaatattactagtttgacatcaactttactaatatttagtatttaactcacccattgtttacttctatatagacagtcgggatacttgcccttttaagttttgttgttgttgttgttgttgttgtttttaaaacattcttcagatgcttttacattgatcaaaaatcactgatgctgaccggaactcaaagtgataagctacttgctaactatcaatatcaatgttttcattatgatatttctctttggagaagaccagtgtaaaagaggagttgatcagtattcctttcctgtcaactgaccttcatgttgtactctcttcctcaggcttcatctttcttaatttaaaaattcatgtttgtctgtagtaattacaaaaattcattataggatttccaagttctaatagttgctttctagatttggtcttcattatgatactgctcctatatttttcaacactttttcttaaatgaaatagtactaaagcgacaagtacgtacatacatttttttcctctcactcaggattgggtaagaccaaatagtcatattttaattctttggttaaactttatgattaaaaatgcttgctgtgtaagaatactaatttccttatcttacacagttaggagctaagacatttccatctaaaattcctgggtcaagaaatagaggcttaagtgtatttttttaatgtggaatacaaaccagtagaaaagctaaaaatgaaaatgaaagtaacaaaaattgggaagaaagggcagagggtatcttaatttctcaatctttatagtaagaagtcatttgatgtggttaataggtgataaatcaagaaacatccacaatgccaaaaatattaaaagtggctgtttatgagaagtggaatggagaatgaggtcttgtgtata

SEQ ID NO: 5451 - DNA, 1029 bp, Homo sapiens
ttccaggacttcctggagatagcaaaatctgctgatgctcaaatcccttacataaaatggtgtagtatttgcatacaacctgcacacaccctcctgtatgctttaaatcatctttaaattacttacattacctaatccactgcaaatgccatgtaaagattctatgtaagtggttgttacactgtcctgtttagggaataatgacaagaaaaaagtctgtaagtgttcagtacagatgatttctttttcctgaatatttttgatctgtggttggttgaatccacagatgggaaacccacagatatggagggctgactgtattggtatcttactgtggaaatagctcagtttgtcaatgtttctcttacagcgtagtgcccagaagtgaatctgttactgcagatgtgatcggtgcagggaaaaagcacagtgagactgttagcctcttctcatagtctgtcactgtaggggccttcggtgcgattaaaggctgtagccactttttctcagttttactctttaagggaacttttattatgttttgattatataaatcatttataaagtcagtttattgtccagatgttaccagtttacattcctagcactaatatgtgaagggttctactttcttataccgtagccattgctgggtgttactctttctagtttttgccattgtattgctgttttattttacatttctttgttactgaggtttaacgttgcttaaatgaattattattcttgttcttagttaagttttaaatatgaggcctatccttaaacatgtataaattttatgttcttatttattggtaagagctttttgtgtattgagaatacctttatttgattaatcttttttgttgtgaatatttttctagtttgaatataccttttaatgttacggtatatttttgccttgtaaaattttttagttgttaagtagtttaatatgtcagacttttcccattcaaggagaccattgaggtcatacttacaaactcttcacctttttcctttgag

SEQ ID NO: 5452 - DNA, 1027 bp, Homo sapiens
tatctagtcttttttttttttttttttttttttttttttttttttttttttttagttttagggatgagtctttttatgttgctcaggctgatctccaactcctggccttcaggagtcctcatgcctcggcctcccaaaatgttgggattacaggcaggagccactgttggtggcctctctagtcttatatccattcatctgacagatttcaaaactgaggccatatttcaagttaggtatagagccaggattagtacctgagatttcttttttgctgatcttagatacttcagattttgtttctttcttgacgtttaggaatagattgaatttcttcaaaaaatattttgtatcttgttgggggggaggggctcagaagttttgggtggaaagatttaaaatcctctgagtatggaaaagggggagtatcttccaccttgtggaatcctcacactgtgtgagtaatattattcactgctctacttcccagtggagaatgcagagaagctgtacctcttgaacttgtgttttctctctttgagtaactgtttccatagtttctataccctttgacatagagaaactttctttagtttgtgttcgcattttataatcaatcacattaccttttgatgtgtgatagccctgcacctaccactaattttctgtgtttttggttatgctagtttttcggcttggcatgttttttcccctctgtctttttaagtgaaaaatctcctgtgtccttcaaagccaaattatttacccagatcatggtcttacaaaattagaatgatttcttttgtctgtataatattgcaacaatttcctgtcttgacctccttatgactttctattgccttgttattacatagatctgttatttctcctttccattgtaacctccttgacagcactgtgtctaatacaactttatattttgtacagtttgtaattttccttctgaaatacagttcaccattattttgagcacggtagtctcttaatcagtatgtgatacaaaaat

SEQ ID NO: 5453 - DNA, 1032 bp, Homo sapiens
ctctgatttctttttctgatcatatttcactggataggacctccagtacattgttgaataaaagtggtaagagtggatattttgctttattgctcatcttattgggaaagcatttattttaccacttaagtatcacattagctgttccttttctgttgctgccctttatcaggttgaaaaaattccctactattcctagttcggagagtttttatcatgagtggtggtcagttttttctaaagattttactgcttctattgaaatggtcatttgattttttccttttattctcttaatatggtgaattactttcattgctggaataaattccatttggtcatggtgtatttaaaaaaatatattaccaatttggacttactgatattttgctaagggttttttgcatttacaagagtattgatctgtaaatttcttttcagttttgatacagtggttatgctggattcataaaataggttgggaagcacttgtttctcataaggtggattgtattttttcttcagtgtttgacaaaatgtatcagtgaagccatgtgggttggagctttctttgtgggaagatttttgatgataaatgagatttctttagatacaaggctatccatattttctatttcctcttgtgtcatttttggtaaattgtattttttaaggatttccttttcatccaagatgttcgtctaagttactgggtgcaaagtttttaatattcccttatccttatttttatttttttagtagagccaagatttgctccattgcccaggctgaccttgacgtcctgggcacaagtgatcctcccaccttggcctccccgagtgctgggattacaggctcccttatcttttgaatgtctgtaagatcttagcgatatctccttattaaatcctgatattggtaaattatatacttgctctcttttttcctttgataatcttgctaggagtttattcattttatgaaatcttttttttttttttttttgagatggagtctcgctctgtcaccaag

SEQ ID NO: 5454 - DNA, 1031 bp, Homo sapiens
ttgatgaaaatgttccatgctcgtgttactttattctactttttgtattagtatctaacaaactgaactttcatgttgtattctctatgtgtaaccagttttggctttcaaataactttttcccttagttttctttgtactgactttgtcctttgaataatatttttcttatattccatgaaatggtttatttagatgaactacagtgtcggtatttggtaatgccaggataaagattttgtgtctatgagttgtctcacaagatagcttaattctgctgagcaaaatatactttagcaacataaagattgtgaacttggttatgctgtaagatgtgattcttgttatctagtcaaatttaacaagttgttacagaaaacaatttacatttttgagtgtttatctaagtccaggggtcttttcttctcctttattttgtgcatgcatgtgtttttttttgttcattttttattcacaaaatgactttagaaataagttataaaatgattaggagaaagaaaatgacagtatgatttcctgtttactacccagcagcaagctttttccatagagagtaaagagctgtggtagtgactgtgtaaaccacatggtacattagagaagctcactttgactgttgaggttatacatggagagtaaacataagaaaattaaatttattttctaatggtattgaaactctgagatttaactaatgtatttacaatactgtgaaattagcttttcttagagtttcaatgtattatttttgaaagtttcaaccaatagaaccacatggagcaaaccatcaaataagctttcatatacattttgaagttatttatagaattgtaaagttgctgttacacacacacttgctccttctcaatcaacaatcaagttttatgtattgattttgtaagttgaagtctcatgaaattcacttattaatgttagtttaaagattttctacatagatggtcaagttatctgcgaacatccacagttctgctttttcctttccaatcttt

SEQ ID NO: 5455 - DNA, 1113 bp, Homo sapiens
cacccaggctggaatgcagtggcatgatctcggctcactgcaacctccgcctcccgtgttcaagtgattcccctgcctcagcctcccgagtagctgggatgccaccatgccaggctaattttttgtattttcagtagagacgagatttcaccgtgttagccaggttggtgtcgatctcctgacttcgtgatctgcctgccttggcctcccaaagtgctgggattacaggcgtgagccaccgcacccggaccttttcctgtattttctgttttttttttttttttgagatggagtcatgttctccgtctcatcaacaacaacaacaaaaaattgatataataaagttataatatagttattactttgaatattagtcttttttcgtaagactatatgcatcaattgttgttatctccagatataatctgatttgtacttttaatgtgagtaagttgcttttcagtaaatatcttcttggaaaataaaaaaagggctgaaagataaatattcattattacgtaggataaatgctttcctaaccttggttattagtgatatattaatagtgatatcctattttttacacttttctggacagttgaaaatgataagtattaattgagataacacattaccatagtattgttggtgttagaaatggcaataaaagaaacatcacggagcaaacatcaagtaaagtattgtctgcgttttcctccttgatggatccaggacagctccttacaacttggttgcacatcagcataggaggcatctctgtatatattaaatacttactaaatgatcttactcaaagacgagcctgtaggtatgttctaggtgactctaaatctctaaattggatttcagcacttctcttaattttttcccttatagctagtggtaatatttgctatgaaggtacttagtgtattaataaagtaggaaatttagccagtttaaaaggtctaaattatagaattaaataaattgcaatagtattaattaagggcttattataatttattaactttcatttgcttaataaaatttcataaaaacctaagtagtcttttataaatgtggaaagctagttccttgataataagttaa

SEQ ID NO: 5456 - DNA, 1017 bp, Homo sapiens
agtaaatacctatcctgaaaagctgttgtcatagttaaatgtgattatggattattttttaaatgagccttattaagtcgtaacttacataataaaattaagcaatgtaaagtcataatttgatgagttttgccagagatacacagtagtgtaacaaacactctgaaaacgatatagtggttattttcattaacccgagaggttcctttgttctcccttgcagcccagtcctcatcccttaaccctggcaaccactttatctgctgttactataattttgcttttctagaatttcatataaatggaatcatgcagtacatagtttttttatggctgatttcttttacatagcataatactgttaatattcatccatgtcttgtatatcattagctttttttttatggttgagtagtagttcatggtctggatatatcacagtttatctgttaatcacttgttggacatttgggctgcttctagcttttggttagtacgaataaagagtctggacattagagtgcatgtctttgtgtaatgtgttttcatttgtcttgggtaataacttaggaatgatattgctgggtcatatggtaagtgtgtgtttaactttataagaagtatatgtttaacaaactgcccagctgttttccgatgtgcctgaccatttgtattgtcaagtgtaatttctttcaatgtcattctcctgttataaattacgaaagcattttcagatttcagtgctttataaaggcttttttgatttactttttaaacgtatttatattattctactttttttggagggggatggcaaatcacttgaacctttttgagttttactttactaatctctaaaatctgctttcacaagatggttttgagggttaaatgagatgatggttgtggatttattttgacagttctaacacaatgtaagctgttgctatctccacatatttatcaaaggtttaggatgattctttagtctgtttaattaattatatctttgaaata

SEQ ID NO: 5457 - DNA, 1292 bp, Homo sapiens
gtttctactaaaaatacaaaaattagcagggcgtggtggcgcacacctgtagtcccagctgcttgggaggctgaggcagaagaatcgcttgaacctgggaggtggaggttgcagtgagcagagatcgcgccactgtactccagcctggcgacagagtgagattccgtttcaaaaaaaaaaaaaacaaaaaatttacaattgcttctgaaattacagggatttagggcaattaactttcattctcttccctcttcacctcaaatacacatcaccaaacaaattttctctattatttgggtaggcgtgactggttttcttaagacttttttgttgcaacctcttaggttaaaagtttcactatcatttgaaattggtcacaagactagggaagtgctttcattatagaactatttaataaataagttccccagtttgaagagccagacttttatgtgaggtcaggccagttgaagacatttacaaagaattagttgtttgttattgctctgtgagttgcaagaatggaaaaaaaattctttcttcaatacttccttccaggctgagtcatcactagagagtgggaagggcagcagcagcagagaatccaaaccctaaagctgatatcacaaagtaccatttctccaagttgggggctcagaggggagtcatcatgagcgatgttaccattgtgaaagaaggttgggttcagaagaggggtaagtgctccgcaaaccaaaaataatacggttggtaagagtgctagcagtgagtggtgtcttagaagttgatcttttttctgatactgttaaactgtgtcatgctatgtctagtaagagagaaatgatatatttaacgtgtgttaggaatttgcttgttattaagggatttttttgtaattcttgattttgagcatttataatctagttaagttaggtttgactttctggtatgttgtgtgtagcgtgttacagaaagtgttgtatttttctgtggtgtctacaggttctgtaatctggagagatatctttagaatcatttaatatatgtaaaagtacgatcctatatgcatttaatcacatgtaaatatataaataagagaattaagccagtttgaatggttgtaggggaatggcttaaagtagaaaaggggaaagggttcacccgcaaactcatggattaatcccataaatttggtaagtaaagtcctgacgtaaaaggccaaatgaggacaaggattttttgtgtgtgtatgtttatgtttaatttcgtatttttatttttcatcatctagg

SEQ ID NO: 5458 - DNA, 1032 bp, Homo sapiens
ttacagggagatggtacttgaagatctttttgttttccttactagggttgaccccaatatctttgattggcttgaggttccagttttaaagtgagggaggacaaatattacatgaatgagactgttgaaatttagatgaatgtagggttttagttttcagttgtgtatttgcattgtggttttgcagcatgttttcttacagcgttttaaaaatagtccaaagtaatcctgcaaaaattgtgaaattattatttgtattcatttggttttctttccataattattactggagtgaattgttttccaatttaaaattaatttttggcttaataatcttgacatcgactctaaattgtatatgtcagagtactttaaggttttgctttggactttttaaaaattaatttcatagctgtaaaatattttaaataagattatatttaacaaatactggagtgtgaactgtgtgctggtttaattaaaaacttttaatatttacatttcattcagaaaatcactgtcagaaggaatctgttttcagaatcactgcaaatctaaataaacgtgttgattaaacttactagggaacaaatggacttagcatagagacttgtggaaagtaaggacttattttttaagctgtagcttttgatgtaaacatcagaaattttctcataaaaattcagtggaaatttccagctatctgggtttctttaaaatgaggaacctgttttacaaattgattttgtagaagtttagcctttacttaaactttgtgtattttcgtgaaaagatagctatgttttcttttgttattatatcttttagttcaagaatttgtccttgggaaggtaaggcaatcactgttaacaacttgttagttggatgcttagcatgatttgataggagcttgtctttatagtgtgattaagttttgaagtgttaaaaagaaaaatttaaaactatcttagatttgagcaacaaaatgcaagaactgaaaaaccattttcattttgagcaaatcagtcttgt

SEQ ID NO: 5459 - DNA, 1050 bp, Homo sapiens
tcgagaccaacctggccaacatggtgaaaccccatctctactaaaaatacaaaaaaaaagctggacgtggtggcacatgcctgtaatcccagctactgggaaggctgcgccaggagaattgctttaactcgggaggcagaagttgcagtgagctgagattgtgccactgcactccagcctgggcaacagtgcaagaccctgtctcaaaaaaaaaaaaaaaaaaaaaaaaaaagagaaatgtgggaatccgtaaacggagggctctgtctgaaaaaagtacataaaaataaaaataataaaagaaatgtgggaattggtaaatgggagctcattatactggttttttctacttttgatgtttacaaaatttcatcttttttttaactgtaacaaataagtctgtaaagactaatcgtgaagcagcactgtgatgtcaaagcacaaggcgcttgcaagcctgggagggggactcgagccctgtctagaggctggattttgaggagttttgggagcatcattgagctaacatgtggggactgggagggagcacttctgtggggtgaacgtaagaagaggtgggacaagggtgggtggtacaagtggaatacaacggggctgagggaggccaggctggagggcaatggtgctcaggttttatgctttaaaatacatctcattttattttattgtatttatttatttattttgagacggagtctcactctgtcgcccaggctggagtgcagtggcccaatctcagctcactgcaacctccgcctcctgagttcaagtgattctcctgcctcagcctcccgagtagctggaattacaggtgcctgccaccacaccgggctaatttttgtatttttagaagagatgggtttcaccatggtggctaggatggtctcaaactcctggcctcaagtgatccgcccaccttggcctcccaaagtgctgggattacaggcatgagccactgcacccggccagaaatatgtctcattttatagtacattgcttttccttttatattatagttataagactgta

SEQ ID NO: 5460 - DNA, 1032 bp, Homo sapiens
atctcggctcactgcaacctctgcctcctgggttcaagctattctcctacctcagcctcccgagtagctgggattagaggtgcgcgccaccacgcctggctaatttttgtatttttagtaagagacggggtttcaccatgttggccaggctggtctctcctgacctcttggtctgcccacctcagcctcccaaagtgctgggattacaggcatgagccagcatgcccggccaactgtcttttcttttaacttgcctatgtgcctttgaaatagaataaaggaaagatcattgttactttacagagtgcacatgatttgcataaatgcccaggaagatacaaagtaatatttttattccttaaagtaaatacgatgctcatctttaaatagaagataatagattacttctcaccctttctgaccctgtctttaattcttagtctgttttttttttatcctgtgacattgtctcattcacttctccctcttaataacaaatcctcatgtatctctaccaccacaaaaaatgttgtgtgtttttggggggttaaaaatggtttatggtttgtttgggttaaattacccttgagatttggagtttcctgaatatacactgggaaataattggtatagaaaatgggaaatctcactagaaaaaaatgtaagaaaaaatttttaaaaataattaagcctatttattaaagaacaaatataagatggcgagggagttaggcataacaacgtatggctgtatctagttatgtgaagtcattcttttaacagatggctttttccttgtatcgttttgttggcattgatggatatttgaaacataagaaaaagtgaagtgtgtgggatgtgtcctccgtgtaaaatctcttttgccttgtgcttcgtttccagcatgattcttgttttccaaattactagttgcccctcccagcatgatgtcaaatttagtaagcatatttgcttactgctcttggtcagcattttcttgaaatataaacagcagtgagtctaacaaaaatc

SEQ ID NO: 5461 - DNA, 1088 bp, Homo sapiens
gagtttggaaaatctagggattcaggattttcaagtatgtcaactcagatgtcccattcagtctcagggccccactttttcccaaacaaagctctgactttgccatagcaaacttgctggattgcagaattcagctttttctggagctttgcagtctgtatgattgaattctcatcttaatcattgtctttttctgctctctgctgtaggagatggaattttgtctaagttctgccagacaggtttcattatctttctccagttcgtgaatagcgttcatcaaaagccatccagttctgttgttccaccgtgctcgaatctcagtgcctcagatagaggctatccatactctatgtaccccagtggcagtcctcattgccagccagccagctagccagtgattctgcctcttagttctcattttagagctatcttcctctaaccattcctggtgccagctatcttagattgagttccctaggaaacagactccaatgtagagatttgcacataggcgggttagctcataagtgcactgagcaacaacatctgtgagggagtgggagaagcaggattaggcagagggagaaattgcactgcaatatagttgcaaaaaagccttcactgatcccatagggagctctggagctaacatagcccttgaaagttgtcccaaattaaggttaagtgcccaggttgtttctattcctacattgacaagtcaatggatatgggctgctggggggcagcagctccctttggtggaggacgagtgctgcagaggctctgaactgtgagtggttcagtaggcagagctcccacagctctcagtcttgagagaaatctgggcagagtaccatagcatccactgtattgactcaagtcaaagaaacttttctttagtacatgttcagtttccattaggggatacagagaaaatacgtagaataatgaagaaaatttcaagtagaaccctagatttctcagaagacagcaggtatgcaggccttctttctgtgaagttgctgtcatgcagatctacaatccctaatcaatagaatggaaattcaataagctttaaaactgga

SEQ ID NO: 5462 - DNA, 1062 bp, Homo sapiens
cttgtgttgccgtcactccaggttgctacaacactttaaatattcgtatgagggagtcatatttgttttacactaacaggaaactatgaaaataagtagatgagtttcagcattaaatttcttcataatccagtaagtgagtagctgctataaagagctgagtcagtaactgtacatgcattcaaggagcctctctgtataagcacttgcgttaaagctctgacctcgtttttatgtcattacagctaaaatgaataaaaagtaaaacactgagtctttgagagggcagttacagttcagatctgttagatacctataatatactcaaatgcagaattgtaacggtaattctgttttaaaatgtgttattcatgtgtctactatattttaatgtctgtttctgtttttagggacttacccttttgtaacctcttcaaattgtactgttggaggtgtttgtactggtttgggtatgccacctcaaaatgttggagaagtgtatggagttgtgaaagcttatacaactagagttggtattggtgcctttcctacagagcaagacaatgtaagcctattctaagtaaataatcaaaatgtattaaaaattcattcttcttttttttcttaatgaattattgtctcctgtgcctttcacttaatttgcaagattggtcagaacaacattttcttaaatacataattttggctggacgtggtggcccctgtctgtaatcccagtgctttgggaggcagaggcaggcagatcacttgagcccaggagttcaagatcagctggggcaacatgttgaaaccctgtcactacaaaaaatacaaacattagctgggtgtggtggcatgcacctgtagtcccagctactggggaagctgagtaggaggatcacttgagcccaggaagcagaggttgcagtgagctgagatggcaccatggcactccagccggcgcaacagagcgagactctgtctcaaaagataaaataaagtcaacaaaaataaacaaaaactatgtaattataatgatgccagaatataagagataatgaa

SEQ ID NO: 5463 - DNA, 1028 bp, Homo sapiens
tcagggagatgtgagaaagcaagcaaagtggctattacatgtaccaagtctcacaccaagcatagtataacattaatcatattaataaaacttaactataatagtaaattaaaaatttaaaaatgctgttaataaacttagctaaaggtgcacagttatgatggttttttttgtttgcagtatctaggctgtagaaagtgaaacagatattccaaggctgttctttcaaaacagtaatagtggaggcattaatgctccatgccatggtgaagtcttatgaaagtaattattctgattacagtaattgcttcctggggcctagaaaaaccaaggaaagcattagttctatgacaaggtactaaattaatttctgaaaaatatggttcacctgctttccatcaaccatttatttgtgtgttgtcagttgcttttttactttctttgagcatagaaaacaaaacatttacattcaaatgtctttttattcaaaagaaatgagaatggcgtactctaagatctcagtcttgtcatgactgatttgcaaaatcagggtttaaaacagcccttcagaactattctggcctctcaagtaactgagaaagactattgcttgggcaataaaatgggaacatgatgataaactaacccttatagctcagaattattgtttacataaagagtatttattctttttcattgctatatagtatccccttatatgaccatttcacacttttaaaaatccattcattctaccattgatgaaaatttgagttgtttccaatattgggatattacaaatactattaccctgagcattcttgtagatagatatcttttggtgtgcagtatactgatatggctttaaagatgttacttttatctaactgtgtggcactaagacagatactgcttactagatatttttaaatcacacatatttagcttctgaaatataactaattagtatgtacagcatcaaaacttttctactaacacaccagggaaacctttgatcataaaaagat

SEQ ID NO: 5464 - DNA, 1043 bp, Homo sapiens
tccctccctctctctctccctcccttccttccttccttccttctttgcttcctctttcttttctaatgtaagcatttaaaattacatgtgttcctctaacacatgtaattatgttagcgatattccgcaaatattatttttacaatcatttccattcagttcaaaataacataatttctattttaacttataagttgagtatgatgttcatgtttccaaatattggaagattttcatgatttctctctattatttataatttaattttattgtgaacagagaatatgtatgatcctaatctttgttgagacttcttttatggctcaggatgtggtctgttttggataatgtcttcatgcacttagaaagaatatgtgctctgctcttgttgagtagagtgttctttaaatgccaattaaatcaaattgtttgatagtgttgttcaaatcctatatcccaactgattttctatgtgtgtattctatcagttactcggaggagtgctgaacctccaacagtaattgtggatttgtctgtttctcttttcaagtcagtcagtttttgcttcatgcacattgaagctctgttaggtacatgtatgtttacaattctgattttgatgcattgaacctttcctcattatgaaatatcctctttggtattaacaaccatagctttttatgatcaacaggtttccctggtactgttagtaggaaagttttgatgctgtatatactaattagttacacttcagaagctaaatttgtattatgtgatttaaaagtatctaataagctatgattgttaataccacaatatcctttttatggtaatattccttattctgatatctactttgatattaatatagccactagagttgccttaagattactgtttgcatggtgtatcgctttccatcctctaataatccttagtgtatctgtgtctttagatttataatgtatttcttatagacaaaatgtaggtgggtcttgcattttattcattgtgacaatttcatcctttaattggaatgttta

SEQ ID NO: 5465 - DNA, 1025 bp, Homo sapiens
gaccatcctggctaacacggtgaaacccagtctctactaaaattacaaaaaaaaaattagccaggtgtggtggcgggtgcctgtagtcccaactacttgggaggctgaggcaggagaatggcagtgaacccgggaggtggagcttgcagtgagccgagatcacaccactgcactccagcctgggtgacagagcgagactctgtctcaaaaaaaaaaaaaaaaaaaaagaaattaagattttaaaactgctatacaaaatattcaattaaatatatctttttcccctttctaggactagaaggctgggaaaaaaggcttattatatctgacagagctcatattggtaaggtggatatattgcatttatttgtaactatctttttatctgaaatttatcaaatgaaagtatttagtaactaattttgtcttttatttttatttagcgtaagtaggatggattgtagtaattgagttctaaatacaaaaaatacttactaatttttttcttttttaacagtctaggctgaaatttacctgtttgaaaaaaaggttagctaagcaaatttataatacaagcagtatttcataagacatctctaattctatttaaaaataagccatatcaaaatgcaaagaacatttatttgtatacgtaatattcttgtaaaagtaagtgtaccgttttgcagatagagtgactctttgtgcctaaaatgtagtagttattgctttttaagtgattcagattttattcagactaacctaaatttcaaccactaccaataaatttgggattttcttctctgttatttttctctttcagaaccaatggagttgttaattagcagtgacatgatttaagagacaataaccagaaaagaaataagtaaaaaccacgtaggaaacttctctgtgattgatctgcactcttaaattgtatttaagtatgcgtgtgtcctgtggcagtagctgctctagttttaacactggcctctatttaaaaggcagcctcatcaagatactta

SEQ ID NO: 5466 - DNA, 1078 bp, Homo sapiens
aaaatctgaaatccaaaatgctcccaaaatctgaaactttttgaacacagacatgacaccacaagtggaaagttccatacccgacctcatgcagcgagtcacagtccaaacataggcacgcacacagtttattcagtgtttccaggggaaaaaaggccttctcccctttcagctttcatatatcttttccatgcacgcccagattcccccacaccagcgttcccacagagggcaataaagtggcatgtgtactagctggatgtgccaactgtggtaataaatgaaatatagaatacaggtggagactggaagcctgcttcgttgttgctgctgtttgccagctgatacagatactctggtgctgctgctgtactgcttacttaccctgaacacatttttcccactgtattggtggtatgtcatatttttgactgttaagtacttgtgtgtgaataagtgtaaggaaatgattactcatcagtagcatataaattcagagtcaagaatgttggtgttggtaaacaaccacagatggaggaggaagaggaggatggaggaggaagagaaggatggaggtagaggaggaggatgaaggaggaagaagagaaggacagaggtggaggaggatgaaggaggaagaagagaaggacagaggtagaggaggaggatgaaggaggaagagaaggaggaggaagaggaaacaaacttcgtttcatgcacaaaattatttaaaatattgtataaaattgcctcaattgatatgtaaggtgtatatgaaacataaatgaatttcatgtatatatttgagccccaccccccagagatctcattatttatatgcagatattccaaagtccaaaaaaaatctgaaatctgaaatattctggtatttggaataaaggagactcaacctgtaatacataattgaggaaaatcattagtatagttagtttccccttgaattagctcacatttaaaacactcaattactgttatagtatgttcaggtttgtttttttttttttttttttttttttttttggagacggagtctctctctgtcacccaggctgcagtg

SEQ ID NO: 5467 - DNA, 1034 bp, Homo sapiens
ccccaaaatatgcctctttggcatggtgacctaaaaggaagaagctgaggcaaaattaacagaagtagagagattgtttgggccaaacttgggggtggcagctgggcagcatagattcaagttgccctgaatatacagtctgatgagtagcggttacaagtggacttttaaagacaaagaagaggcagtttctgagttgtttctcaagaattgacattaaaacaacataaactattgattgattataccttgttctttgtatcacaaattccaggaacatgaagataaagggtaaagcagctagttaggaacaaaatggctttaaacaactaccgctaggcgtggatgtgtgggcagcaggactggtccgtactcacgtcttggtgggcctgcatacctgacatagctcagactgctctgagctacttttcttttctcatttccccactgttgatcaaaaagcttcccatgaaagtgtcggtgaccgatctctgctcaggtgagagtgatagacatccttcataactcggccctgggaaggcttattccgagatagttctcagtcaagcctctaatttatacaactgatgttgcttgttgaatcatctctagtcttcagaatttcatgcttttggttttctcagaagaagtaaaacaacgagaaatacatagtaaaaaaacctattcatttggagactcagtccaaattgtaggaaaataataaaaactcctaacaataggcagggttagaatagaataacaggtgtactatggttttcttctgaaacataacttttcccttcctgcagtccccgtttttcccaaaataaatcttactaggactgatgtacttgcaaataagtgttagtattatatttgggctgattatttgcataaagtacaagaatagtgatcagccatatagactcctttaggtcggcttcgctgaacctttcataaggaatttcaaaccagactcttaaaagcctcaaggctaagaagccaagccaaggattcactattagactgtacct

SEQ ID NO: 5468 - DNA, 1074 bp, Homo sapiens
gtgcagtggtgctatctcagctcactgcaagctttgcctcccgggttgacgccattctcccgcctcagcctcccaagtagctgggactacaggcgcccgccaccacgtctggctaattttattgtatttttagtacagatggggtttcactgtgtttgccaggatggtctcgatctcctgaccttaagatctgcctgcctcggcctcccaaagtgctgggattacaggcgtgagccaccacgcctggcccacataagctgtttttaaattggctttgatggaactctgttccatagaagaaatcttagataagactttggttttttggttacctctgtggcatacaatgattttctgtaacaattataattattaataacatatactaagtcatatcagaattataggaatttcctattattttggaacatatgccaataacacatttatacaaatacagcccaaagaaaagcaaacaccgtttcatatttgacaatgtttcctgtatgagttttgtaccaaataagccgaatttcacctttacattagtgtactattaatgttaaacccaattctttttttttcccctttttgagacagagtctggctctgttgcccaggctggagtgcagtggtgcaatcttggctcactgcaacctccacctcctaggttcaagcgtttctcttgcctcagcctcccgagtaactgggattacaggcacgtgccaccgtgcccagctaattttttgtatttttagtagagatggggtttcaccatgttggccaggctggtcttgaactcctgacctcaagtgatcctcccgccttggcttctcaaagtgttgggattacaggcgtgattcactgcacccagccaaacccaattcttaataaaaccctatagacacatttacccaattttaatgtttgaccctaaggtaagattctcataaactttttataaccctttacaatttttgttaaagagcagatcataagcagatttttgcttcaggaaaaacctgttgtgtttttttccaatgtttaatttatgcaaaaactgaataataccca

SEQ ID NO: 5469 - DNA, 1033 bp, Homo sapiens
agtggcatgtgcctgtaatcccagcttttggggagttttgggggtagctgaggcaggaggaagcattgcttgagtccaggagcttgaggatgcagtgagctatgattgtgccactgcactccagcttgggcgacagagcaagaccctgtctctaagctgaatctcatgggggcggaaatggtatcttattgctttaaacttttcctgattgctactgtggttgagcattcttccaaatgtttattgaccgttctttctctaagaattaactttgtatagcttttgtgtgtttaaaaatttggggacagcactttgggaagccaacgtgggcagatcacatgaggtcaggagtttgagaccagcctggccaacatggcgaaaccccgtctctactaaaaatacaaaaatcagccaggtatggtagtgtgcacctgcagtcccagctactcgggaggctgaggcaggagaattgcttgaacccaggaggcggaggttgcagtaagtcgactgtgccattacactccagcctgggcgacaaagtgagactctgtctcaaaataaataaataaaattggttgtgtatgtgattttcgtgttaaagtagctctttacaagcatagtttttagtccttatatatgtaacgaatattttctgcatgttcacttatttgttgtttttgtttatggggtcttttatttctcaaacgttttaactctttttttcttgcagagtcaaatatgtcaatatttccttttatggtgcttgatcttgtgtcttgcctaagtaggcattcttgactcataatgaaaacatactttcatgattttgaaaataattctatactccctttctcattcataattttgaatattttttcttctaaaaagaccaacttttggttttactattttttatttcattttctattttacattttaaaaaatttacctgatctattctattgtctttttttagctttttgaattgactacttcattcactttttctccgtcttttttggtttctaatgaa

SEQ ID NO: 5470 - DNA, 1047 bp, Homo sapiens
tttactataccaagaatttgggttttatccttaaagagataggatgggctgctacgactggatgttaggcagaggaatgaaaactgtccagtttacaggctggaaagggccagcggacaatagtggaaggtggattcaggagagtatggagacagggacaccagctagggaggctactggtgatggggaagaaatcttaacccttcatctcatcgtagtacaatcaagtcatccctcagcaattactcctatgttaaatgtgatgaatacaacgtgttaaagacaaggcacctgtcctcaacggagctttaatctctactattagcctttactaacaaattacagtgcagtgcccttagcagcaaaattttctcgccaaagattcagtattgttagcttatttcataatgacctgtagtaagtcattagtactactggtcccctcctccccctagttttggtcaattttgtcccggccacttagattaaaatgttggaggcttgggataaggactaggaacagttaaaatagtttcaagcccatgggtggcagagaagccagtgacacgtgctccgggcctaggagctccgcggagaacgtccttacccaccgcccacccgcggcgcgcgccccgccgacccccaggttaccttcctctcctcgggctcaccgggctccggcggggcggccatgaggactactccgcgactccacccgccctgcaccgccggggtcgcggaagcagaagcccggctggccgcgcccctccccgtcccgcccccacgcgccgccgcctcccgccctgttccgacgcgccggccgccattttagggaatgttcctaacgctccgcagtggccgcacggggccgggctgtcatgtcctttgttccgtcgaacgggtcacactttcttccaagctcggcacacagcctgcaggggcgggagagcggaaggagatgggttcggaaaacaaaccgactcctagattcctggcgaggtgggggcgtaaccgagccagacagccccgcttcccgcgccagccccc

SEQ ID NO: 5471 - DNA, 4813 bp, Homo sapiens
tatttaaagggacttgggcctgtggataccaaggaataactaaggtaaaactgagcataagtggcctgtccatattttgttaaatatcagattattgattagtgatcatcaacattttcccgcattcatgcagtgcggcctctgaaaacatggttgaacatcctatggaatttttttttttttttgagatggagtctcactctgtcacctaggctagagtgcaatggcgcgatcttggcttactgcaacctccgcctgccccacctcgggttcaagtgattctcctgcctcagcctcctgagtacctgggactacaggcatgcaccaccacgcccggctaatttttgtatttttagacgagacagggtttcaccctgttggccaggctggtctcaaactcctaacctcaggtgatccaactgcctcggcctcccaaagtgctgggattacaggtatgagccaccgtgcccagcagaattttttaactatttggttacgactaatttggataatgtagtgcatgcagctttgatttgtgccactaagagtgggcaaactgtcttcctttttgtgaatcagtaaaaattttccctcaacatgtgtttgacagttgtcattcactgctaagttaaggcatttggtaaaccacacagcctctgcatccttcctagcgacagccacaagaaaaggtgggcatgggagggaaaatgctcttgtgaattgaactggaggcaagctccacttttctttagaaaaagatgtagatcaaaataactaatattttcttccttgctcgatttctgtgccttccatggtacatcaaaataataggaccagtaatggccacaatcctgttgactgctgttaccttcgccccaatatttctttaagcatttcttaagcatctagcttgtgttttgttatatttaacagattttcttaaagtattgtatgaattaaaaccagaaataacttcattttcctagaaagggataatttctcccggagaataaatcctgaggatttagttagatgctgtgggtattgtattttaaataatattttaatgggagcagctgattgactttcaaatggattgtttacattaatagtaattctgcagttgttttactattgcatcagtctgccagacaagttccatgtgcatattttaattcagaactaattatacttaaaaatttaaaccctgcatacttccccaaaaatgtttagggcagttaaaaacaactcttttggaagatgactcgcattttaagaaatgagagaacactgtcaaatgatgaatgcatttaaaaaataatttgcaaagtgataaaagcccttagttttaaatcttacaatgacattagctcttacaagaactcagtaagtatttgctgttttttaatgggatagtaataaggttgaggtttttgttaagggacgtttacttatcatcaaactctatacttactactacaaggaaactccaagtacattaaacactatgttttataattctttgccacactgccaataaattctgttcacattttaaggatgacaagtccactatatgtaacacgtaagaatgctatcctggcagtagacacagggccagaataaactggcaagttttcattccacacaagtgtgggaaaaaaatgactacaacttaaactttatttacttgattgagagcttattgcacatgaaatgttttatgtggttgatcttaacttcgtttacattgacttctatgctcaagattgttcaattgctgctgctgccgttgtgttttctttcaggatcgaggtgggtaccttcatataatatcttctttttaatttcttctctggcaattctttcctggattctttgctttgcataattatacctacaatgaaaccttagaagaaaagaatatgaataaattgttaatataaagtcctacagaaattaatttatgaaatttctctaaatcacacaaaacttaaatacagatgactactaccctgagactgaaaaatatgttctaatttatagtgctatttttgggcagttttggtgtcagaatacctatcaacacattctttttttattaggaaaaaaaggatgtctacataacaatttgtaaagtgataaaatccattagtttttaagtcttctgatagcattggctattataagaaacaagtatttgctctcgtttttaacgggataataatgctatgtctacataaaatgatttctaccaccttaaatagctcactgtagaaattcatgtataaatggaaccatatagtacatacatatcatactcttaggtctggcaaatatttgaggttcatccatattttatattcactcatcagtagttgtaaacacattcttaaagtagcattttcagatatgaataagcagggatgaaataagtattagggtaagggaaatggttgaggctttcctaagtgaagtgtaaaaaccacagctttctttttaatgggatgtctaatatgcatttatctgttcaagcattttaagatttccatgaaaatgtcctgaaaaatcaagattcttcattgagggtgaggatctcccaatgggagactgctctgaaaagagcatgtgctttttgaattagataacctactataatcatggatgttcttgaatacttagcaaacataccagcatcccaaagtcaccaagataaaccctcctactccaacatcacatgatcttctaattctacctgtaaaaataagcataacaattaattagaatataattacgttatatacattactccacctagaaaaaaaaatagttcattatgtagagaaatgctttttttagtacatagagaaataaaaaatacagatactcactagtgaacaaaaaatgtccaaagccagccacaacagatcctaatgaaccatacaatattgaatgccgggcgcagggagtattttcaacatctaaaaatcctaggagcttaagggactagaatgaaaaaaaagaacctagattgagtaagaaagtatttcattttggggtgctttggcaaaaatgacaatacaccatttcttttcttgtagttgagggtttaaactagagtatgtgccacgtgacaacctaaatcagcttgcgttgtctttgtccacctttggtatgcagtctgaatctttaaatccgaaaaccttacaaattggaccggaaaacccttaagcagtagggtaacttggagctgtatcttaatttgctaatcaactgacttggaaataggataattcattttatgagctctttaaatgagtttatttgggaatatgcctatcattggaattgaaagcagcatagcttgcttcagtaactccaataatttgggaagcagaaatggaaaaagtaatttgagtcatgtttgcttatgtagtgccgtttaaaattcccctagtaattacctttcatattttattaactaggttaacatcaactgtggttgtaagagtaaatgtttcaccttaagataaacatgggcaatatattaaactctagtctgttttcttgcctgtgaagtgaggctgcacttgattatatttgattctttgttcgtaatacatgggaacgacagctaagtgtggtgaaaaacgcggggatccaaagagctggatttttatctcagatctgccgctaacttttgtatcctataggctacttttatttctatggtctcaatctataacatgaatgggttgggttaaatgactgaagttccttcaagtgctaaaattctttttctacagtcttcattggatttatgtatttcttattcctaatatgtttaactgggatgtctgtcactctagggcggcaagacagacatttaaaagtaacagtcacactgctgaactggcatttctgttaacacaaaagtttagaaaactcacggtaactgttacttgatttaagtgtatataaaattttcagtaaggctgcttttaaaaggaaccactgtccatttaaaggtttcatagttatcttcaatgggttagtattgtttggggcaggacattaaactagaagggattctataggatgaggtgatacctagaaggtaatatattgtaaggcaaaagagattagaagaaatggggaaaggatagtaaaaggcaagtcagattaaaggttgaaacatgaagatattctcaattgtatttctgcctatgtttgcttttttggctcaagcatctgttggaagagacaaaatgtgacttggttcataataaagcaagaattatttactctcggatcattctattccattttttccctctgtctggccccgttcccacccgcatgcctaacataggattgcttcaaagctttgcagtacagttcttcacattaccaagaggttgggggatttcatttagcaagacgactttttcctatcagcttgagagcccaggggacatatgatcatgtgggtagtgttatgcaggtgaggaatgctggacttagcgctccagtccaggactacctctaaactagactatttccccaaggatgggatgctggggccagaggattagtaccagtttgatctagtcttaggtgcaaagatgcaagtgtgagaccagcttgtaccacaggatagaattaagtattttctagtcccactctcagattctgatttacaatcactggaatctatgtttagaaaactctaggtggttttttctgatgactgtcatattggggaaacactgctttaggaaattttatttttttaaataaaagtaaatttgca

SEQ ID NO: 5472 - DNA, 1406 bp, Homo sapiens
agttttggttgtatcagtccagaatatgtaattttccatttccctgaaaaagacttcagaggaaatttattttccccactatacgctccagaatgtctttcggtgaaatgagagggcttgggctcttctgattctagacgtagctatcagagtttgcttaatgaaatatgggtctactcacaaataaagcaatttaatggtttcgaaagagtaggcaacttgtggtttcattaccatttctgttcatttgagaaaaatcataaaattacagaaaaggaaacattcatttcaaaaataagctttgaatttagatggtaaggcatatatgttttatttcacatgacttcagggtagaagtcaaatgaagaaacatttctatggaaacttaccctttaagaaaccagtatatgcaaagaatgattgataccccctgagggtgtgccatataataggtgactgataacatacaggatttaattcttagaataattaagaacagatatcacccattacattgacctacatttttctaaagtgaacaatagaaacctctctcagaattagtatttgcctattaatgtaatcagtgtagccttctcaacataaaaatgtccttattctagaacatggaagcgtacggcaaatgcaacggttgaaagcactgaaaaatatttgtaaaacatctgtagtgctcacattatgaactttaaatgtaatactttgaaaaccatcttcataatttttttgttctaacagcttcctttttaagaaaacattttaaaacattttaaaatggaacttaatgtgcaaaataagttgtgtaaaataccagtatttgggtggtggaggatattggtatattatattgacctgggttgatgactactggactattttaagatacctacttccaaaacttattttattctagaggaccactaaaaatcagaattacagcaatcattttaatttttctactttccttgttaaggtcttctgcttacccaaagaatagtgtatatcttaacatgacttttaaaggggtatcttgatccccatcacagatttttatctatgaatagaaggattgaaaccctatttgatccctagctctttgctgaaaagtgcataaacaggaatcctgaatttattatatagacctcctcgcattatataatcgaagcaaagggaaaccagcgatggagtagaggtacgtagactaaagagatgcttgcaaatgatggtacctagggatagtcacattttcttgttgccaaactcagacaatataatcacaagtccagagaagagctagttaattttaaattccccgaggtccttttactgagatggaaaagcacaaacagtcaaggaaaaccaaagagggaggggtgagggaaggggaa

SEQ ID NO: 5473 - DNA, 5543 bp, Homo sapiens
tgttttttctttaaaaacaaaattttctcttacagcaattctggggtcagaagccatggagtcagcattatcaccaaggatattattgaatacccaaataaaacgaactgatacatatttctccaaaaccttcacaagaagtcgactgttttctttagtaggctaactttttaaacattccacaagaggaagtgcctgcgggttccttttttagaagctttgtgggttgattttttttcttttcttttttgtacatttttaattgcagtttaaaagtgaatcgtaagagaacctcagcattgtgcacgataagagaatgtgtcagtatttcagggttctacattttatctgtaaaatgtgacttttttttttttttatcacaacagaagtaaaatgttgctttgtacctggtgtcttttattaagaatttactccccccatttctcacagagaataacagtcgggagtcattgtcacaatataatagaaatgttagcaaccagattcatgtaaggactaagtggtcctcatgaattgcattaagactctgtactgctcatattacactccatcctctctgtagtttgctgggtagtggagggggtaagctaaatcatagtttctgacaataactgggaaggttttttcttaaaataacaatggaattggtataattgggattgaaaactaaaacttggaactaagatagagaagatggagtgtatgtagaagggctgttaaaaatgtaaaacttggttgcattatttgtggaggctcaaacttgtgaaggttaataccataatttttccatttgttctgcattttgattctgaaaagaaagctggctttgcccatttcttattaaaaaaacttgttgtaaatccagttgtctaatgggatctatatgaagttagccatgtctgtatgcccttctcccacaaaatactgtataactagtgtgcttgtagtagttaactccaccatctttgtaagctaatgaaattgtgagtcacccatttatatcttaatttttaatcatgtcagttcttgaatgggtatctccttagcctgctgatttctttttctttctaaagaaagtgggtggagaaattaatttagacgtttgtttgcaataaaaagaattcattttactcttgttttgggattctcgccatcaaggttcaaaatccctttatataactcccaagaggagaaatttattaagtgtgtgctttctggacagcttattctttactctgcatagaacatttaggttttaaaaacttaaatgtatactgacaattgatacataattatgaagtaaagttgaattcttcccttcccctcccccccagacaacttttaacatatttaatgaggggaaaaggtactggctgggagaagttaacactgagtttatcatctttacagaatgctaatgctgtcctcaactgattattttatatacatatatatgatacatgaaactctgggatcagatgcttttagaagccatcatgcaagccagtcattgatgtcactgctacacaacactgctaacttgactgtagctatgtaataacattagatcccctaattgtaattatattgggtttgcacagaacactttaatcttcccctcaccaatgtgaagtgaggaatcaggagtcaaactgtagaactaaaatttgacttcagtctagcgtttccttggtgtttttaggttgctttggtaagtttaggtttgctatatttctgattgcttagaattttgttttagccctttaaaatcagatcataaatatgaattcatacttctaaggaattttcttgctataagctggagtttaggtgatgtataggttcagttgagacatttttggaacaggcaaatccttagttaacataagatatttaacagttgaagatagtgtcatggatttttatcttttttagcaagtaatgctaagaaccactggcctgagctactactcttcagtatacattattaggattgcatagacttactagaggaacagtttcaggttttgatgctaatcagtgttgtgtcctaaagttgtcctttgtgcctttaaaaagttttggatatatcttctagtttaaaattgcttattaaggaattcattttataattgcagtgggaaagtaatggtcaagtaacactaggtagactatcatgcctgtttagcccagagaatttggggggagagagaatagataaaaatggcacccagaaaaatgttaaaatctttagtcaagactagaattaatacaattgtctacacttgtatggcagaaataaccttataaagtgtttaaggaattcagagaagggaatgtaccaaataagcaacagggagaaaattaggtaagaagtaagatacgaacgagaaacctgatttattgctcatccttcccttgcctccctaatggcaagcaaaactctgaacatctgaaaaggatgtagttctggacaaatcctgactacccagaggaaactcactgtgagattgctgttgatttgaagggtgctttcactaaggttatattttaaagtagaataacacatgctgagtgtaaactggctttggattggtcagctgcagtagtacaaaaacagcatagaatttgagaaaactaaaactgctatgagatagctatgagaaaactaaaactgctatgagatagaaatgatgtaaaattatgtggaaagttttccctcatatactcacatacagcctttgaagggctctggctctgaccggttgatggccttgagcgagatgaaatcatgaaattgagtcaaatcaatttgacattgaaatgacaagaggaaactcttaaatacataaaaacaagctctcatttgcctaggatagatactgtcttaaaaataaagactgaacctagatgttctgagcactagcaacaaggtattttaacaagtttaaaggaattctctgaaaaagttataaaattattctaggaaacataaccataatagtgttttaagggactttcacctggggattttatattcatgaacagagtgtattctgtatttaaaatgtctcatttgtgggaattggatgacatgttttttgataaatttattcacaatataaattgactttttattctaggaccatgtgaataatgggttccattgcacaaatacaaatattttaatagcttcttaggcagtggtgtagacatcttggatataaataattgtagatcttgtatatttgatttttaaaaaactagaataaacagagaggcataaacatatcttagagtccaagtggtagtgtttagcattggatataataaatggatgttttacaaagtgtttccataattctcttcctatacataaatgtcttgttttcaaaagtggatggaacttggctgggtgtggtggctcacgcctgtaatcctagcactttgggaggccaaggcgggaggatcacttgagctcaggagtttgagaccatcctgggcaacatagtgagacctggtctcttgaaaaaaaaaaagtggatggaacttgtagcagagaattttatctacttctcaacctgcttcagaatacccatttgagatgttcccctggaaagatgaacacaatactgcatctgaagccatttcttcccacctaacattcttaaaatgattagagtctaaactttgtcattcattcctaattctggagctctgaggttgaggtgttcagagtttggtgaataattgggtttaagttttaacattttagtaataataaaagcaaacacatacatgttaaggcctgacaataggttgcaatacccatgcattgggactcatacccagcataaatggtgagggactgaacattagtgctttgagcaagaattggttaactacctgagatctctaaaacagtaatttgaattactaatacataaaccacaagtctcttcgaattgttaattgcctaaatttaccctaaaacttagttaacgctgcagtgcctttattaaagcttttttttgggggggggtgtgggcacagctactccataactttaaattttaaagcatgaaggtgatctagctagtgttagtgcttgagttggtagttacataggctgctcttgaatcgtcctgttttctttgcctagtattagcaccacaggtacatatttgtaaaataagcattaaaagtactttgtccagctaactcatgttggagtgacctttgtcttactaacctttgttactaaacttgttaattagaataagcccttgagaatttggaagtgagctatactactaatgtagtatatatctcttgagtgtgttggagtagatgaaaaaccaggggtccccaagggtatatttttgaaattgaacagaaacaattcatcttaatatttagttttcattatgtttagcttaatatgtgtgctagtttatttggcgtcacacttatgtcaatctcaagtcatgcagaaatagcacagtctcagaaaagaggttaggtgggaaatagatgatatgcttacattattgagcaggactatgctttcacatcctaaccaattgactaaaaatataaatgattgaagtaattttcattagttgccccaggagtctttaataatagttttaagggatagtagattggacatagatagatgggttattcataatggatattcataatggatattcataatgttaacctagaattattcagaaaatataacacctatgtagtagaatctattgattgtaagcctagtgttggtaggcaaacatgttgatgatgggccaggacatcagtaatcactacttggttaggcaagtaattaggacagggattgtaatcatgtcaatttgtagctacctaatttttattgattaggatactttatttttcatgccaggattcagcatatacttaggtcttgagcaggggctttgcttttaaagctgaatcctgggcataagaagctatgtactgtagttgaaagtgaagtaaatgtcaatgtaggctagtctctagagaaatgtcttctataaagattcagggtttttttgcaccattatgatcaccatactgtgccaatgacatagttactcatgagcatgtccagtctgtctacattaatgaaggataatgcagagatcacaggctggagagttacatctgacagagaagtgctgcactattggggcatattctttcctgctattcctttaacagttccattctgaaccttacaggaagtaaaataagttatgtctggtaaaatatacgttgcaaacacttaaagcattgccacaaattggtgacagccaagacatttttaaaaattttaaaacaccaagaatagacgtggctagtacagacaccagtttataagtgtgacattaatgctataaaagttaaagcatatatagagatacctaaagagttattggggcttatttaaatgtcaactaacaaaggaattttttgaggcagcttgtatcctg

SEQ ID NO: 5474 - DNA, 1576 bp, Homo sapiens
acaagttcaaggggaaattttaacttttgaatataggtggcaggttttaagaagcaaatggcagatactggaaaactgaacacactgttgcagagagccccccagtgtcttgggaaatttattgagattgctgcccgaaagaagcgaaattttattctggatcaggtacgctgtagctttgaaattgaaaaatattaactgataatttagatagattggtgtagaattaatgtttagggttgtaaacataaatttctttttttaaagacaaatgtgtctgctgctgcccagaggagaaaaatgtgcctgtttgcaggcttccagcgaaaagctgttgtagtttgcccaaaagatgaagactataagcaaagaacacagaagaaagcagaagtagaggggaaagacctaccagaacatgcggtcctcaaaatgaaaggcatggaattttaattctgttactgtgtgaaatcttctttttaaaagaatgtttttcctacatattctgcttgtgtaactatgttaaatctattaggacttaggcctcctgaaagttaacattttttccagcaatactgcttcaggaattaaaattgcagttgttacatatgcatatatgtttggtctgtttttatttttaggaaaatatgttactaaacctcaagaattgtcagctttaggattgtgaggattcgtggtgggtttctaaattaataatatgactttgtttcctgcaggaaactttaccctcccagaggtagctgagtgctttgatgaaataacctatgttgaacttcagaaggaagaagcccaaaaactcttggagcaatataaggaagaaagcaaaaaggctcttccaccagaaaagaaacagaacactggctcaaagaaaagcaataaaaataagagtggcaagaaccagtttaacagaggtggtggccatagaggacgtggaggattcaatatgcgtggtggaaatttcagaggaggaggcaagttaattttgagtgttctgtatttagttcaggatcgaaacaagtgataattttatagtttggatgtagctgaagtttcttcctcattaatggtatactgtcacagtaactaaagtattcatgtgatttgatattaaatacacctaggttatgttaatggttagaattaaacatttcttttgtctttaaacaattatttttggagaaaaaggaacaatctagaggaatcctaagtcttctgtataagtagggtacaatatacaatgaaactaaaacagctcttgtcttttagcccctgggaatcgtggcggatataataggaggggcaacatgccacagagaggtggtggcggtggaggaagtggtggaatcggctatccataccctcgtgcccctgtttttcctggccgtggtagttactcaaacagagggaactacaacagaggtggaatgcccaacagagggaactacaaccaggtaatgattcaagatccctggaagcatgattgataactgtagcttagtctggaaaggtgtgagctttatgttggggtgtcttagtaatccgtaaggaacatgatagg

SEQ ID NO: 5475 - DNA, 3087 bp, Homo sapiens
ttgtggagacagtctcactctgttccctaggctggattgccgtggtgcgacctaggctcactgcaacctccgcgtcctgggttcaagcgattctccttgcttcagtctctcaagtagctcggactagaggcacacactaccacacctggctaatttttgtatttttaatagagatggggtttcaccacgtaggccaggctggtcgccaactcttgacctcaggtgatccactgtctcggcgtcccaaagtgctgggattacaggcatgagccactgtgcccagcctttttttttcctttttaaaatagtgacaaggtctcaccatgttgcccaggctggtcttgaactcctaagctcaagtgatctgcccgcctgagcctctcagaatgctggaattacaggtgcttcatactgctaagttatcaaaggtacttatttttgaagcttcctgtaaattaaaagaggagcttggaaccttcattttgttgtgacagttaatcacggttgttatgttagaacttgccatgcagagctaggcgattttttatttagggtacttcatttttatcaagcatttgaaagggccaccaaagagttaaaaataaaatttggttacattactgcttttgttggtgagaaaaacattaattgtatcctttaattggctttaagttaaagactgacaacatgaactttaaaaatattaagtattcttttaaatatgggtcaaataagtatttaactctttaaatttcaagttataagcacatcagtttaaagttcttacaaatattgggggtgggctagagtgtgccttctttgtatttatagctagaggaagattagcccgtggcgcaatgaaatatgcgagagttaaggggttacctccttggtgtattattttaattatttaatgatttgactttcaggttacagagaagatcccagtaaggcatttatatacaaaagatattgacatacatgaagttcgtattggctggtcactaactacaagtggaatgttacttggtaaagcttctttttgactgatgtgggctcatgaatgttcaggagggtctgatttcagtgttttttaactagagggcattctaagccttttgtctgtttttatctattctgttaatacttcagacaggtaatattagcacatagtaggcacaggctacattttagtttttgttcctttattagaagtttatgaccaatggttgaaataaaatcttacccgtgatatgcaaatcgtcaactaatttggtctctgcgtatatatccctcctaacttccatcaattctggtacagagatagaaaagtaatagtgtcagtgacaggtgattaggttatatgcttatttctcttgtagcctacatcttaagtagtaaaatagatgagtctttggactattttaaacatctacttcatgaagattaattattttcttaggtgaagaagaattttcttatgggtattctctaaaaggaataaaaacatgcaactgtgagactgaagattatggagaaaagtttgatgaaaatgatgtgattacatgttttgctgtaagttaaagctaactttctatgtataaatggcaaagttagtagctatatctaggaactttaaagaagctttactgaggtcagttttcaatatgagcaacaaaatacaccagtccctggattagtgtaaagacttcattcagcagttgaattgggaaaacacaggacatttttgaggaactcactaattcattttgactgaaaacagtgaacatgaaattgacctagaaaattcagtctagcttctaggtcagtattgtttctggttctggagatacgtgcttcatggtttacaaccatcagatttcttaactgtgtagcccttaaaggccacctaatagttctttaacctgtagcttccacaggataagctttgctcctaattttaattcttagttttttagaaagtttaaggaagcagattttaactgttgaatttttttctgtgtaacagaactttgaaagtgatgaagtagaactctcgtatgctaagaatggacaagatcttggcgttgccttcaaaatcagtaaggaagttcttgctggacggccactgttcccgcatgttctctgccacaactgtgcagttgaatttaattttggtcagaaggaaaagccatattttccaatacctgaagagtatactttcatccagaacgtccccttagaggatcgagttagaggaccaaaggggcctgaagagaagaaagattgtgaagtaagggatttttttttttttaactgtggcatttgaatattgcttgcctggcacaaaatgacatttagaagaactagatgattagtctgtttcatttactttgtgctgtgcatattgctcttaagtaattgtttcccccttatgttgactgttaatctttccataaacaaatttttgtccgttagtgtaagggctatgaaaacttagatatttaaattggccttaacaatatttaaagaattattaggtggtgtctactgacagtgaaatgacatttcttttcttttcactaggttgtgatgatgattggcttgccaggagctggaaaaactacctgggttactaaacatgcagcagaaaatccagggaaatataacattcttggcacaaatactattatggataagatgatggtaagtaaaatgtttagggcctgatctcagtgtttaaaatagactgggagaggctgggcatggtggttcacgcctgtaatctcagcattttgagaggctgaggtggatggatcacctgaggtcaggagtttgagacccacctggccaacatggcgaagccccgttcctactaaaaatttaaaaattagctgggtgtggtagtgggttcctgtaatcccagctgctcgggaggttgaggcagggacaattacttgaacctgggaggcagaggttgcagtgagttgagatcgtgccattgtactccagtctgggcgacagagcaacactccgtctcagaaaaaaaaaaaaaagaaaagaaaaattatagaccgggaggtattc

SEQ ID NO: 5476 - DNA, 1054 bp, Homo sapiens
gcttagcttctcatgttttcttgtacaaattggctttattcagatttgtaagagtgtcaatgtaaaactctttcttactggaatatcctttacagaaggttgagatagtcatctgagcctttttaaaagaaaaaactgcaggtgaaaaaggagttagttgatgtgaaagttttagtgaaattctgggttgtataaataagttgctaggaattggcaaggtagtgaagtggtgactcacacaggtaatgtaattgttagattttttagcaaatcaggaatatgtcaatataagtacaatgttgaattcaaacaatctgttgaattaaattctgttgattagaataactctaatttaagaaaaattccaaactgtagatttatttttctctgatcagtaaaaagaaaatgagttccagcttgactttagctgttcaagtgagaagtctgaggaagtgcatgttaatgagccagtgacccataggtagctgggttaaagacactttggatttggataatccgggaagcaattaatccctaattgttgaacaggcagtcctgggtaaagaggacctaaaatgctgcactattaacagcattagacggccaggtttgtacttcatagttttaggctgtcttcttcacaagttttagaaaaagaatttaggagctagagccctggtgcaggatcaacagcagctcatactcctattttaaaataatttggtcgtggcctcccttcagttttaatgtggcactggtaaatctacctggttctggcatgcttcactttgatttcctgctatcctctactgcttgcctctaaatcaaggtaaagagcagagcaggtatgtattaatgtcacattgtcttgattattttaaatacttaaaatatacatgttaaaccttggtattagtttcacaggcagtttacttttcagtacataatttaacaggagtgacttggtgggagtggggctttaaactgaaaattggaacaacagcatgatgtggagaaaagttgtgcagcattaagaagtacatgcaaaaattaa

SEQ ID NO: 5477 - DNA, 2055 bp, Homo sapiens
gggggcggccgactcgggcccgatggaggaggaggaggccgcctcggaagacgagaacggcgacgatcagggtttccaggaaggggaagatgagctcggggacgaagaggaaggcgcgggcgacgagaacgggcacggggagcagcagcctcaaccgccggcgacgcagcagcaacagccccaacagcagcgcggggccgccaaggaggccgcggggaagagcagcggccccacctcgctgttcgcggtgacggtggcgccgcccggggcgaggcagggccagcagcaggcgggaggtaagaagaaggcggaaggcggcggaggcggcggtcgccccggggctccggcggcgggtgagtgctgcgttgtacgttgcgcgcggcgggaggcccgcgcggggtggggaccgtgccccaggcctgccggagccccgcagggggagggagccccgggcgggagggcgccgcggtgagggtgggggagggggcgcggggaatcccagattagccgagaggcctcgggctcggggcgtgtgtgtgcgcgcgcgcgtgtgtgtgtgtgtgtgtgtgtgtgtcggcggtggcagcgcctccattatgtggctcgagagccggggggagctgcagctgccgctgtagggggaggagccgcgggcgggcggcgggagggagcccggtcggcccgcggtggcgccgtcgcgctgcgtgcgcgcggtgcgggcacatgtctcggggggaggggagaggccccaggtcccggggcgggcgcgctttggcggctcctcgccgctgtattgtgcaaggagcgcaggggctcggcgtgacgtcacttccggcgggaggagccgggcggggcggggcggggggcggaagatcagtacaatgcggccgcggggagcgcgggcccgcgggggaggggagcgccgccgcgccgggctcggcccctccccctctctgcgctctcttcgggatacacgtgggcttcgggcctgggccgcgcagtttttctttggctttctcgaatcatcgaggagactggcaaaattagtaatgtctttagactgcgtcactagcgccaatcgaattcgtagttgattgttctttgaattcacatttgagtcctcggttaaaacctcagttaaaaagcaggataaagtcgagctgctttggttctcggaacggaaaagcgtttttttgttgtttagaggcttggcctttatggggctcgtgtgtgttttaggggacggcaaaacagaacagaaaggcggagataaaaagaggggtgttaaaagaccacgagaagatcatggccgtggatattttgagtacattgaagagaacaagtatagcaggtataggatgctcacctagttttactcatcccttattcgttcgttgatcggaaagctgtatcaggagacaattctgtctttcagagccaaatctcctcagccacctgttgaagaagaagatgaacacttcgatgacacagtggtttgtcttgatacttgtaagtgaagctgtttctccccaattatgaaatgcggtgatggtggtttttttttttttttttttagaagtcttaatgcttaagtgcagcaaaacttgggttagtttttttaaaagcaggaagataatggtttacattcagaacctagtagtttaatatttagcacgtcatcagttgtattaagtggattattttacaggctctaggagtttcgtatttttatgacttgaaagttctcattcttaggaaatgtaaaattaatgccagtttttgactagctaacggaaacttgtaacactacctataatttagccttacaggcttctacaataaagtaattcatttttttgtggaattatattaagtgagctatttgggctagttaaatatttactaatgacttctcccattagcacacaagtatattccctattttaaaagattgtaatattactttttcaataactgctcttttgttctcaattccagttcagtagctgctgctttaaacataagttgatttcttccaaagacctgaggcagcag

SEQ ID NO: 5478 - DNA, 1041 bp, Homo sapiens
tcagaatccaaagaaacactgcccccaccaaaatttgagacccatttacttgcatcagtgacactgaacacccagctttgtttcatttggtgcagagaaaagtgggctgtgtgcctttcctccctgcccagactcccgtgtggtggcattgaagagtgtccttcatggggggacagctgggccacataccccggcggcagcatggaggccccagggacagtggcagcagacggcttagcctcaactaatagcaaacaggactttcaacctctttctcactggcaagttttcagggtttaagacgtattgtctttagaagcgagggactctgtgtgtgctccaagaatgggttactagtccagcaggaaagaacaatgagtacaggcaggactccttccttttttagtttggaaattaactcatctttagtcattttacagtctaaaatcctttttggaataagaaacctaaaaaacctaaaaacactcaatataatcagcagtggccaatgatatagacggctgtgtttgcattgaacaaatctgcagatttgtcagccttgccttctatccaaagaaggtggctggtttacaaggacatgagatacacacccaagtgggcacaactgcatttttggtcaatacaaacagaactctgagattttatcagaaagtctgagcagcaagcgtgagacttgtaggtgcgtataagactttttgaacctccaccctggatggtagatgcggctggactgaagtcactaccgccttataagaacataatagacttcaagttgaaggctaatttatgacaaaccaggccagattcctgcctgtctaattccccacgctgcgatgcctggctgtttaccccagcttctcatgagaggagccccttctccagctcaggggttcccacctttgtcaagacaggacacatctctgcatttgcatcttaatgctcccccatgttaagaatggcaactggcgaataaacaacgggcagagtgttctgattccaaatccggaagagatgaaagag

SEQ ID NO: 5479 - DNA, 1053 bp, Homo sapiens
ttttagttccatatgaatgttaacatagttttctaattctgtgaagaatatcagtggtagtttaatgggaatagcactgaatctgtaaattactttgggcagtatggtcattttcatgatactgattcttcctatccatgagcatggaatgtttttccatttgtttatgtagtttctgatttccctgagcagtggtttgtagttctccttgaagagttccttcacttcccttgttaactgtattgccaggcattttattctgtttgtagcaattgtgaatgggagttcattcatgagttggttctctgcatgcctgttgttggtgtataggagtgcgtgtgatttttgcacattgattttgtatcctgagaatttgctgaagttgcttatcagcttaagaaacttttaggctgagacagtggggttttctagatataggatcatgccatctgcaaacaaagactatctgacttcctctcttccttcttgaataccttttatttttttctcttgtctgattgctctggccagaacttccaatactatgttgaataggagtagttgagagagggcatcctgtcttgtgctgattttcaaggagaatgcttccagcttttgcccatttagtatgacattggctgtgggtttgtcatatatggctcttattattttgaagtatgttccttcaatacttagttattgagagtttttaacatgaagcgatgtttacttttgtcaaaggccttgtctgcatctattgagataaccatgtggtttttgtttttagttctgtttgtgtgatgaattacatttactgatttgtgtgtgttgaaccaaccttgcatcacagagatgaagcctacttgactgtggtggataaactttttgatgtgctgctggatttggtttgccagtattttattgaggatttttgcattgatgttcatcagggatagcgacctgacgttttcttttttcttttctttcttctttctttctttctttttcttttttttttttttttttttgtgacagagttttgctctcgttgcc

SEQ ID NO: 5480 - DNA, 1048 bp, Homo sapiens
gattccatgtctttgctattgtgaatagtgctgcagtcaacatatgcgtgcatgtgtctttatggtagaacaatttatattcctttgggtatatactgggtatatttgctgggtcaaatggtatttctgtttttaagtctttgaggaatcaccatgctgtcttccacaatggtcgaactaatttatattcccaccaacagtgtttaagtatttctttttctctacaacttctccagggtctgttatttttttactttttagtagtagccattctaactagtatgagatgtatttcactgtggttttgatttgcatttctctaatgattagtgatgttgagttttttttcatatgattgttggccacatgtatgtcttctttagaaaagtgtctgctcatgtcctctgcccactttttactggcgttcttttttcttataacttcaagttccttcttgatgctggatagtagaccttttcagatgcatagtttgccagtattttctcccattctgtaggttgtctgtttactctgttgacagtttcttttccttgtgtctatatttttgtgaacaatctttacatgtcttttgtctatttttctctcagggtttttggtcttttttcctcccttgatctttagttcttgtatattagggagatttcccttatctgtggtatttagtctctcagtttgtcatttatttttttactttgcttttgttttttgccctgagttcctttgaatagtatttccaaaaacattaagaactctactctaggccaggcatggtgccttatgcctgtaatcccagcactttgggaggtcatggtgggaggatcattttagtgcaggagttcaagaccagcttgggcagtatggcaaaactctgtctctacaaaatagacaaaaattagccgagtgtggtggcacacacctgtagtcccagctactcaggagtctgaggcaggagatcacttgagcccaggaggcagaggttgcagtgagccaagatcatgccactgcactccatctttggccacagagc

SEQ ID NO: 5481 - DNA, 1100 bp, Homo sapiens
gatcaaatgattttcaacatggatgccaagaccactcaatggaaaaatgacagtctcttcaacaaatagtgttggggaagctgcatatccacatgcaaaagaataaagttagaccctttcttaacaccatataaagtaactcaaaatggatcaaagacctaaacatatgagcaaaagcttctactagactcttagaagaacacattaaggaaaaagcctcatgacattgggcatagtgatgatttcttggatatggcaccaaagctacaggcaacaaaagaaaatataaacaaattggacttcaccaaaattaaacacttttgggcatcaaaggataccatcaacaaaataaaaagcaacccatagaatgggatatatacatacaagggaatattattcagccttaaaaaggaataaaattgtgacacatgctacacataaatgaaccttgaaggcattatgcaaagtgaaataagcctgacagagaagaacaaatatcatattattccacttatatgaggtacctagaatagtgaaatacctagagacagaagtagaacagtggttaccagagtgtgaagggaggaggggatgggaagctattgtttaatgggtacacagtttcagtacaagatgatgcaaaagttatggctatatggatagtagtaatggttgcacaacaatgtgaatgtacttaatgctactcaagagttaaaaatagttaaaatggtaactattagtgttttgtgtactttaccatattgtttttaaaaaaagaattaatagtggaaaactttgcaaatttggcaggcgacataaacctgtagatttaagaagctaagcaaaccccgaacagtataaaccgaaagcagttcacaccaagactgtggatcatactcaaacttctgaaaactaaagacaaaaaaaaaaaaagtcctaaaagcagcaagagaaaaatgacaacttacctgtacaggaaaaacaatttgaatgacagtgattttctcatcagaaaccacagaagccagatgaaagtagcatatttttttcaagtactgaaagaaaagaactgttaacccaaagcttgggttgcccttaga

SEQ ID NO: 5482 - DNA, 1042 bp, Homo sapiens
gtgttttgcaccttaagtcatggcctttcgtttttgacagactaattggaattgtgatgctttctgcagagccagtgggagaaagagaaaaaaatgctgagccttcccagcttcaacaggtggttgcagtatgtttggagctaatagaatggagcagtgatctagctgtcctaaaagagctaactgcagatgcggagactatggctgtggagtggagtcttgatgacactctgctctcctccacactcacatgagaatatgcaagagttttgtgcgtatcaaatttcattgatctggcctcactgattttgaatttatggtactgtagagagagagctgatactcacatttccagtgtctgtagatggaaaaaaattgtttcctgtgaaaatcataaatatgtaggaaattataggggaaatgctagcccattcatgctgcctttacagcatgctatccccgctaaaaagatagttgatcatagacagttctttactgttcattaaagtaggtcctggcagggtctctatttggcagtgtcctgtaaaccattactctgtgctgttgtacagggttacaagaaatcagtctccattttattaaaaaaaaaatctagaattccaaatctccattaatttggatgtttcatcatcccaattcgtcccaataaggttttattatattttatttttgataaaatattgaaacaagagactatttgattattggacataataccttaagttccaggtaatttcatcatctgagtcctgaaaagaaactcagacttcccaacccaagaagtctgctgtctttcacattgggccatacctgtacatatccttgacctttatatttgtaggcagcaccactgtcaatgttagtggtgtaggtacatcttaccaaaaagaagtgtggcctgtaagctgtggtttgggcgatcttgtgactgtttgcaactttgctctgaagacaactaactggatccaattaataaacaattgggagatagggttactaagatagagtgatcagaaaagtg

SEQ ID NO: 5483 - DNA, 1026 bp, Homo sapiens
tcagcattataaaagcaggttttttttttttttttgtcacatattccgggcagtaattaaaggcaacagagattgccaaatgtctaggaatggatcgtggaagcttcactgtgcggagaaggtggtttgacagttcttggaatgctgattcccccattatgaagaactatcactccatctccaagaatctgtcaagagcttccagctgacacttagcaaagtcaatacctttcagtcacgttattcaattaaggaaaatatgaaacaataagcttataaaaaaaggcacatgaaacttgaatatttctttacaggattcaacattatgttgtttattctaaggatacaaaggagaccaagatcataagtttatgaaaagcaacttgtccctctaagattccatataacttctaatggtcaaaagtgactcagtgaacccttagactcagatggcaaagagtgattagatgcaaactgtaactgagatactaaagaagaaatcctgagtgctcatctagataaatgtaggctcttactgtgtgttaaaaacaaaactatattacttataatcaggtgtcgtcttctcctcaactctcaaaaaaaaaaaaacaaaaaaaacattaaatcgatgaggagcttaaaactgatgatgtcttagaatcttagaaataagacaggggtggaatgcattgtcccaaacttaactgcccatggaaccctggagttccatggaacacactttgggaaagattgctccatcctgtttgctgcctgttcatttgatgtcggataaattcccagcctgaaggctgtcagggttgcagccattaaatttcagaaggattgtgctaggcagacatcttttattgagaagatctgaacccagagacactcattatataaacgagccccgaagggtgagacccagcctcttgaccaggcattattgagccaggctttaggttagatgagacagacagatcctttctggactgaatgtggtaaaagatgccccagacctgccca

SEQ ID NO: 5484 - DNA, 1072 bp, Homo sapiens
ctcagatccagtacctggccctggagtgcactggggagatgttgtcatatattgagctaaagagcacctgaagggcatgagatttattccccgtagtgccacagacttggtcacttttgtgtctattgtaaataaactatttgtgcaaaagcagagaacatgggagacagaactgtagattgagcagacaagaaaaaagaaaagcaaaaccatcaatacttgcagcaagtcttaaccatgtcggcacgaagagtgacagcatgatcgcagagattcggagcaatggctgaggcggcaaaggccacgctgatggtccttggcccagactgtgcattggaatcacctggggagcttagaaaagataccggtatctgcctgcccccaagagatgctgatatcatttgcctcgatggaacccggtctgtattcttaacagctcctgaggtgattctaagtatatacccaccttaccttactaggcccttacagcaaagaggagagacaaagctggaggaacaacaggtctgcagtttgagggaaagtcggagccctcagtatcccttaaagcatattcctgggatgtgtgtgtatgtgggcatgtctgtgggtatctgtgtgtttgcacactcttggtagcataggggaggaagtaagctctctgcagccctctggagtgaattaaagcctctgatacatattttaaaaagcacatccagagctatccagcttccactggtgatgaagacctgggactttctcatattaagtcctctgaatgaaggtctgggtaccccttgttcttgcacagagcaagagggatttgtaagtttgtttacctccggaaaagaaatccttgcgtattttagttggtaagcatttacaaaccttaaaatcttactttcagagtagtctcaaaagttaaatggaaagtaaaacagaaatggtaaaggcaaacagctagggctgtgtaattttggcccacaatgagtatgacccaaaatgaaaacaaaaactaatcaaaaggtaatcatttcctaaatcttctgtgactggcatcgtagcattcccttgg

SEQ ID NO: 5485 - DNA, 1081 bp, Homo sapiens
gtccatagtacatgctcaaagcctttaaaacatgacatgtttgaccttacctaactttggagttctataggtctctgccacacaaagttccactaacagctcactgttgggatatggaaagaggttaaatttcacaataactatcttggggctcactatttatatagtcattaactgcgccctctagtgacattgcatccttggaagaatgaagctggggaattggtggcattggtaagctacagggagtatgtaatgcagctccgtgtattagggatggtaggtgaccaaatgtggttccactttctctttccctgctctgagaagttgctgttgggcttcaggtagacatggttgatgtagaacacatgcatttcttcactctgtctttaaaacctgctgaaatgacactcagattgggctctttctgcatgttattgattgcataccttcagagcttaaaaggtagacgtgagagagcatactttgtacttagatccatcgaatatcacacaagctaagtggtttgtcagaaagtcagttaaatttgaatagctagaagaaacattaggcatctaggtcaatatcagcattttgcagagaggagaaatgacttgtgtcactcacaaatagagtgacgctggacaatccggcccagaaaatacaagtatcataattctggggcagtgctcttttgataaagcactgtgggtactgcccttggttgtggaagcaaggttaaaaggtaaataaaggtaaaataacatcaagagggaacttttaggcctatttatttatttacattatttttcttgagagatcacttccatttatgtattcattttcaaatacttaacatactatctttgtccaatttctcaagccctttagatggtagaattctagaaatataaacaggaaaaatagatattttgggttggctttactactgaataatttagtatatttaagtgtccatttaagaccctagactgacattggccagtgcttttacaacccacttgggtgagactccatgacaggtctatcatgtaagaagagactgaagcattagctgctg

SEQ ID NO: 5486 - DNA, 1029 bp, Homo sapiens
acaaatacctgcagtggaaacgggaagaaagggctgaatgtgagagtggcacagagatatgatttgattagcacatgaatttggaataaactaccactgttttaaaatttaatttgcgacagtcttgctgtgtcaccaaggctggacagtggctgcagtggtgctatattggctcactgcaacccctgcttcctgggggctcaagcgagccttccacctcagcttcctgagtagctgtgactgctggtgcctgccagcatgctcggctaatgttttagcattttctgtagagacagggtttcaccatgttgcccaggctggtctcaaacatctaggctcaagtaatctgcccgcctcagtctcccaaagtgctaagattacaggtgtgtgagccaccacacctggcctaccactttctttatcgtccccttttcttcctgtttttctttggcctgttccttactgcctctggctcatcttgatctgcaattttattggtataattgccatattgactcaggaaactagctaccaactacattttaactagcatctttaaaacgcttgtctgagaaagagtaacaatgtttactacaagcatttataccagggcaaatggtataaggactaaggagaaatacacttttcctaattacagtgttgaccccttaggacgctgagcatttgtaatttaattacatcagtgagttaatgtggaaaagtacctgatacacttcgtgttagtttcattttgcttccaagtattactttcactttcttctttaattttttgaagtaaagaggattatcagatttaaacaaagttacacaaaatcctttttaaaattaaaataatcattgttgaaaatcttgctgaagttctgttgtgtttctgtaggtacaatgagctaaacacgttttaatcttattcagcattgaacatgcaggcttcatttgtgaaaagtcctgtgtttgtttgaagaaccaggcacaagagtaatcacagaacatacttttgaaagtacatgt

SEQ ID NO: 5487 - DNA, 1022 bp, Homo sapiens
agaacaagatcctgtctcaaaaactcgaaatgtgattctattacagctgtgctattaaaactcccacctctttaaagatggaattgagcattacccaaaaactttaaagggagaatgtctctgggctatgtaaagagctacagttccacaaaccctcctaaaagaagaccccacgtgctcaaggtccccatgaccgtgggtctgcacccagagccaggctggagggagggctgggagactcgcctgcccaagcctggtttgaagacctgatgcatggaagcaacagttctttgagaggacaaaatagaaaaagagaaatagtatggaattctttctttctgcaacaagttctatgtaatcgtttcccaagttaaaggaccccttcttacttaactctaaccataaacaactttattggagccagaacttacacatgctttcagtattaacattaaaggatcattctcagaaagtctggcttttctgtttccttctttgcttttgttatggcaggatagattggactttttcttttagatctaaaaatctttttttcacttggtaccttgagcatttgtatttataaatgtttggtttctgacagctgttttgggttcagttgtataagggaacctttaaatttaaaccgctttgcaagtgtttattcctttaaaacatttctaatgtaaatgtatatacatagaaggattctgaaaggttcttcttagtcaggtttaatctgtcctgacagctcaatgctattgaattcttaaaatgaagatgtcctggttgtctgtgcagcccagggctcccagagggctctcaggtagctagttaaccaagggacacccagcagtggcagatcctcatcctctcaaaaagggcagagcttcgggacactggtctagcccagcaggcatccccttagcactgtgtgctgttggcactacctgtcctaaaacctcaatatttatttggcctcatgtttattctttgcagacttattgagcacctactataaa

SEQ ID NO: 5488 - DNA, 1034 bp, Homo sapiens
tgcgcataccctagacacagacgtcatggtgttccgcaccagcgacgtcgcctcagtgccaattcataaatcagaacttctctgagatgcaggtcatgttctggggccgacttcttcatggaaagcacagaggcatcttgctaaagaagaggaggagatggaggaagtgtaaagctggggctggtaaataagtccctctccctcccccacgttcccctcccataggctttgaactttctgtgtttctgtaggtgtccctagtttggatggggacactggaaagctagccagctcttgttctgttgttgcacttcatttgttttgggcttttaaatactgggcttggctttatttgttggagttacgcctctactttgcatttcataggtgaagttagaggcagtattgtgtcttctgtgagttaacattcaccagatagttactgaatttttactctgtgcctagtagtcttctaggctctgggaatgcattaggtaacttgatagatgtggtcctggcctaatgagtatgtgtctatttgttcagttttcaaggggttagagcacagtgtttaaaataacacctgtatcatgaattctattctatataaacccattagcattgcatggagaaaaggtccattcatcacaacacattatacccctaatcccagcccactggttggcaggtgtgtgccattgatctcaagagtctagggaagttatgagctgccctggacaatttgtcacccatcagccaacagctttttatttagcatcctctatgtggctagcaacatatagaaaatcgtttcagaatttatgccctgccaatgctcttttcattagagcagcacaatctgtggtctttttagtcagagaagatggcttctctatatgtatttatgaaattaaacaagaaacatttcttccattgggcattcgttgttaactgccaggaggattttaggtgttgggaagttaaatattataatgggtataaaactcagtccccaaactctaatgtgccaaaaa

SEQ ID NO: 5489 - DNA, 1044 bp, Homo sapiens
aacctacgtgggtccagcctggatatccctggactgttcctcaccacccgtgtctcccctgtcccgccccccgccgcccctccagcaccccagcccctccaacatcccagtccctccaactcgctcatcagttttaaggtagaatagcaaggcgggctcttcctacaaagtagatttttactttaacaactttaaaatccactttggggctttgggggaccatgacatataggttagatttcttttagcagtcaggacgtggttgtgctttcaacacaaacatcaaatcaccgtctttaatttttaaaaccaatcctaaaacagtgtagtagaattgcttcccaaatgtcaagatcccgccttttctcccctttcaatatctagctgtcttcggagtatataaaacccattcacagagcttgggaacaattaggttctcaaactccacatctcatatggaggccaattgaagatgaacatctttaaatgtcaagaggtgtgtgttctggcctgtaaccacggctccatatgtgtgctggttctgacaggggccctaaattcagtgacgacgtctggtaatgattgagagtgactgctgactggaggtttgaaggacctggcttcccccactttttctttctttatcccttttgcagttttcataggattctctgtttgtgagaggattctgcagtaagcaggtacttgtgttttgcttttataacatcactgtaagcgtgcccctttacatgcttaaactatgcccatatgactctctgcagaaaactggacctgtttcctaggccctgctgtattccagctgagaggaggcataggacataccaagggagttttgatttgcttatcctcacatcctctaatttaatgggtagccctttatagagacaggtgactatccgcattttagatgagcaaaccaatgttcagggaagttgcccaaggtcagagagctagttaattgagaaaccaggattgaaaatcaaatccagttccaagtacagcgttggctccaccatatgtgat

SEQ ID NO: 5490 - DNA, 1069 bp, Homo sapiens
ttccttttttgtgattcacgtgtactattcattttttcattttcatggtgaatttttggtcttttccttatcgatttataggtgttctttgtgacatcaacactttgttcaacattttacggatattttcgctaggatgtcacttgtctcttgacttcagttactaacaaattttacattttttacactggaatatgactatgtaggtttttttaaaaaatgccctgtgggtttcctgtcgtgggtatctttgcttatatcaaagctatataattattttcacatttttttttttttccttctgctacagggtctcactctgttgccaggctggagtacagtggtaggatcatggctcactgtagccttgacctcccttgactcaggcgatcctcctgtctcagccttctgagtagttaggattataggcacacaccaccatgcctggctgatttttttgtgttttttgtagagatgtagtttcatcatgttgcccaggatggtcttgaactcataggctcaaatgatctactccctcagcctcccaaaatgctgggattacaggcatgagccactgtgcccaggctggtgaataatttttaagattgagatatttagtctatctagaaattcttttgtgtatgctttgaggtaatacaatccagctttcttttttccacaggtggagatgcacatatgctaatgcctttttattatacaaatggttcttttccccactcaattgaaaagtcacaattgagtgatttaacacttggcttaaagttatcataacacttggcttttttctgtgctatctggttaattgttcaacttttctgtccctgttctagaatcattctcttttcttttctttttccccatggtttgtagtaagtttggtatctggcaagacaattccactcccactattcttttgcacacttttctttactgttctgtatggacattattgcaaatgagctttaaacttactttaccaagttggagaagaaaaaataccactggattctaattggaatatatggaattaaatgtatgtattaagttt

SEQ ID NO: 5491 - DNA, 1058 bp, Homo sapiens
caccatacatgttttttaaaaagatgatttttgaagagcaaatttaggttcacagcataattgagaggaaggtacagagttttctcatatccctcctgccctcctcccccacctccaacacaaaacacacagcctccctcattctcagcatcctctaccagagtgggacatttgtgacagctgatgaacctccatggactcttcattatcaccaaagttcagcttctgttagcgttcactcttggtgttgtacattccgtgtttggacagatgaatactgatatgtatttacctttatggcattatacagaggtgctctgtgcctcacctgttcatctctctctcaactctcatccctggcaaccgctgatctttttaccgtttccatagctttatcttttccagaatgctatataatcgggatcatacagccttttcacactgccttctttcgcttagtagtatgcatttaagattgctccgtgccttttcatggcttgataacatcacttacttttagtgctaaataattgtccattgtctggatgtgcaacaatttgattatccattcaccttctgaaggccatctgggttacttccaagtttggggagttatgaataaagctgctgtcagtatccacatgcagatttttgtgtggacataagtttttaactcctttgggtaaataacaaggagtaagatttctggattgtgtgatgagtatgtttagttctgtaagaaattgccaaactgtcttcccaagtggctgtaccattttgcgttcccatcagcagtgaacgagagttcctgttattccacatccttgccagcatttggtgttatcagtgttccggatttggccattctaatatgtgcgtagtggtatcttcttgttattttaatttgcatttccctgatgacatgtgatgtggagcatcttttcatatgcgtatttgccatctgtatccatcatacatttttaatgcaaaaactatatttgaggaacagcaatgcattttaagggagagagagtgggagggaggaaagaaggaaggaa

SEQ ID NO: 5492 - DNA, 1048 bp, Homo sapiens
ggagttcgagactggcgtagggaacatagcaaaaccctgtctctactaaaaatgcaaaaattagccaggcatggtggcatgcgcctgtaatcccagctactcgggaggctgaggcaggagaattgcttgaacctgggaggtggaacttgcagtgagctgataccataccactgcactctagtctgggcagcagaggaagactgttaagagagagagagagaaagggagggagagagggaggaagggaaggagagggaggggagaggaggggaggggagggaatgggagtgagggagggaaggaaggaagggaaggaagggaaggaaggaggaaaggaaggaagggcaggcccacaagtttggcccttggctgacatttagcaactgagatttcagcaagtgtttcccccttatctggtaagagtggctgacagtgcctaaactgtttgtgtcaacattatggtttatgctgatcccctgctgtccttccaggagtccaaaattagaggctgcctacaggcgattgaactccaataaagaccctgggtactgagtctctaatgggtttccctgactgggacatttctcacgttatcacagctttttgtaggaggagtgaagtgcctcccttgtgactccctgggggaaggcccttggaggctcccactctgtttccacagacttctccccatgtgcctttccccttgctgacttcgcttggtgttgtttccctgtaataaactgcagctgtgagtacgactgtgtgccgagccctgagagtctgcctagtagataactgaaactgaaggtggtcttgggctcttcctgatgcagtcagctgtggatgtagtggtacctctcatagcataaagaacgcaaaagtggtagcaggtttgggagtgggagcagtgatgcattctgctgtaagttttccaaggtagtcacttatattgctttactagggttattttgagctagcatttattattatatgttttctatttcaaaattaagttaccaggaaaatctaatttttttcaacatacctt

SEQ ID NO: 5493 - DNA, 1061 bp, Homo sapiens
aacataaatacctgtgagtaggttaagtacacacaaggagcagattacaaaagaatgaaaacttaagcaattagcaaggattttaaaacattgatctatcaggtgttctagaaagtatttgcttctacatttcgagtttagctcaaattttactgagcagcttaaacagcactgtctgcttttgcctctaggtcacaggtcattgtcaaattcatttataagatagtttcaatctgtacttatttagcagtgcagagaattttagacacactaccttttcactgtttgtaaaaaaaaatttgaaaaataagaattgtaatgtaaaaaatattggaagactaattcttaacctacatgaagaaacagttttcagcagctttctaaatgtcttgtttacatccaaattgttgagaagctcgttgccaatctgttaattcatgaaaattcaaccttttaggatgtccactaagctgccttttattagcccggtttgaatgactgtgttcgtacttgagatgagttgaactgaattgccttaaaaattcaaatctgtaatgaattcataaggagttttcatcccaaagttcaaattggtagggcctagtaataactttagacatttatgtggtgacgagcttttaatcttccttaaggtttttaaaactctgcatgtactgtccttcttctatgttctcttgtccttttagttggttttggtagaaattttataaggcaaattaatgaaagttatctcctgagtggcagtttacaacaaaaacagatgtaaaggagaaaaaaatgaaatgaaaatttggattaaagaagaaaaaagtctcatgttagtaacagatataacaaaaagagtgaactctacgtggctataagttccttgacagcaaggactttgcctttcttaggtggaatctattgacatgtagagaaggaatgttttacttaggaggttgtcaaggaatgtctgtcaagtaggggtagaaggaaggaattaacagggctttgagaacattctcacatttgaagtgctaataatttctggtgtgaat

SEQ ID NO: 5494 - DNA, 1070 bp, Homo sapiens
tacatgacagatgttcggagccttggtaatttgccatatggtagcaagtagtagttttcagaattcttagttctgtcatatacgaatacaccttcataagggtgtgtgactctgtgtttgagaaacagcactctctttgttgcttaggctggagtgcagtggtgcgaccttggctcttggcacactgcagcctcaaacacctgggctcaggtgatcctcctgcccccgcctcctgagtagctgggactacaagtgtgcatcaccattgctggctaattttttaaatttttttgtagagatgggatcttgccatgttgctcaggctagtctcaaactcctggcctcaagagattctcctgcctctgcctcccaaagtgctgggattacaggcatgagctacctttcctggccctgcattctttataagtgtgtctacttatctccaaagaatattggagattctttttttttttaattagtcttttcttcctgttcattctgcaagggatatttatatttgaaattttggagaatgagagtttttcctttaaaattgaactatttttgaataccactccagaggatgtaggtgttgtattaactgaagtttcattctgaacatggaaagtttaattatcttgtgatattttatttgattagaactctgtagtaatcgctttgctatattgtgatgctcttgtcacagatgatatgcccggtttctgtcattaacgctgcactcttttccctataatgacatcactgattactcattttagaaccagtttccagcatatgttcttcctacttcctgcaacagtcattttgtagttactggcctggagggtaagtctttatccttccattagacgggttcagtatgagctgctattaattttaggacatgaaagagagataatcaacactgctatttctctgggaatacactgaaaattaaatatgtagactaaaaactacactgtatcttaagtcaacttctgttcattttaacagacatttagatgaattttggactctttcatttttaaaagattacagttataatgaac

SEQ ID NO: 5495 - DNA, 1040 bp, Homo sapiens
aaaggaaatggcgctgaatgtcgaaaggtcagtccctcaaagatagtttcaccaaatgagaaaatagaaactctcacaaaaaagctgaggtcaaccatgctttactctattcttaatttctactttttttttttttactgtatttgatgaataaatttccttttacctcatgtaatgtttaggtgtaaatctttcattgttgtaaaggtgttaagtcaacaattacctattaaagctttcatgaccccaaaattgaactattcagaaatacaagtgcattaagacattatttttaaaggcttaattttttttagagcagttttagtttcatagcaaaattgagagattttgaagacacaaagattccccatctgtcccctgcctgcaccttgtcttccatcttgcatattttttgaaggatcgcaatgaacaagaatgggatcaacagtggggagggccacacacctgtaatcctagcacgtttggaggccgaggtgcgcagatcgctggagccctggagttcgagactagcttgagtaacatggcaaaaccccgaaaaatacaaaaaaattagcagggtgtggtggtgtgtgcttgtagttccagctacttgggaggctgaggtgggaggatcacctgagctggggaaagttgaggctgcagtgagctgtgatcgcaccactgcactccagcctgggcaacagagtgagaccccatctcaaagcaaaacaaaacaaaaccaaaaaagcacacaacacacacacacgcacaatggagctgactaatccagatactcctttcaccccctaaagggagaaaaagagtatctgagctctactgagtttctgttgtggcgagtatggaactttgaagtcagactgcctgggcttgagggccagccccactgctcactggctgtaccatgtagaacagctgttgtactctctctaaatcccagtttgttcatctatgaactgaggattcataatatttaccttgcaggcttttataataaaaattaaataagatttctatgtaaa

SEQ ID NO: 5496 - DNA, 1038 bp, Homo sapiens
catacacgtatgtgtgtgtgtgtgtgtctgagacaattgccagactcattttaattatgaagctttaaggtgattgatattgggatcacttttgcctctgcatcttaagcaaatttatgttctttgcctaatgacttctatatttgccagcatggacttatcttgagatgactcaggaatgttactggaagtgatagttgtttggaataatttgacgcatgtccctaagatggcttacttttgcccctctgtcattttagaacatacttaagctgtgcacactgggatagcttccagaagcttaaattttaggatttaattaggtcatacaatattaattaataaaaaactttttgaattgctttgtgttcgcaggtactgtgtctgatgctccacatagaaggatgaatgggaccaaaggtcctactctaaaccattcacagaggagtagtgagacctattagaaaggatttgaaacaaaagctttcaggtagatgactgaatcactgtagctcttcagcatattgtaacagaaaaagagccagtttttgaatttttatgagcatgttatagttttaaataatgtgattttcctgaactgtaatattgatgtaattctaagtcagagaagctgttttgcatttccagctcttcctgcctacttcagcactaaccaaggtaccaaacagcagcctcttcagcatatatgctaagttttttttttttttttagcttgactgggaacattttcttggggatgtaattttagtttggtgtgatatgcaaacaagcacactttaaaaatagatattatttagcattgaagtggaaattaaaaatgagtcattaaaagcggcaggggggggaagaaaatgtggtcaatcaatttcagttgcatataggtgtagatgcaaatggaaagctgcatggttatttaaccctctaaaagtcagagggtcttatgtctcctgttcagagatgctgcttatatttaaataatatgatggacatttgggaatagactagtggttcttaact

SEQ ID NO: 5497 - DNA, 1090 bp, Homo sapiens
ttcaaaataagtctttcattgcttccagctcgactctgcttccactgaacatagaactcaatcaccagggtttaaacagcaactagtgctgtattccaggagatgtgtttactaaatggaatcttgaatgtttttacattgctttatgaattctggactgtttaataaatttaaatgaagattttttttaaatgtgtttacgttggcatgttagtcatttactgcagaattttgagtacattcaggggggctgtggttctgtaaaggacttaccacagtttctagcacactgtacatgtttaatagacattatgctgctgttgcttttgttggctaccataactgtgaaggagagaattgaggacagtaaaatgaaagtaagtaatcataggaatgcaccatctgtcaaggtgtgcttaagacattaaaattcctttgaatatccgtacaaatgataaaatttgagaaataattgtttgtctttgttttaccattaggctttttggtagctgtatcctgtcgccctgttcaacatttgctcatatcgtgtggaattcaaatcctgctagatcttttgcagagtttccagttctgttgtgtgtatacagtgacagctgagttcagtatgggttgttagagagagttgatttccaagccagatacttttgggttcaagtgactgctcccttatgtattagctccatgtgaccctaagacatttagtgtcctatgaacctttctgagaattgttctgagttttcctgacagagtcaccagcttcaagaaaaacatagcagttgaacggataggtcacctgaatgaagcctgcccacttgggtagcccctgacaatacctctactgtcataagttatataagatagtaagtattgatcctaaagatggtcctgaattgccaaggaagatagactccactctgctaagccagtgaccgtgatgtgcatttgaaacgcatttccttccagctgggcttggtggctcagttctgtgatcccagcaactcaggaggcggagaggggaggatggcttaaggccaggagttcaagagcagcctgggcaacatagtgagac

SEQ ID NO: 5498 - DNA, 1603 bp, Homo sapiens
ctttaggctggtgtattttccttatcggagaacatggcatgctttcttgtcttgccctttatctatttctcccagataggtaagctccctgagggcagggataccctctaccttcttgcgattatatcctcaacaattggcacttcgatcagcctgtgaatactcaataactgtatattagaaaataatgactgagcctgctttaagagtgctttaaaagcattagggttgaatatgagttttgaagtcagacagacctggaataaaattccttcctctactccttaatatcggtaagactctttgacctttctaagtctcacttcctcatttgtatcagattcgatcttggattgtcactaattcaataatagctactaacatatattgaccacttagtttgtgccaggcattatgcttagcagtctacatggatggtttcatttaaccttcgtgatgtctgtgagatgaatgctgtttttttaattagctgcttttctcaggtcggaaagtcaatttaagaggcttacgctacttactgaatgttacacagctagaaagtgggctgagttcacactcggtcacctgattgccaagcctgtgctcttaagatctcaggttcattgaaggcagcaacatttggtgagtatatagcagttaatcaataatcaaaacaagtaaaatgtaagaacagcactttaaaacttgtctttaatccagtgaagctcagatgcctatattgccttttaattgtctaagcacttgcacaaaattatctaatatgatcccaacaattcagtattattagtcaaatttaatatgtaataattgggagaataaaagctatttattgagctattcgctgctgacactacatacattataactaatattcctgacagccttttgagttagatgttataccgctttcattttgcaaataagaaccagaagctcagagaagtttctgaacttgatcaaggtcacattgtagctcagattaaaatttgcatctgagccaggcatgtgtagtctcagtaactcaggaggctaaagcagaaggatcccatgagcccaggaggtcaaggctatagtttactatgattgagtgtgtgaatagccactgtactccagcctgagcaacacagtgagaccttgtctaaagaaagaagaaagacaaattcagattttcaagcctgtgttctttccactatacaaaactattaggatgctttcgtgaggcggtggggaagttgactttctggaagttttttgctatccagatccgggaaacccgattcgtgcttcctgaattagctctgttatatacattgcagagtaaattctgtgtccctagtcttctgtgaagtgggaacatggtgcctgtgtccaagtgttttatctctttccattaaagtcagcagttttccaaaggtcttgtttatgaaggttattagttatgcaaaatgggcctttatggatagttctatgaaatgattccaattaaaaagaagtgggtagattgccagttggtgtcagctaattaaattatgatatgctcctgtcattaacaaggactctgactggaggaaaaataaaaaga

SEQ ID NO: 5499 - DNA, 1051 bp, Homo sapiens
tgtgagagcttgctatagctctgtgtcaggaatttgggaacagtgttgctggtaatgtggaaatcatgagagacgtcatgtggggttagacagcagccaccttcatagctccctgcctttctcacttctcctagacctcttgattctctgattcctcgggaaactcaattacctttccttgattatgcagagcaatttaactctcaaacatccttcggctctgggcccacctttgcacattcagaagctcattaatgtttcagcaccgaggaactggcaggagctttgacatttcagtgttgtcttttctccctccccaggtatctcagagtgagaaggagcagtatagagatctgctttcccactaatatgaattttcaccccaaacctcagcatcagatgaagatagtcattttcagttttaatatttttttcttctatgcatattaggtaggcaaagaaagacatagagttctctctatctagaactttgaaataaatgaaaatattagaacaaataaacacttcctataaatgtgagtgaataggacagtaggtaataaccggaatggatttggaagaatggattctgtcagctcatactcagaggcatattgttaaagcagggatatgaagacagcagcagagtacaggggttacaggcatgaatttaggagtcagatcaagctgggttataattgtgtctcctctcattcctaatctgtgaatttagctgagtcaacttaacctactgagtttacttcattatttgtaaaataaaggtaatatcaccaggtaaagtggtgcactcctgtaatcccagctcctcaggaggctgaggcaggaagatctcttgggcctagtagttgaagaccagcctgggcagcatagcaagaccacatctgggaggtggtgtggagaaaaaaaaaagtactccccccactccaggacctggcgagccctcagtaccggtggctcccatttcactcacagtcttcctgggctgtgcttccgtcgtgttccctgcactcctacaccctggtcttctgtt

SEQ ID NO: 5500 - DNA, 1034 bp, Homo sapiens
gggattatcaattgcttttatttattcagtaggctgccatgtctagaatttatttagacaattgaaggggtaacttggtgcaactctggcttaaataataatgagttgttaaaggtttttgttttgtcctccttttaaacttataaactcttaaatgatgtttggattgtaagtgatggcatgtaatttaagaagacagcattgaagttgtaaatttgctcataattgagagattgtccctaacatactcctacatgtttctactgaagagaacagtatattagcagagtgtagtaaggtttaaatcacctgatttcttaatattatgaataggtggctcttgtgttttgaaaagatttaaccaagccataaataaaatcatagatctttataccctcaggccaaatataaatcacagtggttcctgtaatatccaaacagcaggcctaaaaacaatttaaagtttcttttccttttcctttgtgtttcaccaatttgggttaaagtctatagtttggggattcagacattatgtttgtatgttatacgtgcattcttttagttcaagagtggctagcctcatgagccgtctaaggggaagagccaatattaccagtgccattaacaaacggccagtataggctggtgtggtggctcacatctgtaatcccaacactttgggaggccgaggtgagcaggttgcttgagctcaggagtttcagaccagcctggacaacatggcaaaaccctgtctctgcaaaaaatacagtaatttgccaggcatgttggcacgcacctgtgggcccagctactcaggaggctgtggtaggagagttgcctgagcccgggaggtcaaggctgcagtgagctgtgatcttgcgccactgcattccagtctgggccacagcaagaccttgtctcaaaacaaacaaaagcctatataagcattaatctcattgcttcgaatatgttttcgtgttgctgagggtcagaccatgtaagtgttttccaatgttttaaagagtcaaatgtta

SEQ ID NO: 5501 - DNA, 1034 bp, Homo sapiens
atagaccaataacaggctctgaaattgaggcaataattaatagcttaccaaccaaaaaagttcaggaccagatggattcacagctgaattctaccagaggtacaaagaggagctgttaccattccttctgaaactattccaatcaatagaaaaagagggaatcctccctaactcattttatgaggccatcatcatcctgataccaaagcctggcagagacacaacaaaaaaaagataattttagaccaatatccatgatgaatattgatgcagaaatcctcaataaaatactggcaaaccgaatccagcagcacatcaaaaagcttatccactacgatcaagttggcttcatccctgggatgcaaggctggttcaacatacgcaaatcaataaacataatccatcatataaacagaaccaaaggcaaaagccatatgattatctcaatagatgcagaaaaggccttcgacaaaattcatcagcccttcatgctaaaaattctcaataaactaggcattgatgtgacgtatctctaaataataagaactgtttatgacaaacccacagccagtatcatactgaatgggcaaaaactggaagcattccctttgaaaactggcacaagacagggatgccctctctcaccactcctgttcaacatagtgttggaaattctggccagggcaatcaggcaggagaaagaaagaaagggtattcagttaggaaaagaggaagtcaaattgtccctgttagcagatgacatgagtgtatatttagaaaaccccattgtctcagtccaaaatctccttaagctcataagcaacttcagcaaagtctcaggatacaaaatcgatgtgcaaaaatcacaagcattcttatactccaataacagacaaacagagagccaaatcatgagtgatctcccattcaaaattgcttcaaagagaataaaatacctaggaatccaacttacaaggaatgtgaaggacctgttcaaggcgaaccacaaaccactgctcaatgaaataaaagag

SEQ ID NO: 5502 - DNA, 1882 bp, Homo sapiens
tggataaaaaagatcctggtgtagggaggccctttctgctttacacctaggcagatctccaggcatttggagcacctgcttatctggttcagcagcctgagccacgcaactcttcctgtgggacagtgggaccctctctgctctaagcccaggcaggtctgcaggcatttggagcacaagcttacttgggtcagtagcccgagctgctccatccttcccgtgcagagatcctcatatagggggactctctctgctccatgcccagacagatctccaggtattcagaacacctgcttgcctggttcagcagttcgagtcaccctaccccttttatgcagagatcttggttcagggggagcccactatactacacacctaggcagagctcttctggatttggagtttagggcatcccccattcctgtgtagagaagttgatgctgaagaggtttcccattcctgtgcagagaacttgatactgaggagctccatgcctaggcatacctctgggtgcttggtagccacccattggattctctgtcagtgctggtgcttgtgcctgtatcaggggacctttaggtggacctgaccagtctggccccatgcccttggggctgagcagggagctcagaccactatgcattctatgtatcagcccattgtctgaggcaacagagaacttctgccagtaaacaaggatcaagtatccagctacattggctgcaactggctcttacctataagcatcatctactggcatgtagattgaactgcacagcctgatacaaaacctaccagaagaactggtagaaacaaaaccaaaggcagagcaaagatagaagcaaaacaaatagatcttacccaaaataatctgtagtcatacccataggaagcaggggaaagggaaagagaaggaaaaaaaacccagtaacattatagaggaagaaaagagaaagaaacatcctacctacatgaaaataattacaaaaattagaagtgctagcatcttcagctgagaaagaatcagcacaagattactggcaccattaaaaatctgaatgtagtaacaccaccaaaggattgcacaagctttccagaaatggttcctaaccaaaatggaaactcagatatgacagataagtaattcaaagcatgaattgcaaggaagctcaatgagatccaagacaagactgaaaatcagcacaaagaagcttctaaagctatccagggaatgaaggaagagataaatatcttaaaaagaaatcaaccagttctggaattgaaaaactcacttaagaaatttaaaaatacaattcaaagttttattaatggtttggaccaagtagaagaaagaatttcagaacttgaagatcagtcttttgaattaacccagtcagacaaaaaggaagaaaaaataatttaataaaataaacagtctttgagaaatatgggattatgtaaagtgaccaaaactacaaattattggcattactgagagagaaggaaaaaaataagcaacctggaaaacaaatttgaggaattaaagaaaatttccctaagcttgctagagaggtagacatccagttacaagaaatcctgagaacacctgtgagatactatacaaaatgaacatcactaagtcatatagtcaccaaactgttcaaggtcggtgctaaagaaaaatatcttaaaggcagctagagaaaaaggtcagattttgtacaacaggagccctatcaggccaacagcagacttatcagcagaaactttacaagcaaagtgagttgggggggctattttcagcatttttaaagaaaagaaattgcaaccaagagtttcatgtcctgtcaaatgaagcttcataaatgaagaagaaataaaa

SEQ ID NO: 5503 - DNA, 1069 bp, Homo sapiens
gataatataaacctggacccaaatttctatgtaaatgtttattttatagagacaagtaaattaaccaaataattcagtgaatcttcattgagaacctaatatgacctaggtactgtgctaggtgtcagagaccggctatatggtttagtagaaagagaaatggtagacgctgtgccaagcatagtgcctggaacaagcagaaagtccataagaaatatatgttaactgaaaggaagaacaaaatggaaactgtgtctgtctgagtcacccaaattagtaatgtctgtgagtttatttcctcatctgaaatgaagggtaataaaacctacctcagaaggattgttgtcaagattaaacgagttaagatatgggaatatgtccagaactgtgtttggtacatattagatgtttaataattgttagtcatagtgcgaaaaataagtaacacattattcccattctcaagcaatgtcaagatttaaaatcggattcttatccaccatatcgttagacttcagttgccttgttcttctatttgctttattctgcctgagcttcactaacaatccacagggcttttggactctacaaagaaaacacacacacaaaaatatcatacactcttctatatctactcacatctgcactcaaatttaattctgttctgtgaaaaagaaaatcggcacaaagttattgcttaatactgtcaaatactttttaaaattagttgccctctgtaacaataggagagcatggaagaataaacaagcagcagaatgatgtcagagaaactttggccacagaaggagatcagtaggtattggaatttgaacagcttatttttcacttacttctatacacaatatggatcttacagatttattgtaacttttttctccgatttaagaattgccagaaataaagctgagtgacaagaaaaggatgtgtgtacatgagacagagggcgctgtttatgcccatctgtacagaatgtcattcgttttaaatatgattttcctctttttcctcacagaaagagaaaatggtatatttctccttctatgcaaca

SEQ ID NO: 5504 - DNA, 1032 bp, Homo sapiens
aactggatatagtggctcatgcctataatcctagcactttgagaggccaaggagggaggtttgcttgaggtcaggagttcaagacaagcatggacaagaaagtgagaccctgtctattacaaaaaaaaaaaatacaaaaattagctgggtatgttggcatactcccacatcctagctacttgggaggctgaggtgggatcacttgagcccaggtgtttgaggttacagtgagctatgctcacaccctggtactccagcctggtcaacagagaaagaccctgtctcgaaaaataataaagatacactgaccagaagcttcagtctgatccattgtcaataaagaacagtgcaagagcaattaatattttacaaaatcaaaaaagaaaagctagcaggattatttcattagcatgcttctcttcatatgcacctttgatttaaaaatcactctcctgtagttttttatttcttcacaattatcagttggaaactaaatttgttcatctcgtaataagactgattctgtatgcatcatagaattgcaaacattaagtaacaaagtccatgtaaagtgtttagaacatagcacttagtaaatagtggttattattgttgtcactatccccactgtctttctttgtagatatttactttcaccttttcttctatagcagagccactaacaggtaatagagaagtaactagttagatcttaggaatttaagaagcacttcaagatgtggacagaaaaggatttggttcagattgcatactcttaggctatggagatggtacctgcaattcccatagaatgtgtataaagcactgtattgcattagaggccatgggattacaaaagctattctttgtaagacatcttagaatgttgttgatgtgtgagaataaaatcatattgaaaaaatatagaaaagttaccgtctttcatcagttctaagatgcagggtctcaccatcttgcccaggctggtcgtgaacttctgggctgaagccatcctcctaccttggcttccca

SEQ ID NO: 5505 - DNA, 1022 bp, Homo sapiens
ccagtgttcatagcagcactattcacaatgactaaaatgtagaagcaaccctcatgtcatttatctgaaaacaaaatgtggtacatacatacatatcataaaatgtcattcagcattaaaaaggagggaaatgaagacacatgctacaacatggttgaaccttgaggacattatgctaagtgaaataagccagccacattaaagacaaatactatatgactccacttttatgagatacttagaggagtcaaaatcttagagccagaaagtagaatggtgattgccagaggctagaaagaaggagggaactggagttactgtttaatgaatttagagtttcagttctgcaagatgaaaagagttacagagatggatggtggtgatggtgcacaacattatgaatggatttagtaacactaaagtgtatacttaactatggttaagatagtaaattttttatgcatattttattgcaataaaaaatgaaaacagtttcaatctaggaggattttggatgcatctatgccttgagaaatgaatggtttgatgtaaatgcatggtagcaagaataaataattatgttaattcatataatatgttatatatagttttaaagaaaattctatcactgtcttcctatgggtagggctataatgtccagttctttcagggattaagagggtagggtctgaagttaatccttgtttgtcgtaatgttattaatttattcaaccaagacttaattgagaatgacctagcaaaagagacaatctgttcaaattaaccaacttgagtaccatttcaatttgaaaactctgtctctggtgttggaggtcattcttcaggaaccaacatggttcttgggaaggtaaacctcatgtacaaagtcactcaggaataatacttgaccgctgggtgtggtggtacacgcccggaatcccagcactttgggaggctgaggcaggaatatcacttgagtccaagagtttgagaccagcctgggcaacgtaggaagacagctt

SEQ ID NO: 5506 - DNA, 1816 bp, Homo sapiens
attcaaacatgggcatcagactccactagaaacattaaataacttgccagtgttaacacggctagtgaaaaacagagttagtattcaaacatgggcatcagactccactagagacattaaataacctgccagtgttaatacagctagtaaaaaacggagttagtattcaaacatgggcatcagactccactagaaacattaaataacttgccagtgttaatacagctagtaaaaaacagagttagtattcaaacttgggcatcagactccatatctttgttgttggccaggagcaggcaaactataagcctgggtgccagaatgagccatgccgttcttgtatgtatcatgtcttgtctattgttacagcagcagagctgagtagtttcggtagagatggtttggcctgtgaaggctgccctttacagaaaacagttgcctgcccctgctcttgcgcattgtattttgtcttcactgttcctgccttcttgtctggttctaaggaatgaaaggaggacaccagctcagatttcctaaaaatgtctttatatataatttttaaaaattctcaaaaaaaatctgcctataaaagtcaaaaggatgaaaatgaatgtagcaggaacaactgtgaggtgtcccagctacagtagtcattgagtttttttgcataaaaatacgattgtaaagatagattccataaaatgtgatgttctttgtcctggtactgaccccggtagagtgttgcctatgtttttggcttaacatttatagggcattatttgaaaaactgaattctgatccaagcagagatgaggggaacaaggctgagaccttaattactggctctctcttgtcagagaaaggtgctttttgtcatattcccatgggatttgattgaccttcggacggcctgtgtctgttaggaggcatttctatttctcaggtttgagggctagtcagtaaaatttggatgaatttggactggatagagggactcaacctgaattgtgaaaatcctgagttacagaatttttaaaagttctatgttgtagttatatataataatttagctattttaaagcacaaaacaaatacgtgcacttggagaatggagtccacagcattcagcaacagtggcctgaagcagagccccagataaaacactgggttgaatgtcagtgtgctgacatcagtgttttttattatatgactgtgttctttctataaaaatcaggcattgtgagaagcccagatgtgaagcttggaacaataaaaccaaaggaagaatacatcagaggtttgtaaaacttagataatatggaagtaattaaccattagactcacgatatgttctctaacagtaaccttgaaactccatgttttgtgtctaatgacttctaggacacataaagacaaaaggaaagaataatatgctttcagagcatgaagaacttgctttagagtccctgtgtcttttgactcgaatacacaggattattatatcatgcagttatgaatctgaggaaagtatgacatgatcgataggtctaattctaaaatatctgataaagaagttaataccaaaattagtgagtttcctaactttaaagtgaaataactagataaagaagaactaaatgcaaagctagcagaaggaaggaaataataaagattagaacagtgttaactgaaatagagaataggaaagcaataggagagattagtggccgggcgcagtggttcacgcctgtaatcccagcacttaaggaggccggtggaccacgaggccaggagttcgagaccagcctggccaaca

SEQ ID NO: 5507 - DNA, 1052 bp, Homo sapiens
aactcacagttgtcatgggctgtgaaagctggcaagtgctgcagtttttgtttatgactcggttgtgtcagtgggagacagaaattctaaaagatactgcaagcagatcctggtcgatttctgtgagtgctataagttctgggagaaatgatcttgggctttagatgttatcgctgtggcaattatatttcttctggtctcacagaagcaagtgtcattaagagctttaaatatttgaaattagaaccatatgagttattttgagacctctagttactgtaattaaacatacacaggtatatatgaatgaggacgttatttatgcatgagcaagggaagcttttccatggctctgattattggcaggcaggggtggtgaggaaggaaagcaagatggacacatctgacacatttaaagcccagtttagccagagtaaggattttgaggtcctttctctttgttcagattgcgagtcgatggtaggactttgggagggatgtagcaaaggggatgtaataatggcaatagctcatgctcatgaaacacataggttccaggtaaaatgctaagctctgtgcatatgatcactcactgttacactcttggcaatgttattatctctggcttaggaaagtagatgacatgcccaagattacatttgtagaactgtggtgtgaacccaagccaccctgagtccagatcccaaaagcttgaccactgttttattttctatggggggttacatgctccctcagtaagttttagatttttaaggtgccattgttgagcagaagaacctttagagctccttatttcttttgtggcttttcctgtctcagggaaggtgcaggcagaggaagttaaattccgatcactctgaaggaagaagtttgcagcagtggtaggatgatatagaaagtattgacagtgctgagaatctgggattatttattcttgtttggagtgagagactggatcttcagtttactttagataattaacaactgcaacaaaccaggttgatttattacattttctagttagattttgt

SEQ ID NO: 5508 - DNA, 1030 bp, Homo sapiens
aattgatattcatgaaattctaaaatgattgttgttttttaaaatgttattttaggctgggcactgtggctcacgcctataatccttgcactttgggaggccgaggcaagtggatcatttgatgccaggggatcaagaccagcctggccaacatggtgaaaccctgtctttactaaaaatacaaaaaattagccggtcctggtggcgcacaactgtaatcccagctactcgggaggctgagacatgagaactgcttgaacctagggggcggaggttgcaatagccgagattccgtcactgcactccaacatggatgatagagcaagactgtctcaaaaaaaaaaacaaaaaaaaagatttttttattatatcttgaggtcatatattttccaaagatataccactacagttttataatgatggtcaatggagaaaatttctccacttgaaatttagaattcaaaagtctgattatcaaatatttgagaggcagcagacctacgtactctttagttaataaatattgagtgtctggtatgtgccatgccctatactaggtggatatacaaagatgaacaaaaacagtgtctctgtattacatttatattggcaagtcattactacatacaaatttctaaaaatttttaaaaagaccttcagggagtctgtagaaaactagcactaattttctgagagtttgagtacagaactaatgtcagtcttgtgttatactcaggaattttcattgagtgaaaacttgaggaaataatttgtatgatgaattttaaagaaattgggacttccctaagacagtggaaaatatttgtttttaagaggcattgatgggagctgtgtggtgatttgtgatttgtcagattaaaaaaaaagtgctgtgtttacctatgtaacaaatctgcacatcctgcgcatgtatcctggaacttaaaaacaaaaatttaaacaaaagtgctggcaaagcaaggttttgttattatcctttattaagctttttgtgggatggaggttttac

SEQ ID NO: 5509 - DNA, 1033 bp, Homo sapiens
ctgtctgtgttgatagtttgggaattattttgagcagagtggctccctatatttatgatatatgggaatagtccctactgaggaagtctgtgtatccacttacccggggttgccctggattatggttgtggacctccattggtgagttcatggttactgttagatgcaggtaaaatctcctctagccactagcacccacgaacagtaacatttactgagcatttaccaagtgccatgcactgcaccaagcagtcgaattatcttataaaatgtccactgagatcagtgtcagtgagtggtagatttacatacactaccagtcatgcaaagaaaatatactatcaaagtaaattttttgaaaagttaaaacctgactctcacagaaatacaaaacgaaatgccaaagatgtattaacttattaatgaggaaaccaggcagagttaatgcaggtccagagtactgaaggaactgatctttaggcattagaataagattgctagattggagacaaaactggtgacgttctgcatgcactaaaaccacagtttttagagttatcctttctgctggacagaaatctataagctaacgttgtagtttcacactatctgtgctctaacagcaagtaacaaagtcaaatgcattggcattcttctagggaattaaataatccttgggtgaagctgtgaaacagtgctctagagtaatatgagaaggccacacagctccctaatctttttcttttttcatgttttggataattttaattaacaatcgctttttaagattattattttcttttgagacgaagttttgcttttgttgcccaggctggagtgcagtggcgcaatcttggctcactgcaacctccgcctcctgggttcaagcgattctcctgcctcaccctcccaagtagctgggattacaggtgcccgccaccacacccagctaattttttgtatttttagtagagacagggtttcaccatgttggccaagctggtctcaagttcctgaccttcaggtgatccac

SEQ ID NO: 5510 - DNA, 1048 bp, Homo sapiens
tttaattttaagttcaggggtacatgtgcaggactgttttataggtaaactcgtatcatgagggtttgtcgtacagattattttgtcaccaggtgttaagcctagtacctagtagtcatttttcagcctagtacccagtagtcgtttttcctgatcctctccctcctcccatcctccaccttcaagtgcgccccagtgtctgttgttcctctccgtgtgtccatgtgttctcattatgtagccctcccttacaagtgagaacatgcggtgtttggttttctattctatgttagtttactaaggataatgacctccagttccatccatgttcttgcaaaggataccatctccttttttatggctgcttagtattccccagtgcatatgtaccacattttaaaaattcagtctaccattgatgggcatttagggtgtccatgctttttctattgtgaatagtgctgcgatgaacatagatgtgcatgtgtcttcatgataaatgatttatattcctttgggtatgtgtcagtaatgggattgctgggtcaaatggtggctctgtttgtgggtctttgatgaatcgccacactgttttccacaatggttgaactaacctacactccgaccaacagtttgtaagcgttcctttttctctgcaacctcaccaacatgttattttttgagtttttaataatagccattctgactgctatgagatggtatctctttgtggttttgctttgcatttctctaatgatcagtgatgttgagctttttttcatacacttgttggctgcatgtaacattaaaatttaatgaaccagtacgctattgaagtatttccatttttttccactgtagggaacatcagtatacatctatctttgcatatgaaactggtttttacataggataaattagtagaaatgaagttgcagaaacagattttacatttttatatatgttgccaggttgtgctctaatatatattgcatttacactccaccaaccctatacaagaacactgcttgcttactcacagccttgc

SEQ ID NO: 5511 - DNA, 1144 bp, Homo sapiens
tgggcaacatgacaaaacccatctctacaaaaaatacaaaaattgtggtggctcatgcctgtggtcccagctacttgggaggctgaggtgggaggatcgctcgagcctgggaggtagaggttgcagtgagccgagaacgtgccactgcattgcagcctgggtaatagagcgagactcggtctcaaaaaaacgaaaaacaaacaaaccaaaaccaacaatacccacttaaatctcaaggtatgcagatttgaggtgtgatagtgtttaaccttcggaagtcttttaacctgctcatcattgtccttctgcctgtctcaccagtttgttttaaaagttatttgctgatttgtctctggttacctgttgaatgacaatatggtgctgccatggctttacttgcctgcctgtgtttctgagctcatcccatattttctatataccaacaaaaatcttcatctatgtgacctggttttacttcagattcgtcgtgtgcagtgcctaaactctgccttttcttccgcacagcatactgcttctccacctttgctgtcttctctcttgacgttgcaatctcctgagccagccgtgccaggaatatcaggaatacctctgattcttcccccaaacttctgtatgccctgcttatgctgcttttaaagatctcttgactctattgttttatttttatattgttttgtcactgtcccagttattattaaaatccttccgatctcacctaaatggcctctaactcatatccttgcctctcactgtttccctgagtctcaattcatttttatattttgccattagagataattgaaaaaaaacccagatttgatcatttaatctcttgcaaaaagatgtctgttgattccctactgcctttgtatgaaatcaaggcttttaagtatggcatttgaggaccctgcaagcttcatctcatgccacgttcctggagctggctgactgcttgcatagactgcaagcagcttgagggtcgtaaccattttcctagcacctggtgtagtgacaagtagattgcggagattcagtgagtgtatgcttttcctccatggcttgcattatgctttcagtccttcccattgttgcattgcctttatgcctccattccttcacgttg

SEQ ID NO: 5512 - DNA, 1056 bp, Homo sapiens
agacactggtacctgtcttacatcaacagatcaagggacaattggcggattgatcacaagtttcctagtgccgcactcctttgttttaattttttattctaccaagtactttaatgtgtactttcacattatcttctatagtagccctctgagttatgggtatcgtgcctttgtagatgagaaagtgcgtaaggtcacactatatttaagtaaaagagacagagctttaacatggctttcttcattccagagttcttattttctgcattccaccatactgcattctgtgttatattagttctctgttagagccctaattatggaccattataagccttagcaaaatccagaatgatggaaataagaatatttgataatattctctaatactaaagtattgctctaggcaaaactgtaaattatttaatcaggatttctgctatttttatccaggtggtacatcatgccttacatacctctgtccttcatatattcaaatctaaataaatgctggtagtttgagtgggaggagggtggattattcatgtcaaatgattctgtgctgatgttgccacaactgtatgtgaaaataaagataattgacatggaatttgcatggagttaaggtaccttttgaaatctgcattctacaatcttttagtactgcatattaaaacattaattattcaggagccctccagattgagtctttatcattttcaagccattattgggtgtgcttttccctatgattctatagatacatgcatttatagatttaaacattttctatgctataaactatatatgcagtgtataagaaaatactctttggccttattaacacctctttttcttttagtgatatttatttgaccttaacatttatacttgatattaatgacataggcaaataattttaaaatgttgtttttgaataaatacttgtcaagtaaaagaaaagcattagagctacatgtgaccagacttggcagtcatgggcgctatttcaagttttgattgacatttggttttcgttttgatgcttataggaaa

SEQ ID NO: 5513 - DNA, 1029 bp, Homo sapiens
ctttatctgaactttttagttcttattttctgtctttttgccttagaggtgatgctgtttattagtttagtcatgacctagttgtaaattatttcatggaaaagtctgcttaagtttactgacttaataagaactgataattgtttgtatgtgtgtacagaatgatgtagaaaatctggtaacacacaatctcagtgattttggttttaatgctttttcatatatgtgcgtacttatgttttgataggtgtttgatcttacattgcagacaaaatttggcagaatttaattgataacatatgcatcatatttagttgtcaaaagataaaacaatatgtatttgctctttgtcaaaatccaatgtaaggtaggaaatatctggtttaacagccagcattgaacacttgaaaattatccttcagaagtttactttgagattgtgctatttattttctctttaaaaaagatattaacaaactgactgaagataagaaagagggcctcaggcaactcgtaatgacatttcaacatttcatgagagaagaaatacaggatgcctctcagctgccacctgcctttgacctttttgaagcctttgcaaaagtaagtgttaagtttgctctttgctaattccatacatcaaccatttgctccttattttgttgttagttacaaaaatgtcgagaatcttgacaggaaattcaagacccttaatgccttatattacttccttatcatagtgagtagagcatgagagaatgtattgtgtgcattgagaagggtatgaatttttctgtttgattaatattcttgttattgcctgagtatgttcattgtgaattctcaaagtgtacccttggaagaaagagtatgctttcttttctcagaagaaaatagcatatcccattattttttgtgaatggacttgtttgccgttgcattgcattcattgagttttatggtggttgtttaagcatagagcctgtctttgaaatgaaaaatttattgaaatccatttcttttcttttc

SEQ ID NO: 5514 - DNA, 1047 bp, Homo sapiens
ctagatttaataagatttaggttcaataagcttaaacttaaaggctaaaactataaaaccgagaaaacataggagaaactctttggatatggggtacataaaatttcctatgtagaacacagaaagcactaagcctccaagaaaaattgataaattgattttcatcaaaattaaacccttcagctccttggaaagacaaactacagacatggagaaaatatttgagacctctctttccccctgtttccctccttttctctttctctccctccttctctctctctcaccccaaccaagaagttgtttccagaatttataaagaatacttataattcagtagtaagaaaactgagtaaaacaggtaaaagatttgaatagatactttaagaagatatacattaaaagataatcattgtcactggtcaccagataaatgaaaattaaaaccataatgagatattactacacacccactagaaagactaaaattaaaaggactgactttgtcaagtgctggcaaggtgatggagcaactggaactcttgttcactggtggtgagaaagtaaagcgttatcattgttttgggaaagtttagtagtttgtaataatgttaaaggtgtacttactgtatgacccagcagttctgctcctagttatttacctaagagttatgaaaacttacatctacaaaaacaacttgtacataaatgttcaatgttccaaacctggaaacaagtgaaatattcatccacaggtaaatgaataaagagatgcatactgtactattacttgtccattaagaggaacaaactactgatgcatgccgcaacgttagtgaatctcaaaacactgtactgagggaatgaagccagatgaaaagaagtaagactgttctaggctagacaaaactgatcttacaattatagagacaaaaccactgagttgcctgggatggaggacttgaatgtaaggggcacaagggaacttttggggagtactaacatctgtagcttaattttggtgttggttatatggagatatatgtg

SEQ ID NO: 5515 - DNA, 1033 bp, Homo sapiens
tgtgagccaccatgcctgggccttattttttagagtttaatatcatcagcttttttccatttgaaagactctccttggttacctagaaattttattttagctttcataaaaagctttgctttgaaagtgatcactgaattaatctaaggaaatatgagtcttaagatactgtgatgatgttcagctgcctcgaatactttttaaaaagttagtatagtgttcatgatgtatgaacagtttcttttgatttatgagcttcagattttgtgaattttatgaattttgagtgtgtctgaaaaagacagtggtaggaataaagtaatttctttccacatgaatctgtttttcagtgttttccgaagaaaacatatttgtatactgtataattcatagtggttttttttttatttgcctaggataatgaaataaagtacattgggtattttattacatggctgatattgtttctcttggctgctttgtttgttttgttttctcttagaaaaatatctcaagtcttgtatctcaactacagtagcctgaaaggggcaaggaattttctattggaaatggccaggaaactatactgcatcaaaagattgaagtcataaaatagcacaattaatgaccgataccaatcataatattgtttcttaaagttgtcttaacactgaaataattttaaaaaaatggttttggatccagacacagtggcatgtgccggtaatcccagttacttgggaggctcgggcgggaggactgcttgagcccaggagtttgagaccagcctgggcaacctaacaagacaccatttcaaaaaaaataaacaaacaaataaataatggctttgaaataaaatgttgaaatgcaagtagtagctggtatagctgcgaagaatatttgtaaaaggcacttaatatactgtttcagtgtcttaagttactatcctgctagactaagctttgtgaaggcaggcactgtttctgttctgtgcttattcctcactgcctatcacagtatgtgggtaaataaa

SEQ ID NO: 5516 - DNA, 1077 bp, Homo sapiens
tgcctcagcctcccgagtagctgggactacaggcgcccgccactacgcccggctaattttttgtatttttagtagagacggggtttcaccgttttagccgggatggtctcgatctcctgacctcgtgatccgcccgcctcggcctcccaaagtgctgggattacaggcgtgagccactattttaatgtttaatattagaagtcctttaggtctttaagtttggtgatagttctgtgaccagaaatatgtcagaggaacttagaaaactcagtgtgttccaatatgacatttgctttctgtagctagcttctttccttctttgtttacatacctggatggctgaatgatctagtcgccttgcttcttgtctactaacttctctctccttggtagtagttaaaaacacacactttcaaaggagttcagtggtttctaaaattatttttatggtatagtaaataggctctcaaatttacatagagttttattgtttataaaatattttatatatattttctttttaggatttctgtaaagtagagagggcagacattattttatcctgttgtagatgaacaaataatggcttctagttaatgtaatatggtggtgacatatatagaaacatatgattttcctctcagagttaaagtatcaaataatcagcactttactttattaggaagacactaagaatattcccacaaaggttgggaccattgtactggcagtattaacaaaagcacttgacaggaggaaacagttggaggcattgtaattggaaaatgatttctatctgcagctcatatgacattttacttaaaaaaaccctagtaaatcaatgataaaaccttactcaatgaacctcagaaaacattatgctaagtgaaagaagccggacataaaagaccgcatgtcatatgattcgttatgtaaaatatccacaacaggcaaatctatatagacagaaagtagattagtggctgtgtagggctgggaggtcgagatggggtagggatagggagtaactcctaatgggcctaaaggtttctttttggggtgatgaaactgttctaa

SEQ ID NO: 5517 - DNA, 1031 bp, Homo sapiens
aatacacacaaaatggagagagcagtacctgacagatagtatttgctgttgttactgttgtcattattatttctaaccaactctgaaacctgcccactatctgggttttcttttctttttaatgcaaatctgtttttttgttatttgcaactgaaaaacaccctaactcttacactggttagttaactctgagactaatttgaattcaacttaaagataagtattaagtaactagtttgacttccttcccactgcatactttacacagtaggttaaaggaactctaaaaatgtgaaaattactattgcatagaccaattttttccaggattgaacaaatcaatccgagggtgtttacaagagctaactgaactaccttccttcccccttactttaacaaataagcactaataatggtactggctgtcaattcctacattgtcaagaggtctaaaatttttttatatttgaacatttcattgagtagataagcagatattttcagttactttcagtcatgtagatatcccccattttcatgtctgtatttggaattcctctgtaataagttaaggatttaagaatcttttaaccttttaagcatacctctaaattctaaattcttcttctgctttactttttttttctcttgagacaagatctcactgtatcacctacgctggagtgcagtgacacagtcatggctcatcgcagcctcaacctcctgggctcaagccatcctcccacctcagcttcctgagcagctgggactataggcatgcctggctgatttttaaaatttttgtagagatggagtctccctgtgttgcccaggctagtcttgaactcctgggctcaagtgatcctcccaccttggcctcccaaagtgttgcgaatacaggcatgagccacgacacctggcctgcttaatctttcttaaatgtatgtatgctcacatttatttttttttattttttttttttttgagacggagtctcgctctgtcgcccaggctggagtgcagtggcggga

SEQ ID NO: 5518 - DNA, 1048 bp, Homo sapiens
gaccaacgtggtgaaaccttgtctctaataaatacaaaaaattagctgggtgtggtggcgggtgcctgtaatcccagctacttgggaagctgaggcaggagaatcgcttgaacccgggaggtggaggttgcagtgagccgagattgtgtcactgcacttcagtctgggcgagagtgaaaactctgtctcaaaaaaaaaaaaaaaaaagaaagaaactctggcaggacccttattccctatcgtccttttcccttctactgaatgaaagcagagaaaggacaaaacaatgaccattacctttggggctctggtgaaaaccctttacacctggggaaaatagaagtaatagaagtaaacctgcccttgggggcgggagcatgttgggtcacagattggaggagactaacgaagcaggacatctaaatacatctttaccttgtggaacagaaaaagaacatgatttaggcaagacacctgcctaaataactgatcattactcttcaaaagtatcaagtgtcaaagacaaggaaagacttaggaattatgacagatcggaggagactagggaggcaggaacctagatactttctatgtattactgtggtgatgtcaatgttaagggaagctgagtgaaggggtagatgggaatcctctgtgctattattgtgacttttatgtaagtgtaaaattattttaaaatcaaaggggaaaacattgtaggccccccttttaaactgctgcctgagatagtctataagaacaaagttcttgccttcaattattggagattgaaatttgtaacttttagttcactttaggaaaattaggttctttttttgtttaagtccatgtttccatgaaggaagattaggttctttttcaactttcttctattgttgtatagtttttttttttttcaaataagaaagaatggttcatagtttttctcccgacacatttcatagcctttatattttctctctcaagtgggtgaaggaaatttgaatatgtaactactacccactgaaagcttctggtttaataattt

SEQ ID NO: 5519 - DNA, 1005 bp, Homo sapiens
aaacacttttttttgagacaaggtctcactctgttacccaggctggagtgcagtggtgcgatcatggctcactgcagccttgacctcccaagcttaagtgatcctcccatcccatcctccctggtagctgggactataggggcacgccaccactcccagctaatttttctgtttttttagtagagatgtggtctcgccacgttgcacgggctggtcttcaactcctgggctcaagtaatccgcccacccccgcctaccagagtacttagtacttctagcacatttattgtgcttctagtgtgagaatatacaactgtcttttttttcttaagagtcagtctcacccattttaagtgtagaattcagtgactgtgagaggagagaagctaaaggcacactaaggaaagaaacaggccccatgctaaaatactttgagggttaccaaaggtgataattgttggtgtgcctatgagcgtttgtctcaggagataaaatgtgctgcttctgttctaaaaaatgggccatgtcattggcctcctgggaagtattttttattgtttccaaggtgaagatacatgagaaggcttctaggcttttacataaagtccacggaaacttgaattgttggactatacagtgaatcctttgaatccatggttttcacatctgtggatgcagccaggcttggattcaaaatatttggactgggtgtggtggtgtttgcctgtagtctcatttcctagggaggctcaaatgggaggattgcttgagcccaggagtttggggccagcctgggcaacatagcaagaccttgtctcttaaaaaaataaaaataaaaaattgggaacccccccccccgaaaataacaatgtggcaataaaaatagtacaaataaaaccaatacagcataacaactatttacatagcatagtcaggggtccccagagcccgggccgaggaccggtaccactcccatggcctgtcaggaaccaggccgcacagtag

SEQ ID NO: 5520 - DNA, 1055 bp, Homo sapiens
ttgatgagtacatgagagtgcattatgctttacttctttgtatgttttagtgttttgttacagaaaatgttcaattaaaagtactttaaatacgtgtgacagaaactcacacatggagtctcaggagcccgacttctctttttaaaatgaaagagcctgggtgtgttggctcactcctgtaatcccaacgctttgggaggccaaggcaggaggatcacttgaggccaggatggtcaacatggtgtgagaccctgtctttaaaacaaggcagacacaactctgtgaatgtaaaatggttgcattgtacactttaagtgggttacttttattgtttgcaaattatagctctatgaagctgttataaaaactaaaaagaaattaaaaaaagatccttgaacttcttttagtgatacctaaaaatacacaggctgaatccaaacaagggtcgggggagtagtttctgacccacctgatgctaaacaattttttcagtatttgttgcgatatttaatgtgagactttacatgccactgttgttggtactgaagatacagcagatatttaatgtgagactttacgtgccagccactgttgttggtactgaagatacagcagagaaccacaacagacaaaaatccctgctctgggctgggtgccgtgactcaagcctgtaatcctagcattttgggaggctgaggtgggaggattgcttgagcccaggagttcacgaccagcctgggcaatatattgagaccttggctctacaaaaattttaaaaactagctgagtgtggtggcacacacctgtagttccagctacttgggaggctgaggtgggaggatcacttgagtctaggaggcagaggttgcaatgagctgagattgcgccactgcactccagcgtgggtggcagagcaagaccctgtctcaaaaaaaaaaaaaaaaaaaaaaatcccgctttttgacacatgccaaacacatcacgtgcattttaacacctaatccacaatgcctagcaggatgccagtggcaagatgtaatctcaacaaaagtgta

SEQ ID NO: 5521 - DNA, 1059 bp, Homo sapiens
cttctttttaatgaaattacctgtgtaataactacctttaatataataatttttcggtcacagatcaaatacatggatttaattgtagtttggagcccaacttttaatgagcaggatttaatgaatgaggcacttgtggaagatcagtttattacgaggtcacatgattcatgtggccaccatgcataggaaatgctaaaagggagggccaggcgtggtggctcacacctgtaatcccagcactttgggaggctgaggcatgcagatcacctgaggttgggagttcgagaccagcctgacaaacatggaggaaccctgtctctactaaaaatacaaaattagccgggcttggtggtgcatgcctgtaatcccagctactggggaggctgaagcaggagaatcacttgaacccaggaggcagaggttgtggtgagctgaggtcgcgtcattgcactccagcctgggcaacaagagtgaaactccatctcaaaaaaaaaaaaaaaagatctgagtggagcctaagttagacactgggcatggttttctgcagtagggtgaaattgcttgtaactatttttcttgtattttgagacttctgtttttttacattttctttctatagatgaacacattctttgattgtctcctggttgtttagggtggtgctcactctttcaggtactcagaacattgtatcttttatcacatttaccaccttgtattttaactttttttttttccagacagagtcttgctctgttgcccaggctggagtgcagtggtgcaatctcggctcactgcaacctccacctcctgggttcaagtgattctcttgccttagcctcctgagtagctgggacgagtagctgggattacaggtgcgcaccaccatgcctggctaatttttgtattttaagtagagatggggtttggctatattggccaggctggtttcaaactcctggcttcaagtgatccactcgcttggcctcccagagtgctgggattacaggcgtgagctaccatgcccaaccatatttcaactatttgaaccagtaa

SEQ ID NO: 5522 - DNA, 1052 bp, Homo sapiens
actctcactttggtgctttcccttgtcttatcctctttatgagttatgtgagttggggcaaactacttaacagctctgaactttgttttcttaatcttgaaccctgcctcttcagattatcctcagaattaaaagagataaaacatgtggaagtattttgtgtataacaggtactcatacttaatacgtgttctttccttgctctacttagttctcattgattgatctttttaaaagaccatttatttatttaatttgagacagggtctcactctgttgcccaggctggggtgcagtggcatgatcatggctcactgcagccttgacttcccagactcaaacgatcctcccacctcagcctccagaatagctgggaacacaggtgcctgccactatacctggctaattttttaattgtttgtagaaacagagtctcactgtgttgcccagactgatctcctgggctcaagcagtcctctccccttggcctcccaaagtgctgggagtataggtgtgagccattgagtccagccctcagcgattggtcggtggaatttaggtattattatataatttaggtcttaatttggttattaggttttattagttatttgccctgtggtcttagccttcttgaggacggagaccttgtcttatttttctgtgaatcccaagaccctagttcattgctaagtacacaaggatgttcaataaatgtctcagtgactgaaatttgcaggattatcagagcactctgtctgcagataacatctgagacattttctgagtattttttgaaactgactccttctcttgattattattaccactcttagttggtactactgattatggaagctagtaagattagggtcactggctgaattattagtatcaaatctataattctgtgtagtcaccagaaatagtatgtcacagcgaatgtttataggtggttatttaattcatctatgaaaatgacttaagtcaggcacagtggctcacgcctatactgccagcactttgggaggtcaaggtgagatcacttgagc

SEQ ID NO: 5523 - DNA, 1578 bp, Homo sapiens
aaggtttaagggtcagtagagtagaagaggctagtggagacaaggaagcacttacctctgtgaaaataatgtaaaaagacgttactgggtttacggctgattttgtaaaatatggttagcaccaggcgtaagtgaattgctgcagtgttacagactcttccttggaggccctgaaggtcaagcaactagcaaaatcatttcaaagagcagaaccttgaacgatggcttgaagtaggatttgcaacttcctgggcagtggctaatgggtctaggatttgaaataaggtggaagaattgataataatgtggtttgggaaaggactttatggatgtgactacatttttctttttaagtgggagtcataattcctgtttcttctactgcttccttttcttctgtaacgaggtttgggaaagggctttatggctgagccctggtgaaaacatttggtccatgtgaatgccacagcagagggcgttcttaatcagacaggatgacctgctttgtggatagcagtaagttgttcttcagacagcctggtgcttgctcaaaaggctcaagaacagagcaaccatggggacggggatagaggctggtgcctggaactcaacaatacagacttcccctcatgatagccatgtggcttctgctggtacagagtgcccagtttgctgccagtagtaactggtcctgattccccaaatggcaacacatcttcaggaccagccagccaccttgtgtcgggttattatggtagaactttttgtcatggaggagtcagttggaatatcaatttttttcctgtacttggatttgtcttccctgtgtgtaataccaccatctctaagatccactgagaatctttgatagagctgtgatattccccacaaggttgcctctgaccttcccagaaagaattagagcaatgggctaatgcttgtggttttgactgtttatgtttgccgatttcctcattggaagactattggtgggatgtagaccaagtctgccttctatcgaaaaagccaaaaaggctaaataccttctcaacctcccttgcagctagggtgcgggcagtgacctaagttcggtcaatctaagatgctctctgaggactttgaataaaagccagtatcacaaagaagaatggttgagagaatcactctccagcaacaaccagtttcccaaggagcagcagcagcagcagggcccagtgtctgtggtgatggtagtgcagaatccagcattatcaggcaacagaagcgatacagtccccagccccagcccctgctcttaacatactctggcatttaaggcagctggtgttatagaccagtggttctcagaccttttagtctcaggacccctttatccttttacaaattatcaaaatggatttgatagggatttaaaaaacgttattgagagtgctgatgatgttttgtttatgtgggttttatctatttatatttattgcataaaaattaaaactaagttttgaaaatacctatttaaacataaatttaaggcagggcgtggtggctcacacctgtaattccagcactttgggaggccga

SEQ ID NO: 5524 - DNA, 1033 bp, Homo sapiens
gggcagcggggggacagaggtagggaaaacagattgtgagaaatatgtgttctgatctttcttggctggctaaagttctagggttagggtggggatgttaaatgggttgaggggacggtcagcagtagaaggccttttgctctgctccttatgtggaatcttgagaggagatgttatgcaggttagtgataggccaacacgggcctatagcacagcagtggtagaaggaagtggctagatagttgagtttgtggtaccaggggattctgaaatgctctcataccactgtgaaggaggtggaggagcttattggcctggtggaacagctggcgtcatgacaaaagactgtgtgactatagactgaatgtcaggatcacagactccagggatgagagccagcatgacatcctaaaagatgagatgggaccagttcagccataggacctgattacctccttgcagcagagaccagtgaggatccagagaaacaacacagatccaaggtcttcttgccactatttcttctaggatgtccgataagaccttggagggaaatctacccgaaagcagccatttaaaccagcccgggtaaggagttaaacaaagtctgagtattaactggaagagattgagatattgtttgacaagttttaaatttcctggatatttattagagtagatattcatgaggaatattagattaattatagaaaaaatggcgcatattcaggagacagattagatgagttatagaagataaagcaggctgggcatggtggctcatgcctgtagtcccagcactttgggaggtcgaggcaggtggatcgcttgagcccataagttcaagatgagcctgtgcgacatggcaaaaccctgtctctactaaaaatacaaataattacctgggtgcatgcctgtagtcccagctactcagaaggctgaggtgggagaatcaattgagcccaggaggtggaggttgcagtgagtggtgatcacgccactgcactccagcctgggtgacagagtgagaccc

SEQ ID NO: 5525 - DNA, 1064 bp, Homo sapiens
tgatatctgatatcaactctatttttcttttttttaagaatcatatgcttatatatacacctactgtgtacccacaaaaaacatttttatatatacacctactgtgtacccacagaaaacatttttatatatacacctactgtgtacccacaaaaaacatttttatatatacacctactgtgtacccacaaaaaacatttttttaaagaatcatgctcgaaaagcagaatttgatagaactcttgactatcccagtagctgaagtaacatgaactgtgattttatttcaagggtttgtaaatgatattcttgaaataacaaatgcaaacatctgtagagcacttaccacctaccctgccacacattgttctgcttctttcatcctcagaacaactttgagatagatgctactattaaccctattttatagaaactgatgcacagacaggtttaagttacttgattctggtctcacagtaagtccagaagctgggatttactccggcagactggttaaactgaactgtgctcgtctgtaattatattgataattgcttttaatatgggggccctatagttaaaaaaaaaaaaaaaagtctgtgtggtaaatgcttttaattccttattttaaaccaattgttgtttaaaccatttttatttttctatggaatatcttcctgttagcttttcactctgttacccaggctggagtgcagtggcacaatcatggctcactgtagcctcagcttcccaggctcaggtgatcctcctgcctcagcctcccacgtagctgacaccacaggcgtgcaccaccacattggctaatcttttaaaaattttttgtagagacagggctctcactttgttgatcaggctagtcttgaactcctggccttaagccgtcctcctacctcagcctcccaaagtgctggaattacaattgtgagccactgcacctggcactttctccttttgtggagatgaacttttctgttcctttggctggaacaagtagttcaaaatgaggtggctagaaagattttctcttttttgaaaataaaaaa

SEQ ID NO: 5526 - DNA, 1039 bp, Homo sapiens
ataagtatatgccatattaaatataatttatgttttaaaaggcacacagccaagggtcatcaaaaacctgtgtgcttcaagttaaaacatgtattaaaattctttaaccagtctcttatctttaattcatttaggtgattgaacaagaaaagcttgaagctcaagattcaggagaagaggctaggaatctttcatttaatgagttatatccctctggaacacttaagcttcagtacaattttgatactattgaccaacagttttgtgacttagctgataacaaagacactgctgaatgtgacattgctgaagtagatggggaactttttgtggctcaaagcaactttaccttgatattggaaggtgaagaaggagaagttgagccaggtgattttgcatcatctgatgtgttacctaaagcagctaacacagcaactgaagaaaaacttgtatgcagtggggaaaatgataatcatggacaaattgcaaatttgccatctgccgtaactagtgaccaaaagtcccaaaaagtagacactttaccatatgtgcctgaacctattaaagtagcaattgcagaaaatttactagatgtaattaaagacacaagaagtaaagaaattacttcagatacaatggaacagtccattcatgaaacaatacctttagtgagccaaaacataatgtgtcccactaaattggtcaaatctgcatttaagactgctcaggaaacaagcacaatgactatgaatgtcagccaggttgatgacgtggtttcctccaaaactcgtacgagaggtcaacgtatccaaaacgtgaatgtcaaatcagcacaacaggaagcatcagcagatgttgctactcctaagatgccagggcagtcagtcaggaagaaaactaggaaggcaaaagaaatttctgaagcttctgaaaacatctattctgatgtcagaggactatctcagaaccagcaaatacctcaaaattctgttacgcctaggagaggaaggagaaagaaagaagttaatcaggacatact

SEQ ID NO: 5527 - DNA, 1027 bp, Homo sapiens
cattatgcctggctcttactgtatattcttatacttaatcttttgcaatttttgctggtgtttctgtagactgtattctttgcattgggatcattgggtcaagacctatatttaattataatttttatagatatgctcaagtgaaccttcaagataatcctgtcggtggggtatgagttgaacactggcattaaaaaaaataaaaataaataaataacagtaaaaaaattctcctacctgattctggaagacttctgtgtaagaaacactccttcatttaaatgatcttatggcccacaaaggacatcttagcacctctgcatggtgtctgagactgccaaatttaactcaggttctccaatctgatcttgctgcaaatcaaccaaaaaacatctactaccaagctctactcttcccttcctcatggacacagcgtgcttgtttccatctatagatctcagtctttcgcacgcttcccactgagtgtcacttcttaaaaacctgatgttcctctgtcacaccacaccaaccattcagctctatccaggccacattagttttttgtcttctttgaatttttgtctactttgcttttttattattttatatctaaaaagcagcataaaattctttaaacgtgtcattttactgacattcttagcaagattattatgcagtacttagtattcaacaaatttttaaagtacttttcaattatttataaagatactttacaaagtatctttgaaattctacatgtagatttcttgttttgtacatttaaatagctttttctaaaactaaactttgataaatactgctttcaggtgtatggttgaagcctggaattttttgcggcaacattgcaataggttgaatatagaggagttactgaagcacatgtatgaagtctgtcaggaaatgggcttgatggaagatttactgaagttaccatttacagacactgagcaggtaattacttaccgatgtaaacttgtcagaaattcaagataaattggtagtttac

SEQ ID NO: 5528 - DNA, 1041 bp, Homo sapiens
atttttatatttttagaaattagttattttacctcagctgtgttatacatgaaccaattaccacttctgtgtcagcactctgaaagttacattttcttggttctctttggttaaatagcatgtacttctacggataagagggtaagatctacaaatttcaggcagaagaaaagaagtttaataatagattgattagacacagaaccttaacagtaatgaattagcaagtgcttgttgaaataatctggcttagcaaaaatgtttagatagcttaatctagaatcaatactgagattttttatgagatcaaaattgtagtttcaataagatttactgtaagaacaaaataaagaagctaaatgtggtaactgttgaataaatgggttaagagttctagtactgggttggaaaccagcatataaatttttttttcatttgcatgtacctctcactgtttagtgatgttaaagtgttgctacttaatcactaatgcttacgtcagaaaggcaggtgttggaactttggaagaaacatgtttggaaggtttttttcctccttttgattccaggtgtccttctttaattcatccagagcatgtttctctgatttgccaggttctaatttcctttacctttgccatatagtaaacaaacactaataaatagtttaatttctaaaccttatttctcttaagttggaaaaagtctcaattttccagtccccagaaaactagcacattaaggctcctatacattaaatacagaaataaaaacaaccactcaaaatgctatttgtgagatagcttgtattcagatttaagaaatgtttaaaaataattactagtcctgtaaatagagaatgacttcagggttgctagaaagtcagagaacactgttgaaagtgcaggtgatagtttttattgaaacatcttaggagaaagctgcttaaatttttgaactgataattttgcaaaaggcagccatgtttattgcccaggagattatgtaacagcatactttacacttcatttttatcagaagg

SEQ ID NO: 5529 - DNA, 1399 bp, Homo sapiens
gcatgtaggtttgcagtaatgtgctatcatttagagtctacaaagctggggagggaggagacatgcttagctgtgtgtctggcacaaacttgggaaaacaagaagcatgaatgaatgaatgactgtataagatccactgaaggttttatccctttgttttataggcagtacttgatatgtacctattagacggcgttactgaagcagccaaacactctattgtatccttttaagttttatccagtgtttcatgtattactaaaattataaaatttcaagagtagtggaaacctgacatatctaattgcaaggttgaattttggttttgttttcttaagaagaggtgttaacccaggatctgttgtttgggctcagatggcctgtgatcaacctaaaactatatgaaaaattttgttttttatttgtttttctaggtatagggtacttggcttttatcagacacttaaatgtgtccaagacactcaaaaagttaacaacagttgctctaaaatactaccaccaagtggtcactatcaatggcattaacctctgtgctggaaatgaatacattataagttagcgtgatactaccttaggcattatttgagtcctatagtctttgtgataatatttttgtgctaatgttagttacttagtctaaaaatgtataattccatttataatttataagctagatgatgtttgattaagctgccatcttttgctagatctttagaaatttgcgtatatctttgtttcttgtatttactgagctactgacttcataaaaatacgctttatctcctttgtggtgctgataataaaatactgagaatgaatgaagttggtgcgggactggttgtacccacatttactaaaactatcttctcattgctgactctccatgatggctttctaaacactaaaaacaggcatttcaagtctcttttaatgctacattttgttgctacctattgtaaatatatacgtaggaggtttttgttgttgtattttattgtccttaatccgctttttaaaagaccatttatttgctacttgatattatgtattcctttcccaacaaaacagacactcccattgaatctttcccaactgtatttgccatttcttggggccaagttaaacttattcaggggttttggttgatagatcataatgactatgaggtaagtctattcacttacagcataaactttcatgaattactagaattttagaaaatacacataatttaaatttggtattaaaagatatgatacagtctactaaaaatagttgaggaaggacccagtttaatcagtacctttaccaagcactattttagaaggcaagaatataaagataattcagaaccccaggtttcttactgtttaaagaa

SEQ ID NO: 5530 - DNA, 1480 bp, Homo sapiens
ctttttatggaacattaatcaaagaagtaggcttgataggcttttgtttcatagtgtattttgtggttataggtgtaaggctaattaaaatgcttatattcgtaattaaaactcccttcaagtcaatatggtggcgttaaaacatccttcatttcagaggtcagtaatcagtaggtgcacaaggataattttataacgaaagtctctggattgtgatcagaaccatttctcaattttgagaattggaagcagttggactttatagcacaaaaaattaagctttagggtttaatgcaaaataaattttattgattacaaaagtaatttatgattacaactgtttaggcttcactgaaatacaccaaggtaggaaatgaagttccaaacatacagcataaatattgttctgcagcttccccagacttaaccggtttcttatacatctttccacatcagaacacatagggcttacccatttcttttgagtaaatttgtagtatcccattgtgtgaactgtttgttgtggcaaaatctaatctcttctctgaaaaagacatcagaagcagaagtgatttgggggtgggggccctgttctaggacagtgtgatatgatttttccccctttataacaatgagagaatctgctcttgcacagtggttatattaatatatgagtctgagtttttaaatttttttattgaagatttcagacatcttcagatagttagaagaatacaagagttcccataaacccatcacccaaattcaagttaattttcaacatttgctatatgtgtgtctgtttagttcattcccctttcctcctttccctcttttcttctgtgttagtttaaagcaaatagggatattttattacataatcataatgccaataacacttctttggtatagtgtgttatctagactataatcaaattgatgtgattatccaaagcatctttttacatttggattgtttggattggaattcaaatacagtctgcacattaattgcatttgacagttaagtctcaagtctccttgaacgtacagcaatcctctttctgtcctctctgtttttatttttagtgccattgacttgctgaagttatctgatagaatgttccacattttggaattaactgtgctttcatgtggtatcattttcgattttctgcaaattaaattagctctggttatagatgaaggtttagtattttggcaaggtagtttggaagtgctgagtacttcatattgtatcacatcaggagacacatagtgtctagtagtttcaattagtgatcagtggattcacatggtgacagcatgatccttcctttttaaagtctgtcatcaactttaaactagtggttctcagcagggggtgaattttgtcctccaggagatgtttggcaatgttagaagacatttttgattgttactgctggtgctacttgctactagtagttagagactaatg

SEQ ID NO: 5531 - DNA, 1050 bp, Homo sapiens
tctttttatgcttctcctttttcataggtacagatacatctttttttttttttgagacggggtcttgctctgttgcccaggctggagtgcagtggcacaatcttggctcactgcaacctccgtctcccaggttcaagcgattctcctgcctcagcctcctgagtagctgggattacaggcgcacgccaccacacccggctaatttttgtatttttagtagagacggggtttcaccatattggccaggctggtcttgaacttctgacctcgtgatccgcccgccttggcctcccagagtgctgggattacaggcgtgagccaccgcgcccggctggtacagatatattttaagaggaagcaaaacgttgtgtctttcacgcctacctttaatattttcagggacttttctttcttcccagaatgaagtgtaacttccctcggttagctcaaaggtctctacaataagtatatgctactgtctatcctcatatgttaacaaattttatgcttttgctattccagaatcgtcatcaatcctggactcattctgtggaagagatgtttccactctgatgtttctttgctcatgtccttcatcctggagtgccatctttccttttttaaatactcaaatttcaggtcctccttctaaatccaatgttttcactgtatttttatttttatttttatttttttgagacggagtctcactttgtagcccaagctagagtgcaatggcgtgatcttggctcactgcaaccttcgcctccagggctcaagcgattcttgtgcctcagcctcccgagtagctgggactacaggaacgcgccgccacactcggctaattttttgtattttagtagagacggggtttcaccatgttgcccagggtgatctcgaactcctgagctcagacgatctgcccacctcggccaaccaaagtgctgggattacaggcgtgaaccaccgcacccagcccactgtactcttttatttccccttatcccacttttttactgggatctcacagcatatgtacctctattgtag

SEQ ID NO: 5532 - DNA, 1027 bp, Homo sapiens
accagcctggccaagatggtgaaagcccgtttctactaaaaataaaaaaaaaaaaattagctgggcgtggtggcaggcgcctgtaatcccagctacttgggaggctgaggcaggagaatcacttgaacccgggaggcagaggttgtagtgagccgagatcgtgccactacactccagcctgggcaacagagcgagactccgactcaaaacaaacaagcaaacaaacaaaaacagctgagtgtggtggctcatgcttgtaatcccagtgactctggaggctgaggcaggagaatcacttgaggccaagagttcacaacccagcctgggcaatatagggagaccctgtctctacaaaaaaattttaaaaattagccaagcatggtggtgcatgcctgtagtcccagctatttgggaggctgaggcaggaggatcacttgatccaggtgtttgaggttgcagtgagctatgatagcaccactgcactccagcctgggcaacagagtgagaccctgaatctaaaaaaaaaaacccgtgaatgccgactatatgctaggtgctttgctaaacaccgaggaaaaaaagatgacaaagacttttttttttttttttttttttgagatggaatcttactctgtcacccaggctggagtgcagtggcacgatgtcggctcactgcaacctccacctcccgggttcaagtgattctcctgcctcagcctcctgagtagctgggactacaaggcactcgccaccacacccggctaatttttgtatatttagtagagatggggtttcaccatttgggccaggctggtcttgaactcctgaccttatgttccacccgcctcggcctcccaaagtgctgggattataggcgtgagccaccacacccggccaacaaagacttttttttttgtcctaacaaagctcacagtgtagtcgggaaaataatttataaaaagtaattagaacatagcgtgatggatgctgtaatggacccttgttgtatttcctatttcaaggcacc

SEQ ID NO: 5533 - DNA, 1027 bp, Homo sapiens; identical to SEQ ID NO: 5532

SEQ ID NO: 5534 - DNA, 1035 bp, Homo sapiens
agagacaaacattcaaaccatagcaatatttgtctccagtcctttggcatagagttcctaaaaccctttaatttcctgagtaataggggcgttaggagaatcttttgttctgatatttggtctttgatcttggttcctgacacagagatcctgatcacttggaatttcctgggtaatagtagcgtctttttttctcatggggcacctcttggtgggctcctggatagggctggtcaccagaaagaccaagccatgattagaaacttggaactttcagctcagctccccatcctccatgaaggggagaggggcggaaacctgagttagtaattggtggtgcctatgtgatgaagcctccatgaaaatccctgaactgtggggtttggagagcttccgggctgctgaacacgcggaggtgctggaagggcgatgcaccctggagggggcgtggaagccacctgccccctcccccatacctggcccaatgcatctctcccatctggctgtccatctgtatcctttgtaatatccttcctaataaacaggtgaacataaataaagtggttttctgagttctgtgatccatcctagcaaattatcaaatccaaggagggcaccatgggaactccagtgtacagcctgtcagtcaggaacacgggtcacagcctggggcttgtgactggcatctaaagtaggggcagtcttgtgggactaagtccttaagctgtgcaatctgactctaactccaggtacatagtgtcaggattgagttaaattgtagatcacccagctggtgttggagaattggtcggtgtggggaaaactccacacacattttagcaaccggagaggaagtattctctgacaagtatgactgtagaagagaaagcagttggtttttcctattatacacaactccatttaaaatcgcaataacccccgcacctgctctggcactgccagccttcttccctgccggattattctccatagcacttgtcttgtcatctagcgtagaatttacttgtttgttcg

SEQ ID NO: 5535 - DNA, 1035 bp, Homo sapiens; identical to SEQ ID NO: 5534

SEQ ID NO: 5536 - DNA, 1032 bp, Homo sapiens
aaatgctctttttagactgtttgaacttaatttgttttaataagacattgttttaatgtctttggaccgttgtacattaagtgatgcgtatcctaccaccaacgttaacctatctcaccttagttacggttgtaggtaacaaatggtaacaatacaatagtgggtaacatggtggaatagtatctctaatgatcccttctcccagtggcattaaacttcaaataatttgaaaaatattgttcccacacgttacaccttcattctgtttgctctttttgtaatgacagtgtcattattaaggctataataaagcctatataggattataatcaaagaccgtgtatttctgaatcttgaaggactattcacaaaattttatttacattttccttttaacatgtggcttttctggcctgcaaaacatatacatgcttttagttttggtttacatggagataaatacataaatatactactctaaggataaatgttaggtgtaagacagttatgaagcaagtaatgtgtttgaagtaagtgcatacctgttttcagaataagagaaaaatgttggaaccaaacataatttcaaaagtatggataatttattagcaaactagaaacctcaaaaatgtcgaaggcaaatctgttttctctgctttgtattgaaggcatttctctaaaatcttattttgcagaatttccacatgaaattcctgtttttacttttatgttgctcatgctagagctaacgtataattttcttgttccaaaattcatgaagaatttcttatgtgatcttctcagggattataataatgattttatgaaacttattggtgcttaaaaaataatctgaagatgtgaataattccacagtgagtgtattaattttcattgtacttaattagtacatttccatttttccattattagagaacactattcgagccaactttttttgttattgtttctttcacttaattgagtaattgagtttattgactctattgggcaatttgttcagataaacac

SEQ ID NO: 5537 - DNA, 1090 bp, Homo sapiens
atgagatagatggcaacacaataacagtgggggacttcaatactccactgacagcactagacaggtcaagacagaaagccaacaaaaaaatcaatggtcttgactatatcatagaacagatggacttaacagatatttacagaatattctactcaacaattgcagtgtatgcattctgttcatcagcacatggaacattcttgaagatacaccatatgataggccacaaaacaagtctcaataaatttaagaaaatcaaaatcatatcaagtacactcttagaccacaatggagtataattggaaatcaactccaaaaggaacactcaaaaccatgcaaatacatggaaattaaataatctgctcctgaatgactgactgttgggtcaacaatgaaatcaagatagaagtttaaacactttttgaacagaatgatagtagtgacacaacctatcaaaacctctgagatacagcaaaggtagtgctaagacaaaagtttgtatcattaaatgcctacattaaaaagtctgaacgagtacaaatagaccatctaaggtcacacctgaaagaactagaggaacaatagcaaaccaaatccaaacccagcagaataaaagaactaacaaagatcagagcaaaactaaatgaaattgaaacaaacaaaaaatacaaaagataaatgaaacaaaaagctggttctttgaaaagataaacaaaattgatataccattagtgagattaaccaagaaaagaagagagaaaatctaaataagctcaattagaaatgaaacaggagggccaggcatggtggctcatgcctgtaatcccagcactttgggaagccgaggtgggcaggtcgtgaggtcaggagtttgagaccagctaaaaatacaaaaattagctgggcatggtgacacattcctgtaattccaggtactcaagaggctgaggcaggggaatcacttaacccggcaggtggaggttgcagtgagctgagattgcaccactgcactccagcctggatgacagagtgagactccatctcaaaaaaaaaaaaaaaaaagaaatgaaacaggaggtattacaaacaa

SEQ ID NO: 5538 - DNA, 1029 bp, Homo sapiens
agattgaaaatttttgcatctctgattatgagatttttttttctgttgttttcttttgtaatgtattcctgtagttttggtagttagggcagtgttgtctgcatagcatgaattaggaagtgtgtactctgcttctgttttctggaagagcgtatagagaatctgtgtcagttcttcaaatgtttggtggaattcactagtgtgatcatctgggtcttcagccttgtccttccttttttggacagttattactttattgatccaattttaaaaatacgtatagacctattcatgtctgctcatctctccttgtgtgagtttttggaggttttttcaaaggattggttcattttatctgacttaccaatctagtggtcatggagttgttcataatgttcactgtggtttttttttttttttttaactgtctgtaggattagtagtaatgatggaacctcttttatttctgatgaacattttggtcttttgtctttctcccttgtttggtctggctataggtttatcaattatattgatgtttatggagaaccagattttgttattgttgattttctgtattgacttcttgtttgcagctttcctgatgttttctatcagtgttgcttgtctgagcttgacttaggtttatcttcctggcttttttctagtttcttaaaatggaaggttgaattattggttttagatctttcttttctagcacatgccctccatgctttaaatttcttccaagcaccacttgtactgcatttcacaaagtatctgaagatgtattttatttaatttcctttgaagtatttaaattttccttgagacttgtctttgacctgtttgttatttagaactttgcagtttaatcttcaattatttggatgtttttcaagtatatttctgttatcgatttctagtttaattccaattatgttcttagggcatattttatatgttcactagttttattttgttttagtttttaatttttgtgggtacatactaggtgtatatatttat

SEQ ID NO: 5539 - DNA, 1035 bp, Homo sapiens
gccaagccacaatttatagccagcattcaagtgggagagaagcccacactttcagaacattgagagggagcatgactgcaactgtcagaaaatataggggagccacatgaccaagcaagagcctaccaactaaccagtatgcctaagcaccacctactggatcacatcccgaagttccaacaccaaaaacaccttgctagcattcccctctgtgagaccaaagacaagtcagctacaaatgaagaccctgcacaaagccttggctctgcgaagacatccagaaaaaaaagtgtactgactgtactcaatctacactgcagttacaggaacacccacctgcagacatgagaaagaaccaatgaaagaactccagtaactcaaatggccagagtgttgtatgtcctccagatgaccacaccagtttttcaacaagggttcttactcaggctgagctggctggaatgacaaatggaatttagaatatggataggaattaagatcatcaagattcaggaaaatgcaaaacccaatccaaaaaaactaagaatcactggagctgaaagacaagataactgatataaaaaagagcctgatggttctgacagagcagaaaaacacactacaagaatttcataatgcagtcacaagtattaacagcagaatagaccaagtggaggaaagactctcagaacatgaagactggctctctgaaataagacagtcagaaaaattaaaaagaataaaaaataacaaaacttctgagcaatatggtattttgtaaagtggccaaatctatgaattattggcatccctgaaagggatgggaagaaagcaaacaagttggaaaacattctaggatatcatccacgaaaacttccccaaccttggtagagaggccagcagtcacattcagggaaaccagagaacccctgcaagattctacacaataaaatcatccccaagacacacaataatcagattttccatggtcaaaataaaagaaagactgttaaaggcagctatacagggcaggtc

SEQ ID NO: 5540 - DNA, 1034 bp, Homo sapiens
tcttctaaaaatacaaaaattagccaagcatggtggtaggcgcctgtaatcccagctactcgggaggctgaagcaggagaatcgcttgaacccaggagacagaggttgcactgtgccgagaatgcaccactgcactccagcttgggcgacaggagtgaaactccgtcaaaaaaaaaaaaaacagaagtttttaataagagcctgttctctgaagagactgactataaccaggctgtggattgaatctgaatccatgtctaatgctgagggcagcactgcagccagacttgtggttcttggtgaaaggtgatctttttgtctcacagtgtgggaggcccccgaccgttctcaatagaatgacttcaccgaccttttgactcactttggaaggtattgttaataccttgtcactgctcacaccatcaacataaaaactgactccagacacaccatgtgtcccttgaaactaatctctgtcaccttttcaaatttcagaaccatttgcactctgacaacgttgtgtcttttatcatcaaatctactaaaaattggctgattttaccatcttttccttctcctgatccatatgttacaatttgttgactgaatgtaattctttctaaaaaggaataatctctttttgactgcctccaggataagaatgaaatggttgagagctgtagagatctgtttcccaaatttgagattccacactgactacctgaaaagatgcatctcactggccaggcgcagtggcccacgcctgtaatcccagcactttgggaggccgaggcgggtggatcacaaggtcaggagttcgagaccggcctggccaatatggtgaaaccccggttctactaaaaatacaaaaattagccaggcatggtggcgaacgcctgtagtcccagctactcaggaggctgaggcaggagaattgcttgaacctgggaggcggaggttgcattgagctgagatcgggccactgcactccagcctgggagacagagcgagactctgtctcaaaaaaaaaaaaa

SEQ ID NO: 5541 - DNA, 1027 bp, Homo sapiens
tggcacaatctcagttcactgtaagctctgcctcccaggttcacgccattctcctgcctcagcctcctgagtagctgggactacaggtgcctgccaccatgcccagctaattttttgtatttttagtagagatggggtttcaccgtgttagccaggatggtctcaatctcctgacctcgtgatccgcccgcttcagcctcccaaagtgctgggattacaggcgtgagccaccacgcccagctgaggcaagacttctgtaagtattcttcaagcagtagtacaagagttaaatatgtattcttcttttttaagctggtaaataaatttcctttttctacccattttaaagtgtgttggttatatgggtaaattgaaatgtatttcttttccttttttcttgcatagccattttaaaaaatattttttaaatatttaaagtataaaatatttttaaaattttttaaaaattttgtgggttacacagtagatgtgtgaaatgtatttgtaggtttaacttctgtgtagtttaattattttgttattaattggccattgataaatgagtctattttctttgctaatagagttgctgtcaatttgtaagtatgtaaagtttattatagagtatattctcacgtgaattattattttcatctgttgttctttacattgtcattatttttggctatttgcataggtaacattggtttaaggagagagacctgtgatcgaacagtgtcttgtgtctaatctgagaaagaaagcatccagtcttatcatcatgtatgatgttagctgagggtttttaaaataaattccttaaagcaggttgagaaagtttcctgctgttcattattattgaatatttcattgtcaagtgttgttgaagtttttctcatggtttttgtgcatctattggaatgatcttgtggtttttcaaatttattctgttaacatggtatatcacattaattgactttctaaaataagaaattgggtctaactttgtcacccaggctggtctcaa

SEQ ID NO: 5542 - DNA, 1042 bp, Homo sapiens
gtcgttagctagttattatgcagacttgtttgtatgcttgctttatagtgtcactggtctatgtacttacgtgtgtttttgtggtggctgttaatgatctttccatatttagcactacctttaggaactcttataaggcagatctagtgggaacaaattctcttagtagttgcttgtctgaaaatgattatgaagcttcttttggctggatgggaaattcatggttggaatttcttttccttaagaatgctgaatataaactctgataatgcacaataaattttctggacattagagaaaaattactggactgtagattgtggtaaagttcaaattactggaaatagcaatggagtatatccactgccttggccttcatttctgcgtatttatttggtgtggtaatcaccacttgagattctctaatttttgttcttctaaagaatgtggactattatttactattattattatagtaatatgccatattatttggctgttttattaccaagaaaatggatctctttccataaatggtcttttttcttgttatgtatcttttgcttttttttcccattttttaatcatgttttcattcatttttactgtgcacactaatttcttttatattgcatgtattgcagatttttattttactgttttttgtcttttaattctcctaattttaatatatttgaatttgtcagtctctattgtttgctccttttctcctattcatatgtcaaaaaaaaccttgtctgtgacttctgcaagtggtctatttatactttttacttttgaatatatgacaaattgattattgtccaactaatagaggtcaatgcaattcatttttttcccaattaaataccggttagctttgttccatgtttaaagtgcttgatacttccttcactatcctacaatgcctcctctgttattagtcagctttccatatcaattccagctaattaaagactatatgcctttctcttggcctagttctttatctctctgcttatactacactgccctgaatatt

SEQ ID NO: 5543 - DNA, 2176 bp, Homo sapiens
ttaatgaaattttaatttaattcttattttgtttattcctataatataaaagtactatctaaccttgtatgttgatcttgtggcattgatgaacttctatattagctcaagtaggtttttatttatttattactttattttattttattttattattatttttttttgagacagagtctcactctgtcacccaggctggagtgcagtggccggatctcggctcactacaagctctgcctcctgggttcacgccattctcctgcctcaacctcccgagtagctgggactacaggcgcctgccactgtgcccggctaattttttgtatttttagtagagacagggtttcaccatattagccaggatggtctcgatctcctgaccttgttatctgcccgcctcgacctcccaaagtgctgggattacaggcgtgagtcaccatgcccagcctcaagtaggtttttaatgaatttcttatacttttaaaatacaacattatggcaataaaagactattccacttcttttctaatctggagattgtattgatttttctagtgtaattttctggctcatacctccagtacaatggtgaatagtggtataagtagaaattctcgtcctgttttcaaacttgcagataaagcccctagtcattcaccattaagtatattagcttttggtgtggagtttttcatcttggctcactgcagcctcaacctcttaagctcaagtgatcctcccaccttaactgcctgagtagttgggacaataggcatgcaccaccatgcccagataattttttttttaatattttgtaaagatggggattccctatattgtccagaatggtcttgaactcctggctttatgcagtctttccacctcagcctcccaaagttctgggttacaggtgtgagccactgcgccgggccaattttggtttttcatggaggacttttagcaggtctcaaaagttttcttctaatagttttcttggtgttctatcattcataggtgttgaatttaccaaactttttctatttcaagtattacatttttactttgttcaagtaatattgtatcatattaaatgaacattgcattgtgaaaataccctgcttagtcatggtatgtaatcatccttatacctttttgtattctttttttaaatatttctgagaatttctgtgtctaaatttaaataggatgttgtttcgtaatcatcttgtgattcttttgtctcctttgggtattattggctaatagatgaattaagaaatgttacctcttctactgcttgaagtttttgtgagaaattgatgtttttcattaagtgttgatgaaatgtacaacttaagcagtttataacagctattctatctaaaaagatataatttttttgttctatggatataagtatattctattatatatataatgaaacaattcataggatgttttttcagtttacttttgtaatccatctctatcggtattttttatttcatagtatgtcatgaacaattattctaggcacttgacatggaataatttgaaaaaatagagaatgagtcccgtactacaatcaataaataactcaaaattttttccatttttaggatgaagaatatgaatatagttctgttacgtaatatttgtgtttactgtgtgagacaaatgagttactgaatgtaaaaataattagtaaaactgccctttgattttggaatgtatgaagcaggcaaatgcccctaccttctatttttatcaatatttagataaggcagacaaataaattttaataagatatacagaataatcttgtatttgaagaatgctatgaaaaaagatagtttggaggagtagttagtatttggctcatataatgtgttaggtaactattctaagccattaaacatttgtatgcttaatacctaagagtttaaagtgaagaaatcaaagattcattgaaaaagaaaaattaaattttaaaaaaattctatttttaattgaaaaataatagttgtatatatctgtctacagtgtaatattttgatatatgtttatgttgtaaaatgattaaatcaagttaatgtttataacctcatataatttttgtggtgaaaacatggaaaatagtctttatagcagttttgaaatacacattgtagtcacc

SEQ ID NO: 5544 - DNA, 1022 bp, Homo sapiens
ctgtttgtgtttatcctatttgaaatgtgttgagcttcttaattttttttttttacatttgagaatttgtcagggtttctcattttcttaatttcatgtctgttttcctgttttactcattgggcattattcaaatggttatctcagatttttcaggtaacttatacatctccatttctttagggttgatttctggatatttatttatttatttatttatttatttatttatttatttattttttttttgattgagccatgttaccctaatgtatatgttgcaatctttggttgagatttgggcactaaaagccatctgtcaaaatctttataaaatggctttgtcctggataatctgataccaagtgacttgggctagggtttccatgagcctctcaaacctattctcaggatgtatgttctctggaattttgtgtttaatttccagttaaagaggtttacccttgtttcttctttctttcttcttctctaatcaattatttgctaaatctgttgtctgtctgtagtactgcagcctctctgctgctataacaattatttacctttggtctcagcagaaccaacctttgaattaaaggttggttctattctaccactattcctttcagcactttgtgtcatgggagacagaaactagtctttggaaattccatcaaaagtatgggcatatgtgccactactgtctctattgaaggagaagctaggagttgggagtttattcctgaagtcattatgctgtgtttaggagaagaaagagttgtggtgggtaaatgtaacaagctttccttccccttgtctatggcttttaatatggtttctagagttctcacaaaggcattttgttcagtatatttttgttatattatgttcatcaaaaaatcagggcctgtagtattttattatgctatctcgctaatgtgtttggtataatttcatatattagctttttaaattatattcatctaagtccagtaagttggataatatgttattttaatttt

SEQ ID NO: 5545 - DNA, 1069 bp, Homo sapiens
tttaagtaagtgccccccagcgattctaaggtgagatcagagtcaaccttgagggctcccagatacagtcacgagacttgggttccaaaaggaggtcagagggcctgctcttcggtttgataagggtaggtcaccaagatccatatttcctttgctgtaccagaaattgctggagttcatggcaggggagatcacctgaaggcaggaaatttttggtctttatgtggtagctcatttttcctctcctgtgataaagaataggggagtattcccttttctgcactgcagggccttctgcctctaggtgtgctggttgcaggtgaaagggttgtgttgacacctttaaagacatattctcaaatgcaggtgtgatttgtccagataatctcacctgagaaggaatcccagagaagaaggaagaagaggaagaaatggctggttctcaggtgaatgtgtctgggttcaggggatgtgtctcctcttttcttctgggatgttatgtgtttagaacttgcaaacctttatttctgtacttctgatgtacctgcctaatgtgtttcttcccaactaccttccccccttcccccctcctttcttatgattgataaggaactctgtaaaatccttcctcctgtgtaccagaaccttctctccattccctccttccaggcttcttatatgtcatgaccaaatcttaccattaatgtatgatgggcagtattcagatgttctgtgacatatcaacatgggaaagtgtggatccccaggattatccgtggggatggggctgggtcttgggatgtcagtgaagaaggggatcatgtaccgtttagatttcatccacatgctccatcatctctatgcagaacagaattaagaaaagagacatttaaagaggatggcattcattgcctggaataacttaaagttctgaaaagagaataattagaagacatttgctgtctaggatgctaaagaaacactattgaaataccctattgcagattaaagaaccagggaaacagctatagcttgaactttgcataaaactgatgtttctggccaggca

SEQ ID NO: 5546 - DNA, 1021 bp, Homo sapiens
ctgtgagggagaagcggcttcatgcctttgctggcagttgccattccttggtgtgtggaagcgtcacccagtctctgccttcatctccacatggcactcttgctgtgtgcgtgtctgtctccaaacctccctttgtttaaggacaccagtcatatcggattagagcccatcccaccgactccagtataacctcatctgtatccgcagcaaccgtttaccaataaggtcacattctgaggtactagaggttgggacttcaacatcggaatttgaaagggacagcattcagcccatgactccagataaacgtgaggtatgctatatcattcctaatttacagatgagtcaatacaaacttgagtgagcttgctcacaattccatcaaaggcagggttcagacccaagtttcagcatttagggcaggtgtcctctgcatggaagaatcatactcaatagccgtaaacgctgacaaattccccttcctccctgccttctgatgggggctgggcaggccagctggagctgtgtctcctgctgggattccggactgagagtgacagcaggtagtgaaacctcaagcaatttaaaacatggtattgttcctggaagactggttatgttggctagggtcagcaagagagggcatcaaggctgtagtctagcagtgatttaatctgcaagtcaaaccagacgggtattttgtattattcatatgtcacatcctaccaacagacagtaagtcaggcaaggctcctggtgctccttgtcactcacgtaattttcacatcaggaaaactctgggctgggtgcagtggctcacacctgtaatcctagcactttgggaaaccaaggtgggtggattgcctagctcagtgacaccagcctgggccacatggcaaaaccccgtctgtaccaaaaatgcaaaaaattagctgggtgtggtgttgacgtttgcggtcccagctactctggaggctgaggtgggaggattgcttgagtctgggaggcagaagttgcagta

SEQ ID NO: 5547 - DNA, 1067 bp, Homo sapiens
gggcaccgagcgcagccctttgaggtgcctcacctgtctagtcttcccatctgcctggtacaggggtgctgtgaggacactggggtgtggggaggtgctggggctcagcagcagcagtttccagccctccttcaggctgtgtcgccagcacttgcacccatgatctccatgccatggtgcttcgaagcatctgctccttcaggaggaaatagctttgtacagaatcatcagcagctccacaccttcttcccctttgggacctagagctggcatgaagcagacaaggttttgacacaccatccccacctggaacaagcgttcagagacttggtgtggtgcagtagctcctgtaccatctctaccctgtaggctctgcacaagctgtttgtgcaggatgtgcggagtgtgcaggagcctgtggtgatgactatagaaaacccaccacagaaagtgggaataaatatggggctgggggaagtgcttgtctctggccatagagtgggtggagtagaacccggatctacgtcgattctgtctagcgtcagagctcatgtttgtggagttggcccattttgccttcaggttcattcactcagcagacacttattgagtggccaccccctgccagtccccaggacggagcccagggccgcccccagatcgtagcctggcatctattcggatagcaccctcccaggtagtgctgtaggtgcaaaacaaatcaatttttccatttcctcctctggaaagactctccaagtctccagccattccaggtagaagaaagaaggaaacgtgaggagctgcaggtgccagagttccaggcctgcccacagacggtggtgcctcaaaacacctacccaggtaaagaagggtcagggaggtatgggtttgtccctgtgtgtctgtggtgtgtcgcatgaatgtatgtatgcatgtgtggcataggggatggttgtgttgaatgcatgtgtgcgtgcatacacatgtggtatatgtggtgtgctgcatgtgtgagtgtgtgcattcatgggtgcacctgtgtgttgggggcatgtgggtgtgtg

SEQ ID NO: 5548 - DNA, 1161 bp, Homo sapiens
aggctgaggtgggagaactgcttgagcccaagcatttgagaccagcttgagtaacatagcaagacctcatctttacaaaaataaaaaattagccaggcgtggtggctcactcctgtagtcccagctacttgggaggctgagcaggaggattgcttgagccccaaaggttgaggctgcagtgagctgtggttgtgccactgcactccagccggggtgacagagtgagaccctgtctaaaacaatataaagataaaaatagaaattaaaatcaggtttttgacacattcccatggtccatgattcaaagtttatgaaaaaaatctccctgttacacctaaccccagagtcccaggaacctcttgagaagcagctaaccttcggaactcctagacgccctgcacttggtggccatccggattccatcatgcacaggtgttttcctgcaacaacacactttgaagagaattccttctcagtacagagaggccgtcattctttctgtgcgtgtaggatcatcccttgtgaggtttctgtagcttacttaatccgctgtcttcttgatgtgtgtcaaggttttcagtatttattagatcaatgcttcagtgaagcagcttttgtagactacgttgcacatgtgcaacataaacttgagaaatccctgcacggaagggtgggcatgttggtaacgtgcaacaacataaactttaggaatctctgcattgaggggcgagcacgctggtgacctctggacattgcccagcagcgcaccataggagtggtggatgtgcagcctccccagcactgaggaggaagacctgtttctccacatccttggccacccagccaggtagctgccatgtggattttgccaaacaagatagggatgaggtggatccaagagcagaaataacaaagcagtgtgtccactggcgcctggacctggggtagtcggtctcctttctgtctcttctatctgcatgtgttgctttgggctcttccctcagccccagcttccacaccacccccctcccctagtgctatggtctgaatgtttttgtgttcccctccccacagctttgacatgttgaaatgctagcccccaagctgctggcattaagaggtggggcactggggagatgatcaggttataagggcaaatcc

SEQ ID NO: 5549 - DNA, 1090 bp, Homo sapiens
agggcgcaggcctttgttctgactgcttctgtctgcctgcctcccacccgacgacactcacatggtagcgctgagcttcaacaccctgtatcatagaaggacggggtttggctccacacctgccactgctattgaaatagtttagtcttgccccagttcactgatgaggaaactgaggccctaacggcaggtggagccgggtccccgacccccgagatcggcagggcgctgaagacgtcccttccaccctccagcctctggtgcacatggcttcctccccggcggtggacgtgtcctgcaggcggcgggagaagcggcggcagctggacgcgcgccgcagcaagtgccgcatccgcctgggcggccacatggagcagtggtgcctcctcaaggagcggctgggcttctccctgcactcgcagctcgccaagttcctgttggaccggttaggggccgggagaagggcttgggggagggtacccaggcagcagcccctagcctcctctccagggcctgtcctgctgctcttttccaccctcaggtttctcactttaccaggacggcctgtgtgacttgtggcctccgagggtcctgctcccctcctcatggtctcagcgaatagcggcccttagggctggccccttacatgtgtgagtgcccagggctgagggtggctggccacctgagtcctgacctgcctcttctcctgctggcaggtacacttcttcaggctgtgtcctctgtgcaggtaggtaggggatggcagggggtgagagccagagggaagagggaccacagggtgacccagaaacaccctcctttcaaagggagccctgagtaagtttgggaagggtggggtgagttggggagcacagggtagtttgatggaggcaacctctgggtggggaagggagcaatgtctcaggatctagtgtgtctaggttctgaagaatgataaattggactggggctgaggttgccctggggtttgagggaacagggctccctgggtatggctctccagggtaagaggaggagacttcccagttcagcctgactgcttcccccacccctccaggtcctgagcctt

SEQ ID NO: 5550 - DNA, 1062 bp, Homo sapiens
attggcatacattctatttatatcagtaacatctacagaatgtttattgtatgttatagaaatggcaattcaaagcatttaaaaagcaaagattacatactttattatatttgagtctcattattcatcatagttatgcagtgaattgatgaatgctgacctgttgtcctaggggaaatagagtttggtccctgtgagcctctggtcacaacacttttataaaccaaagtgccatttgcattagatgggtttatttgccagtgtcgttgtaaaacaagccagtttcttccacataacccattccctgtgtaacctttagcaaatattaaaaaatttcttttgcagcctcctgatctgcagaagctgccttgccttcaaatttaacggtttcatgccatatcaccttttgaacatgagacagccagcactagccaagaagggtttaacgttttcctgaccctgtgtaaagagaccatgaatttctttggctttcagcttcacaacattgctgttcaccacacttactgtttaattgatcgtcatcccatgaatccacaaagttagccacttttctataacttcatcacatgctatagatgttactgtagcacttttgggaatggcctcatacacagattagcacattttctcttcatttttctggatatatcatattgttgaatcattgacattgaactcaaggccagtagcactataattcatacctgaacaaaagctcgtctaatacatacacatgtatggtgttatagtgtctctgtaaggcacatcacagccttcttgcacttaggaacactagcacttcagcattacacttgggggccaccataaacggcaaaatcacaacaaaaagcagaaaaaagcaaaaaacctggtgtcatagatgtcgagacggatgcctgttattacagtatgagaattgaaacaagaaggcagagcatggtcacggaggccccagctgggagtgtgcatgctgaatgactcagttttcagctgctccatgcatgtctgaggtcatatgatgtcagaacaccatgagggttg

SEQ ID NO: 5551 - DNA, 1088 bp, Homo sapiens
tagctgactgtactccactgtatggatgccccataccgtattcagccagttccttattgatttactattacagatagggctatgataaatgattttatgtatacatcattttgtgatttttgccagtgagattggtgggtcaaagagtaaatgtatatgtaattttggtgattattgccatgttcccctctctagagatggtgacattttgtgttcccaccagtagcgtatgagaatccctatttccctgcagcctgtagagcagagtacattgccaggcttttagagttttgctagtctaataagtagaaatgatatattacatgtaatctaaaaattgctctgctctaatgatgagataaattaagcatcttttaataaatttataggccttttgcattactttttgtgttttctgcttgtccatatcgtttgctcatttttttaaattggattttggggcgtattctgaaatttcagaggttctttacatattagggatattagctctgaatttataagttgcaaatatttcttacacttttgcctattcaatttgtcacttatatttttactttgtttaccgtgtatttgggatgtgcaaagagtttacttttgcttattttggggttttgtgtttgtttgcttgtttgtttctactctttggttttaaaggaatctactcatattttcatctaatacttgattttgattttctgatttttgattgtatttttcattcattcttttgagttttctggatatataatcatatcataggtgccatctgcaaatagaagatgttttacctcttttttccagttctgattcctctgattgccttctcttatgtaattgcattggtaaatacccccaaagcagtattgagtaagaagggatatagtgaggatccttaactgtttccttattttagcacaaaatcttctaatatttctccattaagtaaaatgatggctttgaagctgatatgtatacaggcgtaccctggatatattgtgggtttggttccagaccaccacaacaaagtgaatatcacagcaaagtgagttacacaaatttttttggct

SEQ ID NO: 5552 - DNA, 1034 bp, Homo sapiens
gtaggtttgttgatttttaacaaatgtattgctctggtgtgggatgttgataataggggaggctgtgcatgtgcatttgtggggccagggagtatgtgggagctctgtattttccactcaattttgctgtgaacttaaaattgctctaaaaaataaagtttactaatcataattttaaaaaagtaattctccccagcactttgcgaggcctaggtgggcggatcacctgaggtcaggagttcaagaccagcctggccaacatggcgaaaccccatctctactaaaaatacaaaaattacccagctgtggtggcgcacgcctgtaatcctagctacaacgggaggctgatgcaggagaatcacttgaacctgggaggtggaggttgcagtgagccgaaatcacaccattgcactccagcctgggtgacaagagcgaaactccgcctcaaaaaataaaaaacaaaaataaaaaactacaaaatataattgcgtatttttctgatttgagtgtagaaggacttctgatcacaaaagcaatgataaaggaatacatagctagatttcagtaaaattgtatttagtgtttattaagaggcaaagagaaaagcattgtatggataaacctaatataaaaattaatatataaatgggaaaatggtatgaatagacaatgaaaaataatttaaaagtgctaatacactttggggaaaagtaataatatttgatgcaaatatttgaaaacattttatgcagtatactgataaaaaacctgaacctaccaccagaagtaaaaatcgaacctatttggtgttttgaattttcacactgtgctcctccatctctcttccctgcaccctcaactgttcttgttaactattgtgtttatcgtttccttaaagcagttttcacaaatatgtatatatcaccaagcaacttcttgtttaattttgcttattcttaagtttttttctgacgtgttttctcctttattctcccttttgccctcaccccagtttgtgtagaagtagtgtggat

SEQ ID NO: 5553 - DNA, 1034 bp, Homo sapiens
atttttatctttgctttaaactgccaattatcttttaaagaaattaagaaagggaaaaattggcttttacattttcctacatatttaccattttgcagagttcctcatctctttctgctgaaattttacctcagcgagaagtagtgtctcccttgtctgaatttttatagcacatattgtggaccatttatatgtcatatatgaccttacagttagttccatgtatatgtcaaatttcctctgccagttttagattattttcttggcaagggtcgccgtttatacagttttaactacttcattgtgtctagcacagtgccttagataaagtggacacctgtatatatttttaactatgtaagaatgagtgaaactttgttcatttatctgagtatttatataatctcacaggattgagttgtattattacagttcaccattagatgtcactttctgacatatgttaaatccttaccaatgaattccttccattaaggcatattggattctgaaagttggtgctccaacacaagtgcacttaaacagataaatttttgtacatttaaaagtgattactgtctaaaatggaagtgttcctaagttataatttttatattttcattatgtataaatttatacagaactaactgattttcctaaagttttctttagaacttgaatactggtattgtttttgaattatttgctctgtggagcagcttggaactattagaagtaatagtgtgagaatattcaggaatacctttaaacatgttcaaaatgtattctgatggtggtgtaattctgaaagacatcttattttaggagcctgactgacccagttttctcaggttttgatagcaactatatagtttatttgtgtttgcctgagaaaggaggggaactgagtaggctgtgaagaaacacagaggtagagaaaaaggagattcctgtggctgtcttggccagtcatggaacacagcaaagtgcttccctccctcattctctaaacttaaaagataggaaagggcagg

SEQ ID NO: 5554 - DNA, 1029 bp, Homo sapiens
cacttgggaaggccgaggtgggcagatcacttgagaccagcctgggcaacatggtgaaaccccatctctacaaaaaatacaaaaattagccgggcgtggtggtgtgtgcctgaaaccccagctacttgagaggctcaggcagaagaatctcttgaacccaggaggcagagatcaaaatgagctgagattgtgccactgcactccagcctgggcgacagagcgagactcactctcaaagaatcaagaattctttcttcccaattacatcttacattgttgtaagaaatagagtagtattataggacagaaagcatgtaggtatgccagatgccgaataatggatgtcacgagaaacacagatagatgtatccattaaatatatccccagaaagggagaaattgaaaacgaaataatagggtatttgggagaagggatggtggtgctgtgtaaagtctgaaagatgaggaaactaagaagttaaataacttgaagccacatgaccagtgggtggcacagaccccagatgtgaatcccgacacgcctcatccaagccgtttccaaaactgactctgcacctaatggggatttttctgaaggtgcacttgctgacataatggataataatgcacacaatacacaggaaggaaattagaatgtttaggtatcaaatgtaggctagtctccctgggttcttcctccagggctctcaacagccgtcagatctgcatgtgtctatctacagaactttcatatttatactgacctgttgtcaagtgtttgtttacatccagaaggtctctcatcttccttgcctcactgtgggtgtctgttcatggtactactgttagttcaccaacccagcttggaactttagctttacttttttcactcttctcttctcccatgaccaaagagttcaaccatggtatatggacccttgcactagaacattctttgggggaggtgtacatggtgggatgtttaacagcatcccaggcctctgtctgccagtagtaccttctgccctt

SEQ ID NO: 5555 - DNA, 1149 bp, Homo sapiens
atttttgattttttttcctaaagattgagaaataacagcaaatttttaggctgatgggaatagtcaggtggagggaagaatttctagtgctgagttcctgagcaacaggaagggtacatgcagggtcgggggctggtcattgctgggtcccacagctctaccactgcactgagagcgaggtgggtgggagccgtgactgtcggcacccgcatcccttctgatgcctgttttctcagaggactaaatagacagggcccctggccaggagagggaactggggaggagacactgcaggcgtggagggagagggaaagaaattgttcttcaagtggtagggatgaaaaactgctggccccaagtgaccgtggtgtgcttttgtttgttacaggatattcatccgttctatgctgatttgatgaatattctctacgacaaggatcattacaagttggctctggggcaaataaatattgccaaaaatttagtggacaagtaaggtacttttttctgtagtgtcttttaagttatcgaaagtggaaaaaataatattttttattttttacagtgttgctaaagattatgtgcgactgatgaagtatggcgactctctctaccgctgcaaacagctgaagcgtgcggccctgggacggatgtgcacagtgatcaagaggcagaagcagagtttggagtatttggagcaaggtgcttgtcacgcatccgcgggaaccgtgctagcatcctgctgagaggatgcgtccttgttgaggacttgagatgtctgtttttcttgtattttggagatgacagggtcagttattcttcctagctttacctatgagaaacagtaataggctggtttttattgaaaataaatacttacaaatcaatagcactgataagaaaatttatatatttcatatttaataggtaaggcatacacaaaaaagtcacgagaaaatactgaaaagtataaaaactaaggtggctcatagtttattattgacttttttatttttaaaaacacttgtatttaataggactttctgaattaatgtactaggattctgttgaaacaattacttgcttattgtgtgtattcttacatgacaaattattttgactcattcggttttgttttctctcctgcat

SEQ ID NO: 5556 - DNA, 1067 bp, Homo sapiens
tgtctggacactgccagacatgctgttggccccacctgtcacctaatgaattaaaacgtgggcttagaagggctgaggaatatgattcttaccagagccaaacttgggagatagcaattgaatatactatgtgtatactattactttctgcaactattttctccatcacttttgcattacaaaagttggagtaagatgaatatcaccataggcctggactgtaactaagttgaaaagaaaatttaaagcaaatcttaaactttgaatttcttaatttttcaatttgaacttttcctagtgcgtcagcatttatcccgtttgccaaccattgatccgaataccaggaccctgcttttgtgtgggtacccaaatgttgggaagtccagcttcatcaacaaggttggtctggtttttatcgtaaagcaaatcatctgactattttacgtcagtgttactgtattctggcggcgtgggattcaggatggccttgtaggtcagtgttaactgtattctgactgcgtgggattcaggacggccttggtaataatttcggcctccgagttggtccttgagtaaaacactgccctggtctgcaggagttcccggtgcctgagcacgccgagctcctcttggtgaggatttactttgtctgtatctacatttatattactattacagaagccattactttttgttcttgtgtgtgtcctataatttctaaggaatttgagacatgtaagtgcatttttgttgacaactggggaggttttcttgggtgttgttggcctgtcctggagtggctatgccagcggggctccggtggcaggtgacactcacccagctggggtcttcccgtctgcagctgcatctgagtgatctgttaccttggttgctgtgtcagctttcacatgaaatcgtatgtggtctagtagagggacggtgccgagtcgctctttccctgggtgagctcactgactaggataagtgtaacatttaagggactcggtcatttgttgcttcaggaaagtttggctgagtttcagggactcaggaagaggcaaagcaac

SEQ ID NO: 5557 - DNA, 1080 bp, Homo sapiens
ggtcccgttgcatcccagctgtagggtgggttgctggcggcccagtgtgttttttttggtttgtttgtttgtttgtttgttttaagacggagtctcgctctgtcccccaggctggagtgcagtggcgtgatctctgctcaatgcaagctccacctcccaggttcacaccattctcctgcctcagcctcccgagtagctgggactacaggcggccgccaccacgcctggctaattttttatatttttagcagagacagggtttcaccatgttagccagggtgaccttgacctcctgacctcatgatccacccgcctcggcctcccaaaggctgggattacaggcatgagccaccgcgcctggcccctggtgttttctttgggctgtatttcatcgtcttgcgtttttctgctccccagggtgcctgttactcctgtgatgccctctggagctccccctcagttattaacatgtagttgttcgttattctgattgcctttgttgtgggggacagatgtgaggggctactagtcggccatctttttgatgtcatttgtgttttcttgatcatagaagaatatgaagaaaataactgtttttaggatatgtctgttttttaagactttgaaacaaccacagatgttcacatttgcagcctccatttgcagaactgtacagtttgttccatagggaactggaaatgaataatacatctctcgttttttctttgcattcccagaaaatatttacagatttgcagtctgaaggattccctgtaatagagaccagcaccctgactgaggaaggtgttattaaagttaaaacagaggtcagtgctgccttaagtcaggtattagtctttttactgtctcttgtttgattcaagtcagttgtggggagaaaatagttttctttctagacattgttaacacttggagccctcgcagtagcgaggcgggtggcgtgcgagagtggggcgtgaagacagacccttctaagacccactttgccccccgtggacagtgggttgtgaggggatgctttgctcttctcaccccaaacaactttaccctaaagcagct

SEQ ID NO: 5558 - DNA, 1140 bp, Homo sapiens
tggatcttcagagtaagggccagagtgtgatcattattataaaatgccaattggacgtgaagtatttcagaaaatgggggaaagactttaataagtaataaaagtgtttcagcctatttgtcaacttttaatttcttgaagattaaaagttgcatcctgagggccaggtgcagtggctcacgcctgtaatcacagcactttggatcccttatgcccaggagtttgagaccaacctgggcaacatggcagaaccccgtctctacaaaaaatacaaagattagccgggtgtggtggcatgtgcctgtagttccagtgacacgggaggctgaggtgggaggatcacttgaccctaggaggacaaggctgcagtgggcagaaattgtacctctgccctccagcctggacgacagagtgagactctgtctcaaagaaaggtgcatgctgatagcactcagtgggggttcttccattgtttcctgttgttttgggatggtggggtgatttctgtagctttctccacgtgtgggtgttgaatgaggctgatgtgttgtttcctgttgttttgggatggtggggtgatttctgtagctttctccacgtgtgggtgttgaatgaggctgatgtgttgtttcctgttgttttgggatggtggggtgatttctgtagctttctccacgtgtgggtgttgaatgaggctgatgtgttgatgctgctgcatgtggaattgcacgtcgtgctctcttctgcagtggagtcgttgatttgccgtcagtcacaactcattttgcgcacgtagtacttgaagatattaaaaactgctgtaaacgtaaccaccttttttttaactttagagtactgggatttaatgaatttgtctgaaaaacatgataagataccagaaatctgggaaggccataatatagctgattatattgatccagccatcatgaaggtttgtgtcactttttaaattgcggattgttttcctttttattatagtagtattgctggaagatagcagcatggcttcggctcagctgggcctgtccgcttcattctgcacccctccatcctgactctgccccctgtaccacttccccaccctgagactctggtggagatactggccctggctgggct

SEQ ID NO: 5559 - DNA, 1021 bp, Homo sapiens
gtgtgtctgccgggagcattggaagtgaaggaggcggtctctgcacatttttagccttggaatttaattgttttaaaaaaaggaaatggtgcacaggggttactgacttgctggcggctggcgttcacgtggtctccattttcttcacagaaccctccctgtgaggtaaatggcacataggcagggcccaggtgggtctggaccagggcaatcgctctcctctgagtcagggaaacaaagctcccatacacactctgccacactcactgactcaggggttttctcattgttaattttgcttcattacaactccatttttaaagaaattggaagaattagaaaaagaagaagagctgagaacagctgctggagagtatgacagtgtatctgagagtgaagacgaagagatgctggaaatccgacagctggcaaagcaaattcgagagaaaaagaagttgaaaattctggagtccaaagaaaagaatacacagggacccaggatgccgcgaactgctaagaaggcaagtttgtgtctttccaaagcagtgtgatctagtttttgaaaattggattcctgtgtgatcattgctaaataacaacttttcaacccatttatggccataagattgcacattcttgttttattggtgtatggatttgcaagatcgctcacgtattgatcttttatattctttactgcgtcctttcttggtgactttcagcttcgagtttggcactactctagatccagtcattttgcagttgtacagattaaaactgtaacttatggttcacagacgttcaaggctatcagtgaacattttcctcttcttttttctctctctcttttttttaggggggagatggagtcttgctgtgtctcccaggctggagtgcaatggcgccatcttggctcactgcagcctccacctcgcgggttcaagcaattctcctgcctcagcctcccgagtagctgggattacaggcacctgccactacgcctggctaacttttgtatttt

SEQ ID NO: 5560 - DNA, 1028 bp, Homo sapiens
atgtaaccagagaagtcacttgacattcaggatgcctctcagtgggtcttcctgtttgaatacactgttttcacatggtggcaagtgactggttatggcggacttggacatttttgtacttctccaggtggggctcagccatctctgggaggagagaggttggcgcactgcctttgtctgaggccacctcactaacctcagctttagtgtctcacctctgatggagacggtcactctctcccccgtgttgcggtgaagaatggacagacgtggaggatacgctgattcttcccacagcaactgctctgttaatgttagttttcgtgggatttaattgagctatccaaaaacatgaaagcggggcccaataaaaattacaacttctaaaataagtatattataattgttgcaaaatatgtatacatatatattgccttgaagtttttttcaacatttcatcaaactaatttaaagctaatatttctttttatccttctcaggttcagaggacagttttggagaaggagatgcgtagtcttggtgttgacatggacgataaagacgatgtgagtgtgggggcggttcatgtgtttatgtggctggatacacctttttaataaagaaaactggccgggcgtggtggctcatgcctgtaatcccagcactttgggaggccaaggcgggcagatcatgatgtcaggggttcgagaccagcctggccaacatggtgaaacccagtctgtactaaaaaaaatacaaaaaattagccgggcgtggtggcgtgtgcctgtaatcccagttactcaggatgctgaggcaggagaattgcttgaacttgggaggcagagattgcagtgagctgagatcgtgcccctgtactccagcctgggcgacagagtgagactccatctcaaaaaaaagaaagaaagaaaccagggttttggaaagccgtgggaacgtgggaaattacagcaaaaagaaatgagagcttccagtttttctcttttgagattcgctggccctgggac

SEQ ID NO: 5561 - DNA, 1040 bp, Homo sapiens
tttactttgtgttaaacaacaacagtatggccgggcgcggcagctcatgcctgtaatcccagcactttgggaggccgaggcaggcggatcacgaggtcaggagatcgagaccatcctggctaacacggtgaaaccccgtctctactaaaaatacaaaaaattagctgggtgtggtggcgggcgcctgtagtcccaactacttgggaggctgaggcaggagaatggcttgaacccgggaggcggagcttgcagtgagccaagatcgcaccactgcactccagcctggtcgacagcgagactccatctcaaaaaaaaaaaaaaaataccaggtctggtttttgaaattctttctccgtattaaacaccaaaacttaacatatagtttactttgtgttaaacaacaacagtatgttttaaagcaagtatgtctttatttgtaagcatattactgaaacgatcaaatgaacagaagtggataaacgtcgagtcacttggctgagaccatacgcatcttccgtactgcttgtattaggatgcaagattgaatgtgtcttttttttaaaaatgcagccttgtgttgcactctgaaataagtgatttaaaaagaaaaacatgatacagagatcccatcctgaccttggaggcttggataaagctgtggggagacagcctcatggtccagccaggctagtccgcctgcttcaggactctcaagatctccccaagactttcaggatcagctgctgttaatcaaacaagtgcttataaaatggaaattgggacaaaggaaatgttaaatttcctccctgcaaccaggcagatgagaaatatggaaataaggaaaagggaaaatgaagatatgacaaagttgatgaaaaggttgaaatagtgatttatacatgatgggcaatcaagtgccccttttgccctgttttttggagagggtgtatcattgcctcaatggtgcgtctgcctgcactgagggcattacacatggctgactcgacctccctgcctctcacactctgtgtattttgtga

SEQ ID NO: 5562 - DNA, 1048 bp, Homo sapiens
agttggccgtcgagtgaaggaaatggtgatgctggtggcccctttccggcagtcaagttccctatcaaggacattcagttctcggaaagtggtgaaggcacatgcttccctgcatggtgcccgcctctctccactctctagaaatattagaggctaggctgctgctgtatgtcagggctagtccctcttctatgaatccagaataactctgaagaagccgagtaacaggcatgaagtgaagagaaatcgctgtaacaggaagacagcaaagcagatgctaatgaccacactatttaacgaactggaaccaacgagaaaatacggtattactgaagactgcacttccttgaacagagtgctcttctcagcaaatcggaaatgcctacacaaatcgctttacaagaaagactgtttcaaagcagcacctttctcaatgttctcgttcaggtgacaattcttcttggtctcagctccaattttattgtcattttcatcaataaggatacacatctctgccaggagttgaacctgttgcttgtcgaggtggttagtgtttatttcaggcatcattacaaaatgtctgatctgttctagaacactaatattaaaggaaaagagaaagaaaggccatcatatatttttctgaatgtcatataaacacaggttaataatgatgctgcttccccatctgcagttgtaccactctgcatccccacagggaccccaagaacgctgccagccggctgctcagcactatctgggtcatcatttctcctacaggtttcacagctggccttttatcacagtcatgctcctgaaggccaagctcaacgttccgctctaaattcttgacctctgagatcctctgcagcacttgatactcaatcctttttccagtgtacttttcttctctggtttttggccccaacctaacttttcatcctgcttttctacaccagcttctgtaatctctagaatgtgctcccattgccatcctgaattgtttttcccactgcctgtctctgcatagttgctcaagattgccaca

SEQ ID NO: 5563 - DNA, 1033 bp, Homo sapiens
ggcggaggttgcagtgagccgagattgagccactgcactccagcctgggcgacagcgagactctgtctcaaaaaaacaaaaaaacaaacagtgttttactggggtggtggacaccctaaatagcctgtcttgatgactgtgttgtatacctggcacaaaatttctcatgtatgacaaattttcataaaagagtaatgacaataccaaatgctggtgaggatgtggataactgaatctctcatgtgttcctgatgataatgtagaatgaaacagccaccctggaaaatactgatagtttgacactcttagaaaaaaaccacaaaaactaaacatgattaaacataagcaattctgtttccaggtatacccaagagaaataaaagtatacacatacaagaaatttgcactttaaccttcataataacctaaaatatggaaacaaccaaatgtctgtcagttgtatttggcaataaaagggaatacattaccactatgctacaacatagatggactttgaaatcgttgtgctaagtgaaagaagctggttgtcacagaccagagcgtatgttgtatgattccatttttatgaaatggccagaacaggcagattcatatggagagaaagtaaattagtggttgcctagggctagctgggaagtgggtgggagaaatgaggagtgagggcaaataggtgtggggcttcgttttggggtgataaaaatgtacagttgattgtggtaatgatcgcacaacttcctgagtatactgagagccattgaattgtgcactttaaataggtgtcttacatggtgtgtgaatcgtatatcaagattttttttaaagctaaatatacatttaccctgtgactgagcagccttattcttgggctgtttatccaaaagaaatgagaacttaggttcacataaaaccctgtatattattgttcatggcaactttattagtaatagtaaaaaaattggaaagaatatatatatatatatatattttttttttttttttttgcagcaggtga

SEQ ID NO: 5564 - DNA, 1056 bp, Homo sapiens
agatgaacctctgtgatgtgctgtgacttgagctgtcctgggagcactgcacacacagttgtgttgggccctccctaataaggaggaggcagtgcagcctgtggacggccaggtccctgcagaaatggcgtgggaggctccttccagcactactggatgaaatgaggctccttaggtggaaagcagttttgttttctgaagcttttgccggccagtgttgactctgatttgcttagcagttctaattttcaattttaacacaaactctaatctgttaaaatctgtgttcatcttgaatcattatagcttttgggcaaacgtcttgtgttttaaaatttgcatctgtgagttttgcttgacatccacagtgttgataaggaagcgtttgggtggcgtagtggaaacagacttagaccaacagaatgactgtcacatgtgagttaggttacactgagttactcgtttaacttcctcagccttctttttcttctttgaggggttcaccccgtggctgctcctggctctttgctgtgctccctccagagccgttttcccagccacgtgcagtgctgtcacccatcaccccctgccttcaaggtgacgtaccgagtacccccctgctgcagcctgtctgggggcctctgccagccttgtgagcctcgggccccccgtcccgactgagctgcacgtgccaccctgaacttgctgtctctgggtgttcctttccttgtgccacccgtctcaggaaacgtccctgtcacccagtgctttagaccaaacacctttccaccgtctgaacgcctgtattgttctcttactgcctgtggaaatcaccctgtcagccactcctgcagcagagggcgcttcagttctttcttcccaccctgctccaggccgccctccctgcacttctctcatctcctgtccgtctcccccgttgttttctggggctgccataacaaagtgccacaggcagggtgacttctgaacaacagatccgtgttctaaacaacagatccgtgttcccacagtcctggaggctggaagcccgagatg

SEQ ID NO: 5565 - DNA, 1092 bp, Homo sapiens
gatgccgtggtttccagttgggcagtttccccccaggagacagtgtttgttgtcacccctggggaggggtctgctctagtttctaatgtgcctgggcagggcggctgctacatccacaggccaggatgctgcaccacagggaagggccccgaccagacatcaggtcctagcgggggaataagtgtcagcaatccacaccgcagctgtgggcaccacgaccaggcctttgagaatgcagacgtgaaaacggtcgccgccgcatcatcctgactgtgttccggggtctcggtgtcagagcgtgttgccaggtgttgttgacgcaccttgattctcagtagctttgctgtactttgatgttatatttttaaaaaccttgtcttaatgcagtggaacttagacgtaattaggactcagctggtgtccactaaatgaggaggattttcataaatgggctttgtgactgcgtggtgcttctctcatccagggccgcatagagcatgaaatcccatgtcacggtacagcttcagtggctgggacaactggcatttaactggactccagagttccaagcaattttgatggactggacctcgatgagggtagatgtggaaaccaagcttttggtccacattaaattagtgatttgtgacgacaagaggacacttccttcatggataggtggaaattcacatgcttatcatctcgtaggtatctcagctgcttcagtgcggggtgaggcgggttttgagcccctgtacagagtgagtgaccccagtttttgtgccctgggagacagtgtaggggtcaagcctgtgtctctctgagaaggcactgcccctgcgtctcaggatctgcccactctgccctgaagtcagaccatgccttcctgggtgggccactcatgcccagctgcatggcgagcatggggacccaccccagccctgagccaggcaggacgcgcagccccctggccgttgctgaagacagcagtggatcatgcctggattgtgtgcccttagctcacggggaaagtaaggtttttatcacattctttttactgaactttgccagtgagcaaagaggtgattgaat

SEQ ID NO: 5566 - DNA, 1049 bp, Homo sapiens
gaccagggctgtggctgtggtggtggctgaggctgaggctgaggcccaggccgtggctgtggctgaggctgaggctgctgcggtctcagcaggtggagagtctgggagggttcttgcttgagcagatagtggctccttcacgctggcgaggccactgcctaagctgcattggcgctgggagtatcttcacacccagaaaggcagaccatttctccactggttacttaactttctcaccttcctccttaaatagcctgcgattattgtctaaatttcataatgttacatcttcagtgaatttaaaagttcatgctctattagtatcaagaatccagatagaaatgcttacacattgctgtgatttcaccaaaacgccagggcactggtctcccttactatccataggtttactgtttttccctaataacttagaatttaaaaaactatgctaaaatttgggaacacctgaatttattatatgtaacatatacaattcatcttatagtgggaagaagctgaaaatgaaattagccaaaagtcttgtgtgattttttttttttaattaaaaaatttttttttgtgacagggtctcactgtgttgtctaggctggtctcgaacttctaagctaaagcagttgctcacctttgcctcccaaagtgctaggattataggcttgagccaccgcgcctggccaaaagtcttgtgtaatttaaaattaattttagtagaatatcttttattaagcagcttttggtcaaaatgaaaatgaactaagcaggtctttggagatgcaggagctctgtgtggaagtcaagctagagtttcctggggcctgttggtttgtgggctgagtggagaatagtgaggagcttccttgggtatctggtcatggaggcttctctgaggttagtcaaggcaccaggaagtggtggggagagtttccagtgagcagagtgccataagcaaaaacaaggtgagcttggcacacttcaggtgctgagatcagagtgaccagagtgcaggtgaaatgtggtggccccggggggct

SEQ ID NO: 5567 - DNA, 1044 bp, Homo sapiens
cccctcctccggacgctgcccctgccccacctgtggcgctcccgtcatctctagagcccccaaccagagtcctccagcccacccgcgaggctcgcgcacctgcgatgcggccccactagcagggacccgcccacctgtggcgctacccctgcctctgccgcctcccgcaccgctagcgcggcccccacctacgacgacccccgcgtagatgctcctgcccacacccgccccagccccggcccctgcccctagccgcgcccgcgccccctcccccgcagcccctcccatacgctcgggccccgcccgtcaccgcccattggcgctggggccgggcgggggcgcgggcggggcggcggttccgagtcaggcgcgcgcgggcagggtccccattgcctgctgcgcacccggacgtgcggctcccctcggcctcctcgccatggacgcggacgactcccgggcccccaagggctccttgcggaagttcctggagcacctctccggggccggcaaggccatcggcgtgctgaccagcggcggggatgctcaaggtgcgcgcccccctcccggcggcgagggagggacggacggacggagctggggagaaccgggcgaaggcgatggggtgaccggagagaagaggggggaagcgatgggggggacccggggaaaggtggcgaagcgatggggagaaccggggagaagagcggggaagcgatggggagaaccgggaagaagcccgcgcccggaagcggcaggggtacctgcggggcggcatgagccggcgaggcagccccggggtccttgcccggtggggcgggggaggaagggacatggcggtaggaacctccatccggaagatcagtgagttttccaccttcggttttgttttaaatggaacctggcagagggagtcgcctgaagcgccctcgggggtcgttctgcctctgagctgtaggacggggccgggcgtcccctccgaagcgtgggtacagcgcgatcacttcctaagtgcccccccgccccccaactccgccgcacgccacc

SEQ ID NO: 5568 - DNA, 1032 bp, Homo sapiens
atcacagtctttcatagctagttactaactcacaagatgaaaatgagaaaaatgtaaattctagcaccccatgtttatagtcggcctgtgtgtgccatccacctggcgctctctcagactgagaggagataaattagctggtgtctttcccagggcgggacgatcattggcagtgcgcggtgccaggccttccgcacgcgggaaggccgcctgaaggctgcttgcaacctgctgcagcgaggcatcaccaacctgtgtgtgatcggcggggacgggagcctcaccggggccaacctcttccggaaggagtggagtgggctgctggaggagctggccaggaacggtgagtggacacctgctcctctgtcctgcgggttttcgccctgtttcagagctttggaaccgacaggtttccctcttcactgtggcagaagtacctcttctcacagatcttacaggtcaccatctcaggactttttaggatctcaaaaaacaacagcaatgatcgtaagaatgctagtaatttaaccttaccatgtgccaggcacccttcgacctttcacacagatagctttatggaatcctcacgacagccatctaagccaggttttagatcatcccatttacagatgaggaatcaaacggccactcagccgtggggcgagccgggtccccagcagcctgggacactagcatccgcctttcagccctcacactgtgtccctccagctcgctggggtcctttaaaactgaagttgggccgggcgcggtggctcacgcctgtaatcccagcactttgggaggccgaggcgggcggatcacgaggtcaggagatcgagaccatcccggctaaaacggtgaaaccccgtctctactaaaaatacaaaaaattagccgggcgtagtggcgggcgcctgtagtcccagctacttgggaggctgaggcaggagaatggcgtgaacccgggaggcggagcttgcagtgagccgaggtcccgccactgcactccagcctgggcgacagagcgagact

SEQ ID NO: 5569 - DNA, 1056 bp, Homo sapiens
ccgctgagggtccctctgtggaccctgaagggagagggaccgatatgtgaacatggcagctgttttctccagagccctgtttactgacggccgaacagtgtgaatcctgagaaggtttggatttgggtctgaactgggctcgtctggccatagaagaacatgagctggtggcgtcctcaggaaatcagggtgtgaggcaactggacgtggatggctccgggtccccccggccactgtcctgaagccgccggaggctgaggacgcatgggagtgagcgtctcttccctgtccggccacaccctctgtgactggtgactcatggcatggccctgggcagcatttaggtttgaggtctgtagatggctccagtatactggcttctattgttcagaaaatttggtgattctcatgggggcaggggtggtgattttgccccaggggatgtttgcaacgtccagggaggtttctggttagaagtgggaaaagggatgctcccagcatctggggctggagacaagggacgctgcggaacgtccctcagagcacagggtgggctccataataggagtctggctcaggatgtcgccgtgttgtgcttcggaagccctgggcggggctgatgtggtgaagcctcatcttctctggacacgtgcgtcctcgtcctctctcatgatttccttcttgccagcattgatgcttagcccctcagaatctatgcggtgctggtgagtggtcctccgggcagagcagaaggaatgagatacctcagagccggtgtgacacgttctcaggatacggctgcagggagtttcagtccgaccctttcattccttagcactggcccattactccgtcctgtaagctcgataaggtcacatcagaagcacagtaagctgctgccacgctgccgtcagctgccgcgaaggtggcagtgaccacagcctcgtgactgattcacagcctggctgcgcttggtcttgagaattttatgttttgctgggcagggtctcccccgtattgaagcttcccttcccttttttggagactgaaggaagg

SEQ ID NO: 5570 - DNA, 1050 bp, Homo sapiens
tgcaaaaaaataccatgctctcaaagttacatgaaaatagaactcttccaaattccacagaattgcaaatactactatcatataaaagctacttgaactctacagtatattgacagagtgtatattttttcctttcagctgtaaatcctgaacttattctagttaaagtaacagcaggtaccattatattaatactaactatatcccaggcatgtatgctgccttgcagatattctttcttttattccttacgataaacctgcaaaggaaggttttatggaggaggaagcagaagacgcaagtgggtcagctgcccaggaccgcctgggagcgagtgtgagtgctgacccggcggcaccagaagccaggcctgcctgagcccaatgccaagagaccctgatcgccaggcttcacctctggccacccacagaccgccctgtagaatctgccagggattctcaggacatgactggggaaaggcatcaggactctgtgtgaagaaggacaagtgacttcagcaaacattttcttgttaagtactgatgaatacatcaatgtcactgacaataagatgctgaaaataaacaatcatttttaaactttattcatgctcacacatctgagggcataaggccaactgaaggtataggactgagctgccagatgtttcctcaaagcatcacataattttataagaaactgcacttttactctggtcttcagcaagctcacctttacagatacctcagttacggaccatgtgcttttggaagcaatataactacttgccctcaatctatttgcacttctagcacaaaattagcctgctttcttccccatctcctacaacttttaataggcttaaaatattttcttagtttgttagaacacttgacatttacaataaattctataacctttaccaagcactctatcttgaagtttctacaagtaagaaatacctaaaaactatacttaatagaatgaatcataaaatatttagaaacaaatcacacatgcacctcatattatcaccatttaacaagtgtt

SEQ ID NO: 5571 - DNA, 1033 bp, Homo sapiens
gaggattaagctagatgaggaatgaaaattaaatttggtaatgagaagagagtattgatcttagatggtttccaagaatggttacaatatcgaacttagagtgttttgcaacaggttgagaagagaatgtgcgatttgttcagaaaataatgtgagtgccaacactaggaatatggaaatggaaaaatactcttgttactatttaagatttataatctagtggggaagaaagataagtaggttaataattattataatatgtgataaaagttattatagtgatatacacagaatgccgtagattaaaaggaacacttaatcctgactggagagaataggaaatgatttcctattgtaatccctgagtctttaaggaccagtttagagagcagatgtaaatggatgatttcaggcagagaagcatgtagaaaggccctgaagcaaatgagtctgatgagttctgggtatatattctattttattactatattaacagtgatatttgtatagaggagaggaaaccaatatggggagaaggaggaggtagtcatgagagatgatgctaaagaggtaagcgccacatcatgaagagaccttgtatgccttgacagagtttgggttttatcttcatggtaatggggaaatactgaaagactttaaatgagccaatggcatgacatatttgcattttaaaagatcagtttgccttccatgagaaaaataagcaacattttggagtcatctcactcttcatattttatgaaaactattccccaaaaatgtgcacatatacataaacatttcaggagatttgtggacccagctgtgtataccaaattaaaatttccaagtttagctgatggattggtaggaaatcagtctgcagtagtctaaatgaaaaaatgattgttcgaatctgatagctggcaatgggattggtgaagagaagtttcactgcaacaggaagacaagaaagaatagagagaaataacacaattttgtgggatagactcttaagaaagaataaattccc

SEQ ID NO: 5572 - DNA, 1047 bp, Homo sapiens
ttttgcctgtttgtagtccaaataagacacatacattatgattaactatatctcttttttttttttttgagacagagtctcgctcttttgcccaggctggagtgcagtggcgcgatctctgctcactgcaagctccgcctcccgggttcacaccattctcctgcctcagcctcccaagtagctgggattacaggtgcccgccaccacgcccggctaattttttgtattttcagtagagacggggtttcaccgtgttagccaggatggtctcgatctcctgacctcgtgatccgcctgcctcggcctcccaaagtgctgggattacaggcgtgagccaccgcgcccggccttaactatatctcttaagtctcttttagttcattggtttcccctctaactattttcttggaattttttgttgttgaagaaacatgtcatgcaggattttcctatagatctttttatagcctgaatatttatgattgcatccccatggtatcattgactatgttcctctattccctgtatttctgacaagttggtaattagatctagagagctgatccagtgtgggttttttgggccatgtacttacctcaaaaagtatgtaatgcctttctgtgatgctctcaaaatggatgctcattgcctacatgcatttttttcttggtggttgcaaagtgatgacatgtctttatcagacctctgtttattaactggaatacatctgtaaagagaaaattcaccttgtcggccatttgattactctgaagttctgatttataataaaagcagaacaagtgcttgattcttttcctttgtcagttttcaacaataacgaattctattcattagcattctctgaaagtaagtaatgatttttttttctccttagtattatgaactcatgcatataaatacttgttttacatggattcagttttttttaaattttgttttgtagaaaagacagggtctcactatgttggccaggaaggcctcaaattcctagtctcaagcagtgctcctacctcggcctcccaaagt

SEQ ID NO: 5573 - DNA, 1031 bp, Homo sapiens
caggtgtaaggggtgaaatttcagggactcccacttagctattcccaccatggtgctgagaacattatgaaagttctgtcagctgctttttcaaatcttttaaagcaattagccaaagccagtaaacactacaatcattacaattaccactgcccctctcttgttcatttgccaccactactatgtaaggcattgcctcactactctgtgtctcatccctattcatacctgtagtccttatcaccattttactagtgagtgagtctgtttcagagtcccatcctgtgtttctgatctctaggaccaatctcagtgtccatattttagcctgggttctccctccagaaatcagagcctaaaacgaggactcattgacaggtgtctttcttgaggtatgatcccagggaacaagctggagaagtgaaagagaggaggcccgtgcagtgtctaattaagctgtcactactgtgggcagtggggtagatctctctggaaccctctgaagagctgtgtaaaacacaccacagacttctcctctcaacggactgaagaggggagcttttatcctgcagcttctgtgctccgttagtcaacaagtggcctttcgggtgtccatcccacacacccgtggctacacatgtgcatgtgccacacagcagcatccaagaagcccagggtggaaggcaagagatacacagtgcagctgaggcaagggactgtggggtcactcctgtggggagccagttgctatggcaatgtcaaattgggctgagaaaacaggaggctgggcacaagacacaatatccttttgtctttagtttggggccttaagctgaagttcagggaaaaatgggaggaatcccattcaacagcttgttacagaagactaagtggtcttacgttatactggaagttattcgttacctgagataaaaagtcaccactaacagtgctgataccccatttgattggctatttgtgttgtcatcgcacaaaagaaccattgttttgacaataccaaacttattagc

SEQ ID NO: 5574 - DNA, 2920 bp, Homo sapiens
atgtcgagttattttagcaatatatttcagtcacttaaaaacacaagtttcctatttagcgtttgtttcccatttctccagaaactttacattttcctgtttcaagacatcttggttctgactcggcccgtcacacggaacgaacggcactcttaccaggtttaccggcagccaatcccagtccaagagctagtcctagaagacctgcaggatggagatgtgagaatgggaggctcctttcgaggagctttcagtaactcagagaaaggtaaaatgcaggccttcaataatttaaagaaatagaagctcagaactgaagtgaatttagttttgcctttaagaattctagagatgaaatggctccattgtcctatacttgttacatccattgagttgtccaggccttcccagctcgaacacccgcaggtgtatctaagaaataatgcataggcttaatgtattcacattgacataaataaattgccataaattgacagtcacgttaagattgtatgaccactttgtctagaataaacctttttttagcctgatttcttttttttttccaattttttttttcagctaaaaatatctttagaattcgcttccatgacccctctccagcccagtctcacactctgcaagccaatgacgtgttccacaagcagcagtggttcaactgtattcgagcggccattgcccccttccagtcggcaggcagtccacctgagctgcagggcctgccggagctgcacgaagagtgtgaggggaaccacccctctgcgaggaaactcacagcccagaggagggcatccacagtttccagtgttactcaggtagaagttgatgaaaacgcttacagatgtggctctggcatgcagatggcagaggacagcaagagcttaaagacacaccagacacagcccggcatccgaagagcgagggacaaagccctttctggtggcaaacggaaagagactttggtgtagagaaggctctgtgtgttaactgatgggagagactgtttgtttataaatgtgtacagttttgttttctcgtaaggggagcatcatagggttactttataccagttgtaacattttcattgtttttggttgttcttttttctttttttaatggcagctaaagatatacagattactgttaaattgcagtccttttttttttaaagatattttcttgaattatttagaacatggtaagcctggtattttttaatcaaacaaaatatttatgaaatgggttttctcttaattctggattcatcatggctttctaataccaattgtaatatttacaatattcaccaaaacttagaattttgcaaatgctggaattctgccagtgtttctttgctaagccttgcatgcaaaatttgaaattttaacattggcacccaaaacctacatggaatgtatgtctggagtatttcaaactttacattgaaacataatttccttggaaaacaaaccataagcctgaggaggtttttatcaactggaatgctttatattagtttgtttttcactgtacattcctcattttacattcatttaacctgccgattatttaatttttttattgtaaagtagtttttagcatttgcttttatttttttactttgatgccttttcaaattggcatgtctttaaagtatttttcttcctgattaaaaatgtgtgtgtatgtgtgtgtgtgtgtgtatatatatatatatttttaaatcacattaattttaccaagtgaaaccaagccatactgtttttgagccaattaagaaaattgccatttttaaagtgtagcatttcagggtaaagacccatgaaatggcttgatgtattctagactactgaaagaaaaccacttcaaagattttgttgaaagttttagtgttgtctgaaatgcaagagggaaggtgattggtagtgagttaaaagaaaaagagaggaaaagagagtagttttgtcttcaagtaaaatgtctggttgtgccagacatttcacaagtgtgaaaggagataggagaagctcaacttgagggcgtgtagtaagttgtagaaggctcgaggggacgtggacttatttgccttggtttgcaatacctgcaaataatgagtttgaaaagaaacaatgaaatgtgttaaaaatttgaccatattagataaattttcgtggatttagtcataagatggaaaaagactggtgaatcttttattacaaaatgtttctgttaaaatgggatcatcatctttgaaaggggggaggaggagtaaaagcccgattataatggtgatcaattcaagtcagtgttgactattctgtgaaatatatttggccagtggaaatgataatcagaaaagactgtaaatagatccatccaaatgatttctctgtacaaatgaatgatactattaaaaaaaaaaaaagcacacacataatcaccctgaaggtttcttgcctggtggctatgttgggggcatttggcaaaatatgctggtgtggcaaaggaggtagtggtaagcctcataaaagttagtaaaaattgtagttcaacctttgaaatcattgatgaatcagcgaaaggtaggtaagtcttgtgttaggaaatcttttaagaacatggtgtaatcagacacagcaattgtattgaaaataactgaacacctgttactttctggataggatagtaagggtagtagtggcaaaggatcctgattaatttcagattttaatgtaagtacctcaggttcttgtctttggaaattcacattcataagtgtatattacaccaatgattgtgatctgcaacaccagaaagcaagatttctaatcatttccagaggtgttgtatagaatagttattccagagttaccttgatcagcttctgaagtttaagaag

SEQ ID NO: 5575 - DNA, 1034 bp, Homo sapiens
gttgaggtcaggagtttgagaccagccaggttaacacggtgaaacgcctttactaaaaatacaaaaattagctaggcgtggcggcccatacctgtaattccagctactcagaaggctgaggcaggggaatcgcttgaaaccaggaggcagaggttgcagtgagcccagattgtgccactgcactctgtctcaaaaaaaaaaaaaaagccatattcattatgactttttaattttgtgacatgtataaatacattttttattatctacatagtaaatttaaaaagctgcatcaaactgtagccggtgaggctgcataaatgatgtgggacgaagagttataataacttgagatcactgtagtgaaaagaacgtgtattttagattagacctgagattgatagatatccttactaggggcttgcgggtaggacacttaaggaaattggagcttggagtgagctttgtaaaataatactaaaaccatcctcctagtggggttactgtgtgacgtccaagaactcgggggcagttggcttgctgtcctgtgctccgttctgacgactgagcccgcccaggtctgcagggtcctggggtcctgcgggttctgtagggttccctggtgtgtggagtccctacccgctacaagctccgttgggtctacggagtgtgcggggatctcccagccctgttggctgtacgggctcagtggggtttgcagggatcccctcgttctgtggggtccgtgggcgccgagtcagggccatgcccctgggctccgctcgcggagccggcgtcgcccttgttgactttcaaaaggcgccgccggccccgcgccctacacgctcagcacgccctgcgcggagttccccgctctggcgcactggccttggctggcgggagggggccggaggggctgccggcggagcagagacacagccaccctccccaacacaccatgaggtgagtcggggaggggcctaggtctcccacatgctgttgtgggaagctctgacccccgctgtgcctggggcggg

SEQ ID NO: 5576 - DNA, 2549 bp, Homo sapiens
cacattgactttgcgcttcaagtatttgcaggttattaccttagtttttactccctttgtgcgtgccgtgattatcttggtttaaactcgtatgtggcaagaaattttttaatgaatgtttaagtttctgtgaaaattgtgtatttctcaaattgtattttttggcttttaatagggtcactttgttttctgggtctctgttttgacttacgggaaatgctatttgttttctctacattttcttcatttaaaaaaaacctgtaacttcaggagttcaagaccaacctgggcaacctcatccctggaggaggggggaacccccacaaaaccacaactataactggctgctacttaggactacaggagatcttttttccaaagtggaaatagctttatttcacccagattatgtttatttaaaatttcagataatatataaagctgtaaaaagtaaagcaaaaactacctgtacttgtcccatccaaagataacttcatagaatatttgattatctactgtggtgctaggagctctgttggaccctggggactttggtgaacagacaatgcctgcctctataaaccttacattctgctggggaaaatagacctctcccaacccaccaaaaagtaaatttataataattccatgttctaatgctttaaagaaaacacttgcagcagggtaatccgaggtttatctgagtggatgacttaaatagatgtcactaaaggaacagaaagagctcaaccatgggaggaatggggagaaaaaaaaaagaattctggtcagaaataacagcatgcacaaaggccttaaaagaggaaaaagctataaaaagaaaaatccatgtagctgccactcagtagtaagtcagggaaaagtagagcaagatgaggtataggaaattggcagggaccaaattttacttgtccatggccaggagggtgtgttttgtgttctgagggcagtgagagggtactgaggggctttaattagaaataaagtgatctggaaaactaattgattaatttgttaagtaaatatttattgaaaccctactgtataacaggcactgttctgagcactggcatacaacaatgaaaaggacaaagccctgtattcatgaaactaatctagtggttggaggacaatcagataaacaagaaaaaataccagatattgataagtgtgcagaagatgaccattgtttaaattgtggtttatattctttaagatatggtatattacacatatacttcttttggaactttctcctgaataatttatggtaggacatttttcactgttactaaatagttttctttgggggcatcttaatttgtttttggattaagtatggtaaaaaatagcatgcataaatgaagaaatactgtgcagcaacaaaaatttgcatgttacaaagcatctggtgaacgttatatagtaacttccttttgacagtctgacatgtggctctcctacccccatcccagaccccagctgcccctttgtggttttttattttgacctattagtatggttaaatttatggatttactatttattgaaccatttttgcatcttggaatgagccctaattgatctgttattattttaatgtcctgatggatttactttgccaatgcatatatttaggatttttatatcaatattcataagagatcagtctatagttgttgttttttaatgtgttttgtctagttttggtattcgcatctgattgctttgtaaaaacaattgagaagtttcatttctttttctgagtttcggaacagattaaatagccaagtattatttattcttcagttaccaaattcatatttactaaacactatgtgctaggaattggactggatgctgagtaatcagtagtaaacaaaacagatatggttcctgccgtgatattgcttggctcattaaggaaaatgacattaatgaagaaactacacatatgtaattataaatcatgcaagaaaaggacaggatgctttgagataatatcattgaagatctttagattgtgctttttatgcatttgagtaaatgactattgagtacatacatatacactaacagctaattatttaaattagtatgtattgatttggtgtgtaattagggctgtggtgggtgcattagtaaaatgaggtcttcataattacacaaaatataaaataatggcaatagtagctaccattgtaggaggtagctgcatcattttttaatggtagaaattaagacaggttaagtagacacttttagtctaacatgttcaattgtatacactctttggaagtctctcttaagattatagtaaaagaataaggatataaatccacaaagatcaagaggaggtgagaggaagatatagctgaaatcagtatttgggaaactagaaaggagatgggcaagtaataaatgatttcatgaattagagaatgctgaaagctgaagagaggtaacccagcaaggagcaagcagattctttccacagaatctggaaaagttttaggaattgggggtat

SEQ ID NO: 5577 - DNA, 1047 bp, Homo sapiens
ggatggggtgggaatagaagggttggttgatggtctttatcattttgataccctggaaccccttctccactcccacacacccagacaactactctctcctctaccttgacggaagactgaaggtttatacccaggagactaggaggctccagatggttaaggtgggggtgaagcacctaaatgaaaatgaggattgagtgaaagtcaggtcaacatgctgaacctagagcggttgtctttttttgattggcttccaaactatcaggcttacgtgcccctcaacaaaacattaacggattcttagctggggaaacttaccagcccatggcacagtatttaacagatatgaactatggaaattcacccgattgaacagttggatccatcagatcacctggagagtacagccgctggtcaggaagcattgttcacgtaccacagcttctagtcaacttttatttcattttttgagacagggcctcactctgtcacccagattgaagtgcagtagcgccatcataactcactatagcgttgaactcctgggctcaagccatcctcccacctcagcctcctgggtagccgggaatacaggcgtatgcccccacgtccagctgatatttttattttttgtagagatggggtctcactatgttgccaggctggtcttcaactcctgggcttgtgatcttcctgccttggcttcccaaagtactgggattacaggtgtgagccactggtgcctggccctagtcagcttttaaatgcctcacatttgagtataaatgtacagccaagggtcgcctgccatagaatgaaagtctctaatgaaaaagagaccaagtaggaaataaaaggagctgagtataaatagatttacttcagggaacagaagaaacttcaacaaataaaactagtatctttaaagagaagatattacatctgtgaaagatgaaaaagtttatataaaaaaaactgctgcgacagaagaaatttcttaaaaatttaatacaaggtttagataataaagctgaagaattctcccca

SEQ ID NO: 5578 - DNA, 1046 bp, Homo sapiens
cttacatacctataacaactaactctaccacttatttaatagttgtaggtatattctgttttcttaagtaggttttgataaattatttctggaaaattcccctgttttctctatgatttcaattttttctataaaaattgtttctattacccttataatttatagtacatataaatcacactcctttttatttgtaatgttggttttcagtgccttgttttgtccttgattaatttgactaaagatatatcaatattttttgtcaaaaagctaatcttttttcagctattttttcttcggtttaattaatatctgatcttctctttttatttcctcctcttatttgctttgggtttactgtgttgttccattttctgagttcttgaattgaccgtagcttattgattctttaaatgtttttcttttgtagtgtatacatttgaaatgaacagtttcttatagctattttagataatatcttaagcttagatcatgttactctttaacttatgaaccatttatatgtaggatttttaaaatttaaatttccaaacatgaggcttttgagattaactttttatggttacattgtcattttacttgattttggtcagagatcagttgttttttagtactcttggaatttcctttgtggccaaattcataaccattaggttttgttttggggctttcagctcaacttcattgaggtctaattttcatacaataaaatgaacataatttaagtatatagttcagtgaattttggtaaatgtatataccatgtgatgactacaccaataaaaatagtgtgtgtccatcaccccagaaagttcccttgtgcataccccacttgtagtcaattttcctattcctgccccctgctgtaggcaactaatgaaatgctttttatcactatagattaattttgctgcttcttgaactgtatatgtatagaattttacagtatgtactcttgtgtctgatgacttttgcccagtttaatgttttgagatgcatgcatatatcagttttactttttttaa

SEQ ID NO: 5579 - DNA, 1034 bp, Homo sapiens
aaaacacgtatgttcctctgttgtgattgaatttaacctttctcacatgctctttattcatcacttaagccctaagggatatacttaatgctttataggcaagcacttttcaagttttaccgtcttagatttttaggtttctttgtggtatagccccctcttcattttcatagtctggtaatcttgaatgtttaaataaagcttgagcattgctcagcagttatgagaccattcattcataaagtgtttgtattgtttggtgcactgattggactctcaaatgaaagtgtattttgtaaagaagggagagcgtcaaatttctagatgaaattttcatctgtctcctcatttactgaacaggaaacttgtgctttcttgagagtgtaattgatgtcattatgaacccatgaaagatttaagattagctatgattttccaacaactttgtttttaacatacctctgctaaccataaaatcactgcttttatgcatatactgctatatattgaagaatactggcctaaagtggaagcatttttaaccataaataaatagttctggaaataaaaatatatataagcaaaaaataatttggtacttgttcctcctccttcgttttaaatcattggctttatttatagctatatagggaacagtattccccacactggtgttaatgaagtgttctctgaccatgtatttgggaaaccctgtattagtgtttttaattgcaccatctcttcagttttcagttcattattgtgcattatgatgctcaaaaatgaggacgtatgtaacttaaatctgtgcctacctattaatgacttacagaatttagagaagttgataatcacagtcttcatttccagagttactttttaaaatatttctttcagtgtaaacaatgtgtttctcaaatattggtctataggtaattcaattttgaaactttcttgcttttttataaatatcaaatataaagttcccaaaattattgtttctaaagaaatcttgatttgtgtttaggctagca

SEQ ID NO: 5580 - DNA, 1034 bp, Homo sapiens
ggtaagtccgtaaagcaaaaagaatcttaaaaaaaaatcttcttttacaagatgaagtgaggtttcattagttttataagatatgtatattaaaagccagtttcattaaatgtcaaacagttcataatgtttagatttctaactttaaacatatgaatgagatttgagtctaaaacttaacagtatttttcagtgtcaagagattggtattgtcttgagaatctcttctaaattgtcacaatggcaataagaatagaaaatagagctgaccgaacttggcaactatggaatgtgaggggtaagagaggaaataatcaaatataagcttttaaacttacactacagtgataattattaatagaaaagaggtacataagaagagaagcagattggtagagaagctgatgagttaaaaataaaaatattatctaattgtcaagaacaatgaattagcactaacttttttgaagattcagtttcttcatgtgtaaaacagattaaactactttatagagttgttgagaggattcagtgagactggaaagtgtttagcccaggagtttgcacctagtaagttctcagtaaatggacagtactacttttatgagttgaatttgagaaaaagtgagattttcataagtgtttctgaaagatagcctataggtcataaatatagttgggaaagggatcagaactagatttggggctagggttgtgggagtggggtgtgaattgaagctaagacattgttagtgggatggcatggaaagagaagatggcaaaaacagaacttttgggtcattaatgggaccagggtgtggggaggtacagcgaggatagaacgaggaattgtcaagagcagtctgttacctggagacttaggaaatagagtttcacggaaagcagaaagatctcacgaagaggggtattttttattagtgccaggtgctatgtagaatgtggagatcagaactgagaaagattatcgggcttcatggctagattcctgctgaccttttttttttttaaaaaaa

SEQ ID NO: 5581 - DNA, 1026 bp, Homo sapiens
tatatatatataaatataaacatacacattgcattatttgcttcatttgtttaattttttttctggagaatctgaaagtaaattacaaataaccactgcagcttacatctcaaaaaaaaaaaaaaaaaagacgttttcctacattgctacaatcttacgatttcattgctgatgtttgagaggctggcttcagtagagtggtggaagtagaaactggatttttcctgacaaatacacattcttcaaaaacacatacactggggttgatagtaaaattaacactactacttgtatgtcttttgtaatttttggcttgactagaactggataattttgtgtataataatactttcaattaataatagtttttaaagcttattgatcttttatatcttcatgagcaccctgtggtctttgtgtctgtgacccaggcccaccctccctacctgagtgacttattcttacctggaacccaagcttctgaccacagaattagcgctctcttccactgtatcagttttctcactcattgtctcttatgtttcgaaagagttgcctcagttgaggaatagccctgaagcctgtcctttcttcctcgtttttcactgctgctgccttgttggaatcctcctctcctgtctcaactatcacagtagctttctttctaattggtcttcttgcttctactttctcctgtctgatgggcaatctgctgcttaatctatattttatacttttacaggtgtatacatttccaaatactccgactgtcttcattcaagaccatggtatcatgggaaatctggttatgttgtaatttttaatataattaaggtaaagcttaaatgtgctgttacgtgatttccttttaaagtttaaggttatctacctttgatattctctgtagatattagttgaacatagttctcaccaaagttagctatccaaattcaggaaaagcaaaactatttttccttttctttaaaaagaaaactttgattcatttactagattgtaaactttttt

SEQ ID NO: 5582 - DNA, 1040 bp, Homo sapiens
ttgtcctcttttacattacagtcaccaaagagccattcagtgaccgtaacataaaagatggtgggctatagtttttcttttaaggaaatggctctcttaaatttagggtgattcgtatatttctttgatattgtgataaaaactatggatatttgtctcagacgcccaaatgtccaaaatttttgagtccatttttaagggttcatggataatcaaaactatttttggccttaagataattgtttttctaagaagtatagttcttaatacagttactgttaggggacacatatctgcatccttgttagactacttctaaatgaatcctagagtaaaggttattgctattcgaaggcatctgattagttttaatattttcattctagggaaaagtcaagtttgtgtctgagaattatacaactaactatactaagccatcttctggctatgattgccacgtgtctgaaaatactaacaaggtttctaacaagacgagtcattttcgtgcctttgaactgagtcaggtatagttacctgtgaatgagtaacacccaagatatatttctgactctaatgtgttaaatttcagggctcggtggggttgagaaaaacttggtacatatgcagttccatagtgctaccctgataatacttatttttcctctttcagtattacttttacgaactttcaggcaacaccgttattgaacgacccagacagatctgtccttatgtaattgtagcttttcgatacagggaatctaaaactatggcaccaccagctcataaaagcatgtaagtaattatgtgcatgctttgttttactgaatttgttccttttactcttgtaaacatgttctttttctttctttttctgctagacttgaacgcagtgaaaatggtaagaaatagttcattgattcttttaggttttttttttcttgagtaaatgtttcatcataaataatcagtttcttttttaccttcatttcttcagttctcatgtctccatggaaagggaaattaattgttcaagaccg

SEQ ID NO: 5583 - DNA, 1050 bp, Homo sapiens
gagtccactgaagactctaatagaggggaacaaaagagaggaagaatttattttcatctgtatttcttgttgccctggaacttgattattttctgttattttccatttcttaagatgcatagaaagaagtattctattggatggtatcttgcagtctttttagattcagcgttttgggataattttcatgtaaatatgagcttaagatgctacttataggtttgattcatcgtgagtttataatgactacatggtaacatattggctgtttaggcagtggtatgaaatgtcagctgtctcagtgaaaaaaataagtcttttctgattgatctgccatgttcttgagcactgttctaaaactaacctttcatgttctggttattttatatagacccaacagggccaagattatttcagctaaggaacttgaagtttctgatactggggacagaattaccctgattcccataacatttgcagaattttttcttttcttgaggtcaatattcactaatgagtatgggtagagggagaagagagggattgcagaatattccttcagttgaatttttcctttttatttaaggcaatcatcaaatgcttagaagatcgagggtttttcattttacttacatcatcagccttactatcagaaccaggtatggagaactgttttgggaaaaaatatttttcattatgtttacttttgctttataagatcaacaacctaacttttcttcttctgattctcattctgcatagattttggaggcaagcagatgggtctgcatgggttacatttatttcgttcacccctgtcaacaggtgaggatacaatggtttccagctcactctgtctgttggatatatttagtcctcatctgacttgacctctcagcagcacgtgacactgttgactgttttttcctcttaaatacctcttttcttaacatcactggttcacccttcttgacctcccttgtaggtttatgcttccctctgagcctcagtcccatatctccacttgtctactgacattgccactgagat

SEQ ID NO: 5584 - DNA, 1025 bp, Homo sapiens
ctctcagcacataaagccaagaaatatacatatgtacatacgtatatctacatctctatttatgtataaaaagcaaaaacagaggagttcacactcatccccaattctagtccagtactgccaggtttgtgctagcctccttctccatgtgtggagctcccttctctgaggttgactctgtttatcctcagtgttttgacttattgtccctcccaagtccccctcccccatcctcctcccaaccccaggtataatgagacccctcactgaggcactaatcctgacctcccgaaactccctgacctgagcgcgggccagctgccctccccctacccttgcagcagaaagctccattcagatgtcagcagtcctgtttagtatctacctcagagccccaacatgtgcaggtgggggggatgttgcttttttgtcatgattcttatagtctaatgggacaaggaaaacactgattaaaagagtcacacaaataaatgtgaaatgaaagtgatggtaaatgtgacgcaggtgccacgaggacgcattgagggtgattggcctggccggggaggtctttgctcaggaagtgctgcagcacagaaagcagagcataggggcctgcaggccgcgtgcaaaactggacgtgccgtgtgtcggttccacacatgaggggcctgcaggccacgtgcaggccgtgtgtcggctccacatgcccactgggtctgtctcagacttcacttacatcacttctgctgatttcctgcgctaactccagaatgtcacgtggcgagtccatgggggctggattactgagtaacgagttacttagtaatgaaggacacgtgtcccttattgtcacagtgtcccctgggtgcagggtcacaagaccacttctcatctggagtactaaggccactgcagaaaccacagagctgcataaagatttcttggtctgccctgctcttctcatatggaggtgtgtagctggcaaacaccacagggaacagcctccttgtgccagagggctg

SEQ ID NO: 5585 - DNA, 1060 bp, Homo sapiens
ataaataggaattcctaaattatcactaaatgaagtaaccatctactaaaattacctattttatctaatgtgcattttcacttgctgttaacttggatcgtcagtacagaacataatgtaaccttagaatgcataggcgttttccccattagagcatcccgcttataaaatatttcttgttcgtattattttaagaagttctttatcaattttgtgtttcttcaggtgactcaactacagcctgcctggatatggatgatgccaataaaaaattagtattttccctttggaaaacttgtgaacatgtgaatacacatgtgaacagtcttacatttgaaaaaccaatgttctacaacttggaaagttttcattttttatattttgctgaaatatgtcacagtggcattgcagttgtctgttagctttgggttgcagtgctagatattgttttaaattattttcattttaaacaagatgccttctaagctattgagcttattaaaaataattttacatgtttacttagttggagcaaaaataagtctattttaacaaatagctttgtttttgcatgctaatgtcagaaaggcatacgatgcacattatgctctgttttaaaggttttaccacccttgtaaaaactataatcttaaatggttttatttgctgttacacaaacaacactacataaaacattttttcctaaatggtacaaatttataaactatcatttttcacttacggtatttgtaaatactacactacaaaaatcagctttctgagaaagaaataatcatttatttatgatattgaaaatttctacagtaaacactcaaaaccaagcaaaaaacatttgtaagatacacggtatctatttggagcaacggtttttgtaactaatgtgtttcattttttaaataaagacaactaaaaataatctctttctgcaatgatttttatagcagaaattgacttatctggagtgttctagcaatttttaggtcatttagcagaacagtaagcttccagaggaaacctacacttctatcctttgggcctg

SEQ ID NO: 5586 - DNA, 1037 bp, Homo sapiens
ccccctcccgggttcaagcaattctcctgcctcagcctcccgagtagctgggattacaggcgtgtgccaccatgctcggctaatttttttgtatttttagtagagacggggtttcaccatgttggccaggctggtctttaaactcctggcctcaagtaattcacccagctcggcctcccaaatgctgggattacaggcgtgagccaccgtgcctagccaggttggaatatttgaacccaggataattggttacttcattggtgttgcacattcgattctgcctcttgtgtcttctctatgaaccttctttgctctgtatccccctttggataactaaatgataatgtatgtgaatctgtcccgcagctcctgtgattttctgggcaaaagcttggtctagaggggcgggatctgaacagtaagctaatggatggagctgtttcctgggtcttgctgttttccggttgggctgctcatttctttcgtgcagacttttggaggttgtggtctggcctttacagtcacgtcacatgtagtcgtcattggcaccgacttgctccttggctgcccttccttttcctcctgtttttcatgggtatgctgttgagcatgcccattggtacactgatcatttgacaggtttcgtgatttgtgagtgtgtgtagacaccactattggtattagatttagaattctaattttgggtttgttgacatcatctttttgctgcttatctcattcctctatccctcctaggctgattttatttggaaactgaatttggattccatctttgcctttctggctgtgaaattacctacttttagaaagcatctcaaatcttatatctgtaactgtcattcacatgccttttgaagaccagtctcagatttcagaggacctcctggagcataaacatggtattccacagataacttaaagccagaaattatttttaaaactaggactttcagcctccctctcactccgggggaaaaagtgattaaaacacaaacactgtttctcttttattcctt

SEQ ID NO: 5587 - DNA, 1050 bp, Homo sapiens
tccaatttctttttttgaagcccaatttctttatcattatgtgtaaggacctttgtagtctgtggctccaaattccttttccagccttatctcctgtcattcctcatcagggaacctcttgttttgatgaagcccagctttcctgccactctagtgcattgttaatgcctctgtatttttgcacacattgtttccttccgccttactgaatcccatgattctttcaagactcaactcttcgtgaagcctttttcaacttgcctaactctatttatgtttctttactatcataacacttcatgcatgcatttatgtagttgttatattactttatctttagtaacttgtgtttgttttggtagctgccttatgggtaggcttattcacttttgtatcactaatgtctaaaatagcatttaacaccaaggataccataagacaaagctctcatggagtttaaaatgaatctgggacatagcagatacgtaaaagtagttgtggaatgaattgactgtagaaaaagcctttcaaatatataaaattatattctagaccataagtagtgatctttctcttgtttttcaaacattcctttctttctttaggaaaaacatagaacggaaagcccagcccatccttgttggctgtcatacacgagtgctgtctccaagggagtcacaggtgtctcagatgtgagaggatcccggggagattgagcttactgcctgggaacttttggatttctggagaagcaggctgtggtagcctggctctgcgtcagtgaatacctgggaaaggagctggagctctattttgcttgctttctgcattcgtttcttttagagctaatggggacacaatattttgaagtttttccatttcgggtctacagcatttagtggtattttccttatagttatgttttccaaatacttctcaatttctttggttctgacatttcacaatgattttaaaaaaatgtaatatggaaattaaacttgaggttttcagaagctgctttcaaggtgtctagatacagagtgaagaatg

SEQ ID NO: 5588 - DNA, 1057 bp, Homo sapiens
gggctgctaatacacttcctgctttgccattaggtggcatctttataatttgaaggatatttcaatgtcttaggcaggctactcacataagccttgttaaatagaggaaacaggtaagtttgtatgcatgcagttggataatttgacagacagttttgagcatattttctcatctgttcctgatgacacttatcagacttagatgagattgggcgcgttcagggtggtatggccgtagacctatcagacttagagacctgaggtgccctgaagccatagagcaaccaagtggccagctgagggtgccagcccagccctcccgccaggccctcgccggctcaccacgctgcgctgtgctgcttcgtgagagtgagcgcatctgtgattgctgaggcctggcgctcatggggttgcacccagcttctgagttcaggtagttagacgatttccagcgtcctttcagaggggctctcagaactgcttttgtttgtagaattgattttggaaaagtcttaaaatattcatgaagtttttttttaaaaaagctggtattaaaccttgaaaaagttaactgaaatttggaagggtgatttctgaattagctagggaggaataatgaaaaaatattgtaaactatatcagctaaatcactggggtcttggctttatgtattttcaagcttaaaggaaatgtcaagctgggcacagtggctcacatctgtaatcccagcactttgggaggccgaggtggacggatcacttgaggccaggagttcgagaccagcctggccaacatagtaaaaccccgtctctactaaagatacaaaagttagctgggtgtggtggagggggcctgtagtcccagctacttgggaggccaaggcaagaaaatcacttgaacccaagaggtgaatgttgcagtgagccaagattgtgtcactgtgctccagcctaagcaacagagggagactctgtctcaaaaaaagaaaaaagaaaaaaaaagaaatgttgagtgagattctggcatttgataccatagtttagtggtggagtattct

SEQ ID NO: 5589 - DNA, 1110 bp, Homo sapiens
cgtgagccagcgcgcccagccacaacgttttcttaaatgagcatttcatgaccaagtcttctagaaagtataagtagaaaaaaaaacttaagatcttaaaatgtcacttaggattcttcaattctaaggaagaaaaatgcgaagaaattgaaaggacaaagttggggggcaaggggaggggggaacggttggctggggtgttgacaaaatcgtgtcactatgcagaaacttgagtataatgtgctggctagcttgtagaatcggtgataactaatgaatatcccctttcttctacctgctggtatgaaacagtgagacggtttaagcggaagcatcttactgccattgactgccagcatttggctcggagtcacttggctgtgacccagcccttcggtcaaagatggacaaacagagatccgaaccatggtctctatcctaaaccgagaacaaaaagagggagtaggggtatgtctcctctaaaactcttgcatttcaaaacctgtagtgtgtgggtcctttgactatctcctagtttaaaagtatttgtaaatgttgctgctgtgagtttgtagtcttcatgcaatagcttgacactttttttattgtgagttttccatgaagttttttttttttttttgagacggagtttcaatcttgttgccctggctggagtgcaatggcgcaatctcggctcactgcaacctctgccttttgggttcaagtgattctcctgcctccgcctcctgagtagctgggattgcaggtgcgtgccaccacccccagctaattttgttttttagtagagacggggtttctccatgttggtcaggctggtctcgaactcctgacgtcaggtgatccacccgcctcggcctcccaaactgctgggattacaggtgtgagccaccgcgccccgccgagttttccatgaaaattctatcctattatcatagtttgtaaaagctgtggacaagtgtgatggaatgaatcctattagcttgtgtaattataaagtgatagaagacatgagccagtgtcactcttattccaatccagaaacactgagattagttgactcttcattcatcttctctgtccaatctgtca

SEQ ID NO: 5590 - DNA, 1049 bp, Homo sapiens
aataaattaatgtgtcaccttcacaggaagaaatacaaataaaagctgggcgcaggggctcacgcctgtaatgccagcactttgcgggaggccgaggtgagtggattacttgaggtcaggagttctaggccagcctggccaacacggcgaaaccccatctctactaaaatacaaaaatgagctaggcatggtggcatacgcctgtagtcccagctacttgggaggctgaggcaggagaatcacttgaacctgggaggtggtggttgcagtgagccaagatcacaccactgcactccagcctgggcgacagagtgggattccatctaaaaaataaataaatacataaataaaaaagaaataaaaataaaagttttagcactgtcaaatgagaagagtgagattttccgaatcctgatgaccccaagcatgtgaatttctgcttaagcacatgtagacttgctgttgtagagttagtgggagcggggcactttgtgagtggcggtgtggttgtgagcagtcacctcctttttgtctgtccattcagatgttccctgtgcagcgtgtttctctgtacttgtttttactgcagggagtattgctggccatcacatcatgtgaagactggtctctgtctctttgcaaatgtgtgtctggtaatatgatagagccaaatataaatattgtttggattagttatttatataatcagttggcccataaatgtgtttttatctctttccactattaacatagataattgaaaattagtgtgtcttatatggattaacagcaggtcaacagtcatcgttcatttcttgtccatcctgtttgggttctctctacaggtcagggaagtcaaagatgcatccctgagttcttcctagcaggcaagcagccgtgcaccaatgacatggccaaaagcaattctgttggccaggacagctgtcaggactctgagggtgacatgatctttcctgcagagagcagctgtgcactgcctcaggaaggcagtgcagggccgggctcaccagggtctgccccgccctcca

SEQ ID NO: 5591 - DNA, 1035 bp, Homo sapiens
tgaatttttctcacttttcatacttttatctactttagtcttttaccagttatgcttcctaccccctctacccctgcaacttcatagttgattgtgacaggatttggatatcttctggtcaagaggaagtcatcccaggttcaggtctctaaattggttcatctgtgatgaacatttatttcctttgttatcacagaaggcgtaaagacagacatgaagcaagtgggtttgcaaggagaccagatccagattctgatgaagatgaagattatgagcgagagaggaggaaaagaagtaaggcatgaacaaatatgtcttaaacatatataaatactggaagtgcaattccactatgtgctttttcttttcagtttgataaatagttcatttgacattgatttgggtaattttctttctggaatcccagcaatacacatttgcgtcacagttttaatttatattgggttttcatatgtattttcctttgagcttcacaaccactttctaacatttatttattggatactttgggactagcttaaaatctattcctgcactgtctttacctgcagcacagtccagttggccgatgctgaatccactctgttgtttctcttaggggggaagcatagttaacattgagtgtgtctgttttgggcattgtgacacatttcatatccgctatcttagttaatccccaaatgtttggtttttattaacttcttttggaattcagtatataggttgaatatttgtaggtctcatttttccagcttataaattgactgccctttttaataaggaggcatgctttccatactaaggacatttgtttttttttcttaaacaccagcaggaactagatagctttgaatgagaagactttgtttgaccttgtagctcatgatagggaggtagtggcatgcccatcatatgtatagttgttgacagattgatgttcttattttaatgtgattagtagcagatttccagtaatcaccctgaatttttttaactgaacttattagagctaat

SEQ ID NO: 5592 - DNA, 1633 bp, Homo sapiens
gcagtctcttggtaaatgatgcctagttggtgttttattttcatttaatttttacagtctgttctgtgttgagggaattcaggaaagagacaaacatatgttagcattttaatcagggaattaagtttgagtcagcctagctgaacttcctttgctaaagaaagaagaaaacttttctggcagccccgttcatgcacagcttaggatacatcacgagcctgacaggtgagtgccagaaaccaacagttgtcccgacttgtgaggttatctgaagtaaggcagccggtggctggattagtaactgcatattcccctgggcccgtgaccttgaacgtttgctccaagtcaactcacctataggaattatcactcacatgccctgtcagccctttgggaagtgagatgagcaaaaattgcaagtaatggtggaggctcaaaacatccagatgctattgtaaaaacatgccaaagcaaagcagaggcttttattgcagataaggctgtgttttcgctcagagaccaattgtgtagatgcctaggacataaatggtggggatcgctattgaaattaaattaattattgtaagtaggactcagttctgtaacacatctaatgatatgctgctcagttctgtaacacatctaatggtatgttttgatacagatgcatccaagaagtcagattcaaatccgctgactgaaatacttaagtgtcctactaaagtggtcttactaagggtaagaagctgaggaaagcaagctctctgcctgcctagatttgtgtgtgtcaccccagcctaccctgctccccctaaaagttaaaactgaaaatgatacttttgcaaataatactttgggcagatcccacgtaaggctgattttagatttttcactaatgtgtaagtctctttgctaagtacagtgtttaagactgcagtgagtaattaaatatttgaaattgctagagcttcagatagtttatacattttggtgcttgcatagatgcttttgtaactctttacaggcttaatatatgttttagtgttttaagaaatactaacttttgggtactttggggatgaaatttttcattatgtcgtttgggattgagaacatttaccatcactaagtcatatttatatacctctgctaggtgtttgtaagttatacttggtacttgaatttgtttatttttgtgtttaaagaacatggttggtgcgggagaggtggatgaagacttggaagttgaaaccaaggaagaatgtgaaaaatatggcaaagttggaaaatgtgtgatatttgaagtaagagtgttttcttttgatgtttataacacaagttgtaattggcacattacaaaacattttctacaaacaggacagggtatgctataagtaacattcttactgcagaaggtgacaggcgttggttatttgtacttctcttgctcaattattacagttttaaacataaagacaatgatttcaagttttatttgatgaagaaacaggaatgcttcatgattgaggatcagtatgatgactgaagaccttgattctagcgtgctcagtagtttagttccttagacatgcctttggtttcagtcatttggtgagtatttagtgcctctcac

SEQ ID NO: 5593 - DNA, 1009 bp, Homo sapiens
ttagtgatcaggaaaatgcagattgagaccaaaatgaagacacgtttcactctgtgtgcccggtagaaatgaggaagcctgatggctttcagtgttgacagaatgtggaccacaaaagcccctcacacattgctggtgggccgataagtggtacaaatgccttggaggcagtttggtcttttctttggtgtaaagttgaaattcacatacttcggctaggtgcggtagctcacgcctgtaatcctagcactttgggaggcctaggcaggcggatcacctgaggtcaggagttcaagaccagcctggtcgacatggtgaaaccccatctctactaaaaatacaaaaagtcagccaggcatgatggcatacacctgtagtcccagctactccagagactgaggcaagagaatcgcttgaacctaagaggcggaggctgcagtgagctgaaatcgcagcgccactgctctctagcctgggtgacaaagcaagactccatctcaaaaaaaaaaaaagaaattcacctactcgaaaccagcaataccgttcctagtattgctgatgttcacacaatcatgttcatagcagcactctcatagaaaaacctttacacagcacaaatgcactttgacaggaggataaattattcttagtatattcacacaaggcaatattataaataagctacactcaaatagacagcaactctcaatattgttgatgactattaaaaaatcccaaaacaggccaggcgctgtggctctcacttgtaatcccagcactttgagagacggaggtaggcagatcccttgaggtcaggagttcgagatcagcctgcccaacatggtgaaaccctgtttctactagaaatacaaaaattagccaggcgtggcggtgggcacctgtaatcccagctacttgggaggctgagaagggagaatcgcttgaacaagggaggtggaggttgcagtgagaggagatcgcgccactgcactccaacctgggtaacaga

SEQ ID NO: 5594 - DNA, 1050 bp, Homo sapiens
caggccgcagatgaggaaacagactaggagggatttaggcatctggactctgcggggcggcccgggcgcgcagcccgtttccctgtgggttgagggcgcgggagaagtgggcggcccaccccaccccgcgcgtggatgcggggctggggcaggtccgcggtggaggcgccgccagtgagcacccggggaccgctcctagcccccagtgtgggacacagactccctgaggacctcgtatgcgttgggtctgtggctccatccgaatcttcatgaacagggcctgcggtgaatttggggagagtgagtgagcgggtgaagggtcaggaaataagtcacaggaggcatggttgaagaattggggatgtttaacccagacatggcaggactgggcacacttgacccctgtctggaagtatttgaaagacttctgaagggggccagcccctccacacctgtgggtgtttctcgtcaggtgggaggagatactgagaaaagaaataagacacaaagtataaagaacagtgggcccaggggactggcactcagcatacgaaggacccgcactggtggccgtctctgagttccctcagtattgatcattatttttactatcttggcgaggggagtgtagcagggcaacaggtggggagaaggtcagcagggaaacatgtgagcaaaggaatctgtatcatgaataagttcaaggaaaggtactgtgccctgatgtgcacataggctaagtttatgtttccctttactcagacatctcagtgtagcaaagagtaacagagcagtattgctgccagcatatcgcctacagccacagggcggttttctcctatctcagaatagaacgaatgggattggtctgctttacaccgagacattccattcccagggatgagcaggagacagaaggcttcctcttatctcaactgcaaagaggccccctctctttcactacttctcagtacagaccctttacgggtgtctggctggggcacggtcaggtctttcccttcccaggaggccatatctcaggctgtctca

SEQ ID NO: 5595 - DNA, 1263 bp, Homo sapiens
ctccaaagcccttgccttttctcgatgcgtctatttttttgtaaatgttttagttcagaggtacatgtgcaggtttgttatataagtaaactcgtttgttgtagattatttcatcacctaggtataagcctagtacccagtattttattttcttttttctttgtctttgtttttttttttgagacagaacctcactctgtcgcccagactgaagtgcagtggtgctatctccgctcactgcaacctctgcctcccgggttcaagcgattctcttccctcagcctcgtgagtagctgggattacaggcgtggatcaccaggctcaactttttttttttttttttttgagacgaagtctcactctgtcatccaggctggagtgcagtggcacgatcccggctcactgcaacttccgcctcctgggttcaagcgattctcctgcttcagcctccccagtagctgggattacaggtgccccgccaccacgcccagctaatttttgtgatttttagtagagataggctttctccatgttggccaggctggcctcgaacacctgagctcaggtgatccgcccgcctcggtctcccagagtgctgggattaaggtgtgagctaccgtggtagagatggggtttcgtcattttggccaggttggtctcaaactactgacctcaagtgatccacccgccttaggctcccaaagtgctgggattacagacatgagccaccgcccggcttagtatttttttttttctgagcctcttcctccttccactcaatgcatctattttagtggaatgggttcctttgtgaacaatgatgttgcagttattcatgaagtaataaagtgtttgtgtattgattgatttctttggactggagggtttgcccagccctgttgagctttgtcattgtctacctcaggggaagagggagattgtcgctggtcagaggagaatgccagggcttctctcagacggaggcagcctcccatctcaccgcaagtcggatcttgagtagcacctgtttcggcccattgcccctttaacaaggggcccaggtgcccttggacttgctagaagaataatcatgactttgagtttaacaaatgtggtcacagtattccactgcagtccacctttcccacttctcctagcccttcttcttctttttttttttttttttttttatttgagacagagtttggctcttgttgcctaggctagagtgcaatggtgcgatctcagctcaccgaaacctct

SEQ ID NO: 5596 - DNA, 1061 bp, Homo sapiens
tggggcactttcaggtacacagagtgttggcaataacagtaaatatcctgaggtggggagcacttggatttgcctggcatggattgcgtgtttgtaggtgggaactcatccgagtgtggggaccacagtgctgttgtcatccccgtatgacagatggcacagctggggcaccgcaggcgccaactagcccggatctctcactgaccagcgctagggctgcaataggaacctggctggctggctccagggcccgggctcttatccgggaacagtgttgttcttatttgcctagatcaacaaagtcactgtagagaaagacaaaaacaaaacaaaatccaaaccaagtaagccaaaaaaagcttagcctggggacccagttctacatttggtggtggtcataaaagaggctacccaaatggcccgtaagcatagaaagcacttcaacctccctaattattcaagagatgcaaattaaagccacggtgagatactactccacacctgttttagttagagtggctaacaagaaaaagaccacatgttggggagactgtgactcacaccaactctcatatcagagtagaaatccatacaatcatcttggcagcatttaccagagccaagcatctgcacacagaaggatccaggaagcccccgccttggcgtagacgcatgcactcaaggtgcacagaagaatgttcactgcggcaccccaacgggtgagagcccccaaacggaaagaatgcaacgttccatcagtgtggagaagtcaagtgtggtgttcgtgcagtggaatactacagaaggatgaagaagaaccagctattgcaggaagggacacggtggaagaatcttatggggaaaatgctgagggaaggaaaccaggccaagtaaaacagatagaaagttcaagaccctgcagatcgtctgtatccgatgtcaagacatgggttcccttgaggtggtgatgggagggggcacgggggtttctgtagcgacctggttgatgggtgggggttgcataggcatgctttcctgtgaggatcgtcgagctgtgcatt

SEQ ID NO: 5597 - DNA, 1642 bp, Homo sapiens
gacatggtggtgggtgcctgtaatcccagctacttgggaggctgaggcaggagaattgcttgaaccagggaggtgggggttgcagtgagctgagattgcaccactgcactccagcctgggccacagagtgatactccgtctcagaaaaaaaagtgaaaaggcaagggcctttttgtcctatctcacttcgccttactgccagtagtagcttggtatttaaatagtgtaacaggtgcagtgtggtttatattacgctgtctcatgtacagtaagtgatgagatgggagaagtttagacaactgctctaggctgcgtctctacaaattactcatttcacgttgggcaggtctttcgttgtcagcaaatggaaagtcaaattaaatgtatttgtcattatctttcagcattggtgtttgaaatattagtgatgtcttgattcattgtttattcaaaatagaatttttagctgccatgggtttaaaaaaggtaagaattttgctcagaagtgtgcaccttccgaaactgaggatcatccttttgaggtgaatgtgcagaattattagcatttatacttctcatgaactttaacatttctgagttttagctgttttgaaataattccagacttaatagaaaagttgcagaaatagtgcaaagtgttccatagcactctcacctagattctgcaagtgttaccatttgactcctctatcattctctccctctccatttctatctatctatctatctatctatctatccatccatccatttacctacctacatatatatatatatatatctgcctcataaagaggaagagaaaatatatttatatggatatatgtgtgtacgtgtgcgtgtgtgtgtgtctgaagacagagagaaatatatgtcgtgcccagcccctatttttttttctgaaccatttgagagttagacgcagacatgatgcccttttgtccctaagtacttcagggtgtatttcctcaaaacgagcacagtatcatgattgaaatcaggatatcaacactgatacagttctgttatctaatatgcaaacttcaagtctcaccaattttcccactactgctctttacctttagcaaaatcaagaacaacatttagagtgattcaaggtttcatccaggctcacaagcctttcatctagtgtgtcctcaatctttgctgcctctcatggcctttgtatttttgaaaagtgcaggcactgatttttttttaaacattttttttcaaaagtttaaaatgcgataaaaatgtgtgacacaaaatctaccatcttaatcatttttaaatgtgtacagttcagtagtgttagatgtattcacgccattgtgcaatagatctctagaaccttttcatcttataaaactgaaactctgcacccaataaacaacaattcctaatttcccccaccgcctgcccctgacgtcccccgttctgctttctgtttctgtgaatctcttgtagtgaccttgtgtaagtggaatcatacggtgtttttctttctatatctggcctgcttcgcttagcaaaaagtccttaaggttgacctctggtgtagctctgacggatttccttccttttaatttttttttttttttttttttttttagacgga

SEQ ID NO: 5598 - DNA, 1036 bp, Homo sapiens
catacctggctaatttttgtatttttatagagatggggtttcaccacattggtcagtctggtcttgaactcctgagctaaagtgatctgcctgcctcagcctcccaaagtgctgggattacaggcgtgagccactgcgctcgcctcctgttcctttttcatccacgctttggaagaagatggtgtcagggtcatagaagacccttagagaggagacatggggtggggtggtttaggcattagtagtggccatgtttcccctaccctgaatggggctttgcccagggctgttccatcgggtttatctgggcctcacagacgtctagagttttcttcatcttgttgtgtctgggtctgcacaatactgaggaattgtctggcaagaaacaaagctactcatgttctaggacatagttccatggctaagcatgaaaacaagcaagatccaagtgttcaagggcccctgcaaccctgacatgcctcctaggtggctggccatgtctgcatggggtcactgcggcccaggactcagactttcctctagaagttggttttggcagtgtacccagggagactgagtcaccaagcaaactggtaagagaatgcagataaacgtggttcacttccaggaggatcacaactgccagcagagagtattcggggggctccccgcagaattctcttgggggagaaggtaggtgggagttaggggccattgtgtgtggcgaggcagagaagggagaattcgggctactgtcctggctgctctggcagagccaaggtggtgtgatacgtgagtttctcagtccattttccattcacttattctcatggcagatggtgatctcctttggggaggtgaggcccgtcactacttaatgtggcaaggttgcgggttccaacatcctgctctttttctactctacccctccccttgttttcaagactttgagaggaattttccagaatcaagctttctggctctccttcctcttttgctttcataaggacaaacactattcgggggagagggcggg

SEQ ID NO: 5599 - DNA, 1055 bp, Homo sapiens
ctgcagcctctgcctcccaggttcaagcgattgtcctgcctcagcctcccaagtagctaggattataggtccccgccaccatgcccagctaatttttgtacttttagtagttttaccatgttggtcaggctggtctcgaactcctgaactcagatgatccacccacctcggcttctcaaagttctaggattacaggtgtgagccacagcacctggccttacagtacattttctatgtttagatatacaaatacctaccattgtgttacagttgcctacagtattctgtagagtcacatgctgtacaggtttgtaccctaggagcaacaggctataccatgtaacctagatgtgtagtaggctctgccatctaggtttgtgtaagttcactctgtgatgtttgcacaatgacggaattgcttagtgatgcatttctcagaacatatccccatcattagccaacacatgactgtatttcttttcttcttcttttgcttgaccaataaattaggacatcttaaaacttttgagaaatacacaaaaagctcaagccatcctccacatcttttattttttttttaaggaagataaaacatattcattattccttaagtggaagtgaatcctcataaaggtcttcctctctgtcgtcttcatgttgagtagactgggaaggaggaagagggggctggtcttgctgtctcaggggtggcagaggcaggagaaagtaggtgtacctgtgtgattcaaatgtgttgttcaaggtcaactgtatatggttggctctcacgatctaatattttacataggaatcttatatctctgtctgtcataaataaaatgaacttaaaatttccttttcttttactttttgttttaccaatcaaggttatgctagcctcagaaatgactagagttgcttttattcttttctattttctggaacaatttacttagataaatcatctgaggtcaggagttcaagaccagactggccaacatggtgaaatgctgtctctactaaagatacaaaaaaaattagccaagcatggtggc

SEQ ID NO: 5600 - DNA, 1032 bp, Homo sapiens
agttacatccgtcccggcgcgggcggcggttccccaccaaaagcaacccagatcttccccgcacgcctctgacctgactgcacgactgtcacaagtcgcgagctggtgcaaactgcgagggccgggaaaggagacggggcacgcatgcaccaaaaagtggggaggcagagctgcagggtgtgcaggataacggagtgaattttaggagtctgcctaataaggggccgcccccaatagttttccctcgacttaggtaatgaattgcagatcgaaatgggtctagttttattcattcttctactcggggcgataaaggtttattgaatggtgtacatggtgagtgtgaaaaccagatgccagctgcccccagccccagtccacttcagtccagctccccggggctttcccgccccctcctcgtacccagcaccgcgggcctctcaaggttcccagtctttgggctaggggaggggagcaaggctcagttcaagtccaggtttctaagggattcagcaaagtggacaaggacgaggtgaggtgggaggatcagggaagcctcctccccgcgggtcgcccgggtcgtggcgggggatgggctcacgggtattatcagggagcagcctggcccatgtccttacctggactgcgcctgccccacagcgcgtgttaggaatgcagagtattggggctccatggccctaaaggagctgcattggtaggatgcactttaagcagcttcccaagggattcggctgcggggtccacggtctacactgggcaggactgcgtctctgctctcctcccggccagcacagttgaggtgaggggccggaattagtcggggaagctgtgccagacgtcccgaggggacaacgggacgaggggataacagcagccaggacccttcagcagggctgggcgcgctccaggcccggggcagggcggcgggagctggtgcaccgccgtcgccggcccgcagggggagctcgcaggctgcttcccggctcgcccaccctcctccccacgtggaag

SEQ ID NO: 5601 - DNA, 1033 bp, Homo sapiens
aagttgccatgatcagtggagcaaaggagggggtattagtactggtcaggccagtgcaggtttgtaagcaacaggtaaaagacagccttttaaagcaccaaactttgttttttgagacagggtctcactgtcacccaggctggagtgcaatggtgcaatcacgtctcattgaagccttgaactcctgggctcaagcaatcctgtctcagcctcctgagtagctgggactaggggcatgtgctactgcgcccagctaatttttaaaaatatttttgcacaaacggggtctctctatgttgcccaagctggtctcgaattcctggcctcaagcaatgcccccttggcctcccaaagtgctgggattacaggtgtaagccagggtacctggccttttttttttttttttttttttgcctcttaaaaacagtggaatgagacaaactgccagcttgtctttgctcaggatttagacaccatgggaaattgagtctgaagaaaggttgatgtggcactcaaatacggatagaaagactttcatctcagtagcgagttacgccggctgctggtgttctagcttaaggaagctgggtgggtgatgtcctagagaaatccctgccttatccctgggtagcccctacagtttatttactggggatgcattctgtgttagggtttgagtcagtgggggatacaggctgtgcgggctgctgcctgtctgtctgtgcattgcacaccatcagagaggttagtaacttaatctatccgggagagcaggagtaggaacccgggggtgccagcctctcactgtccaggtgggggattcaccatccatctggctgctgctttccataactggctccttgtgtcactgtatcccacggctgagtgttcaccagccagccttcagttttcttttggcttcctgtgtatgtttgcctgcagggaacgggccccagtaggcagtctccgttgtacactaatggtactgcgggcttgtagacagccagggcttagcccaaaggcactactcagc

SEQ ID NO: 5602 - DNA, 1032 bp, Homo sapiens
gcgcaggctgcagtgcaatgcatgcactcactgcaacctccacctcccaggttcaagcgattctcctgcctcagcctcctgagtagctgggattatacgcatgtgctaccacaccctggctaattttgtatttttagtagagatggggttttgccatgttggtcaggctggtcttgaactcctgacctcaggtgatccacctgcctcggcctcccaaagtgctgggattacaggcgtgagccaccacgcctggccgtgtctcatttctaactgtgggtgtacaatttcaatttcagaggagatgccctacctgaaatgccctcttcacaccgtcctgaaactgacgcctgtcgcttatggtgagtagcaacccctgccaagccctgtccccctgaaggtggccacagtagcttcttgtggccgtgggctgtaagcggtgctgtccctttaacagcagcttcctctgcccccatcccacgccctccaggctgccgtgtggaatccatctacctgaacgtggagtccgtctgcacacaccgggagaggtcagaggtgagtggaggccccaagcctcatcctggccatcatcacacgatagccctagtgggtgatgggcgctcaggaggccccggggccgcttgcctgcaggtgctggcctgtctggggccatgggcctgctggctgccttcctcagcacctctttgttcctgcctgtctgttctgtggcttctggggccttctcattttctttcttcctgtgtcctcttcctcccatttctgctgagctcgagatatgaatattagtgaggaagatacattctctctttttttttatttgagacagggtctcagtctgttccccaggctggagtgcggtggcgcagtcacggctcactgcagcctcaacctcctgggttcaagtgatcctcccgcctcagcctcccgcgtagctgagactacaggtgcgcaccaccatgcccagctaattttaatttattcatttttttagataatggggtctcactgtgttgc

SEQ ID NO: 5603 - DNA, 1124 bp, Homo sapiens
aagcagcatattccccgtgcctgattgcggcaaaagcaaccactctcttgtctgccagagactgcagtataatttgaacgttattcctaaaagcacagcccagagtttgtttctgcagcgttcgcaatgattctggaaggtgtttactagcctgtgataagaatctcttcttacgtaaactagccagagtgaagtctgttctttgccagtaaacttttaccctaattggtgtgattattctcaagaaaatgggcaatctggattgtcaatcttatcagattacgtgtgaaagcaacaaggatattttgccttcagaatatgggttacctgtttttaactgtgccagaaagcttaatttaaaataatatgatgagctcagggttgagattttcttttaaagaaacaggcagaggaccacagcacttccctgcgtgtgctcatgtcttgtaggcatggggctgatgcagctggcaatcaggcatggtctgtcctcatgggctgctgaattacagcacaggttctgcctttccagccttcccattctcgtgtgtgtgtgtgtgtgtgtgtgaaaataggacaattctgggaaagagaggattggaaagaggatgtttgggcagattcaaaccccagagaggctttgtcagccacagaagcaagccctcctcccctaaggcttaatgcaaacatctcacctgggtgatttctaacagggatcacgcttctcacacaggaccattctctcatggcctccagactcttgatttctctatccctcgtaactccagagccatatcccagcaaggctcagggggtaaatacggtcttacctgggaggagaatgcttacagactcaatgaattacaagatgttgccaatgaataccagcagaaaccagagaagcataggtgagaatgaatttttaaggtcataaaccaggaagaaaggaacgcaattttaggtgaggctgaatttctcaaattaggggcacttaccagagattctggattcaatgtaccagctcaaataagagagagtgattctaaacgttttctgggaaggttggctgaagcttgccctcaggaagtagctgaccagactcaaggactctgagactccagagt

SEQ ID NO: 5604 - DNA, 1029 bp, Homo sapiens
actcgggcttagttttcggttttctaaaggattaggaatgggatgtggataattcagtatcatttatgaaatctttttttggaatttaaacaattgtaagccaagctttctgagttacagggctagtttcagatttggttttacataaatctataaaccattgcatgttgggaaggtccaggaattttttaatcattatgttttttaatcattatgttttctatatcagtaccaaaagatagtatagccatccctcagtatctgcagtggattggttccagtactcactctcacctcccccaggataccaaaatctgaagatcctcaagtccctgaaataaaatagcacagtactacatataaaaaatgcacatcctctcgtatacttttaatcatctctagttataatgctatgtaaattgttgttgtattggtttttgtttttattattttatcattatttttgtcttttttccaaatattttacatcggctgttggttgaatccatggatactgagggccaactatatactgctttcctcaagaaaatttcttagttgttgaaaaactttaatgtttatgaaaaaaaggttaagataatgggaattttattcaaaaagttattaagttgaatacccactatgtgcacagtacagtgctagacacagtgttaaggatgtgattctctcttttaaggcacttatattctaataggataagaaacatacaagtaattgtgattagataaaacgtgtagtaagttctttttgactcgttccttcttacctcctgctaatcagttaccatgctctttaagttttaccttctaactatctcttgaatcttcccccttctttatgcccacttaatgcagatccttgtcatttctctcctgggttcaaaaaggtaattatttgagtgccccttaagtgtcaggccctgtgctagacactgaggatacagtggtaacagtatttgccttcagagagctcagtcttcacagtaaaggcagacactaaataagaagt

SEQ ID NO: 5605 - DNA, 1080 bp, Homo sapiens
gtggtaagtatttttgcatgatgtactcaaggtatcaagtttaacaattgactttttttcattggaaagcatatgtgattaactagcatggattgcttcttgacctgcttgttttgtgtttgtctttttcttctaatataataaccagggattaatgaaaatcaagttccatcctcagacaagaggtaaagttcacacattcttcccatgtctgttcagaaaagaaacctattcagatataagttaagctaatttagtaatcctagaattgtcctctgagagatttagatggatgggccacttcacagtagcagccaactcacgggagcacctgggcaacgctagtggacttttttgtagtgagtgtgttgatcatagaaaatgtagatataaggaaataaactttgaggatagagaattaacattattttgagatattatatataggttgtgaagagtggtggttgtcacactttatggtctctggaccccttaatgtctgattcatgtagcagaagccagctagattttcatctgtctctattcattttgttgtgatgtcatggatcatgtggcctctggaaaactctactgtatactcgagaatgagaatataacaggcaaaataacattatcatgaaaatagttttgacctcatgaaccccatgaaaggttccccagaccaaaattttagaatcactggtatagggtaacactttattgtgtaaattcagttctctgtaccccacttaaatatgtattattatctcttgacattattttcccaaaaaatgctgtttgatttcttacttgttctgtactttgtttttcaggtaaagaaggaaaattcagccagttgattttgtttttagcttactgctgcctttgtccgaagaaactgttcctccattatttgaattactgaagacagcaagatatttgtaaattatcttaaaataaacaacttaaaataaaatcattgtttttcttatatataagaacaatagatatagtttttgaaatgagatgatactaaaacatttaaaaatattaatatgctactattaaaattttttagta

SEQ ID NO: 5606 - DNA, 1408 bp, Homo sapiens
tgtctttttatgactggcttacttcacttagtatgatgtcttcagggttcattcatgttgtagcctgtgtcgggatttcgttgtgtgtttcgttgtgtgtttaaggcagaataatatatgtacattccacatttgtttatccattcactcactgatggacatttgggttgtttcaaccttttggctcttgtgattaatgccgctatgaacatcgatgtgcaaatctctgttcaaattcttgctttcaggtgtttttttttgggtctgtaccttgaagtagaattgctggatcatatagtaattgtctatttaatttttgaggaagcaccacactgttttccacagtggctgtaccatctaagcttcctatcagcagtgcccaagggttccaatttcttgcaattcatttcttagaatcggttctactttaatagcattttgaagtgttacctatttgtctcaggaagtatgtttaaatttggcataagttgttgtacagtctgtgtgtcagggttgcctcatctgaaaaactggacagctactggacctaagtggtagggatttgttgtgaattggtggctcatcatttaggtgctctggatcttagctgcagtgggttctactgaatgatactaacacaccgacagcccagaaccaaaactaggactttgatcataatctacacttaactatttggtccttcttgtcttatttttatagcatgcaaatattccataataaaattctcttaaagtgctatggttatcatatttaaatactagcaaggaaatgtaactaagataacaggtttagattaggtagtgaagaagtatgaaaaacaatttagtgttttttttgttttgttttgtgttgttttgatactgacttctggctgaaattactatattactatagatttttgggtttcttttctgggttatttgaagcaaaaaaagaaactcatttagttttatgcaaacaatataaattataaacattttaaaaggaaaataacaaatcttgagaacactacttttcactttttatctaacacatgtggattaagaaggaaaaatattgctgatttgtaatatatgcatatggtttataaggatgcagtaagtggtaggcagtacagtaagatgcttgtcaaaacgttctcctcttcataagaaaaggatataaaatgcaattctttggttaccatttaaaaatataaccatacaagaccatttcttgtcatttacaatctgaaatatttttttttcatgggtacagcatgttagaaagttcctggtattctgattagtggtgcaaagtgaggtacagaggtgaacccctttgataatgatgctgttcaccatgctctttattttccttttatttccttaagagccacagacaggcc

SEQ ID NO: 5607 - DNA, 1025 bp, Homo sapiens
gcatggtggtgcacgcttgtagtcccagctatcagagtctgtggtgggaggatcagttgagcccaggggtcaaggctgcagtgagctatgatcacaccacagcactccagcctgagtgacagcgagaccctgtctcaaaaaaaaataaaacacatgacagcgaatattagttctcgtcccctttttcttttcttgctcttaaataatttacttttgaattgaaatacaatatacattagtgaagtcacgctataaggggaatcggtgtcaagctgcattcagtggcacacccatagtcctagctacttggaaggccaaggcaggaagatcgcttgagcccaggagtttgaggctgtagtgcgcaatgattgagcctgtgaatgcccactgcacttcagcctgggcaacatagcaggaccctgtctctgaaaaaaagagacgaatcaatgtaaagtagtgttaccatcacgtgctgaggatctgagggaacagacttactagctgggctggataggtacttgactgaggagctgtgtgattatccgcagtgtgaagatgacagatgaggagatgatgtggaaggagttattgcctgctttatctgattatatgtttagaagtgagacctctttgaaaatattttatacatgcatatttttgcttggactgttacagttctgatggctggtacccagtgtgttttatccaagaacattctctccccagcttgccatacatattttcagattcacaccaataccatatttttttgcttcctattttattgtgctgaggaatgtctgaaaatagtacagcgtactatgccaaagtcattgttggttctcacagtgtggtctctagatcactggtcaatgggggtcttctgggggggtctgttgattggttcaaaatatttgcataagaaagaaatataggctgggcgcagtggctcacacctgtaatcccagcactttgggaggccgaggtgggcggatcacttgaggtcaggagttcaagacgagcct

SEQ ID NO: 5608 - DNA, 2419 bp, Homo sapiens
tccctccctccaaaaataaccaaccactgtcctgactttgtaggaattactccttagctttatagttttatcagccaaatgcgtatccctagacacattaatttaatgttcttcacacatgcacacctttttcactttacatgtcttttttttttttttttttttttttttttgagaaggagtcttgctctgtcacccaggctggagtgcagtggcgcaatctcggctcactgcaaactccacctcctgggttcaagcgattctcctgcctcagcctcccgagtagctgcaattacaggtgcatgccactgtggctggctaatttttgtatttttagtagagacggggtttcaccatgttggccaggctggtctggaactcctgacctcaagtgatccgccagcctcggcctcccaaagtgctgggattccaggcgtgagccaccccgcccaaccatgtcatttaccttttagtttgtgactctccttccattcctttctttgtcttacagtttatttgttagaaatctgggttgtttgatctgcagagtgccccacagttggatgttgcgcattgtgcactcataatgcagctcaatgtgtttctcaaaattggcagcaagaatctgaggcttgaccagatttaggtttggcaagatatcagctgatgatgtccagttttcacttttgttggtgttagcagtgctgatgctcagtgcctagatccattaattcattaggggttacaaagtaatgataatactatcactttgtttttatttcattctttagttgaaataactttataagaaaatccttttcctcatccactatttagtaacttaatggcatagtttatatagggaaagcagggttaacgcttgatttttttcatatggtatattcccagttttcatgagaataaattggttccttgttatccttagcaggtgactagtttcatttaatactctatcattgtgaactcacagatttaaacatacttgacggatttcattcattactttttttttttgagatggagtctcactccatcgccgaggctggagtgcagtggctcaatcttggctcactgcaacctctgcctcccaggttcaagggattctcctgcctcagcctctccagtagctgggattacaggcatgtgccaccacgcccggctaatttttgtatttttagtagaggcgaggtttcaccatgttggccaggctggtcttgatctcctgatcttgtgatcctcctgcctcggcctcccaaagtgctgggattacaggagtgagctaccgtgcccggcctcattacagttttttacccatattgtagctttaattgttgcatctttggccagtggcagcttcttcactcttgcttctgagtccttttgacacatgacccgaattggctttggtgacgtcctcaccttctggtatatcaaaatgttctagactcagcatgtatagtcatgttctatgcttggtataaattatctgtccaggaaaccctggtttcttggaaagtagtatttcttttctttttttaattttaattttttttaattataaaatttcaggttacatttgtatatatctggggggtgcaaagcgatgttatgttttataaatacaatgtggaataattaagtcaagctagttaacatacctgtcacctcaaatgcctatcgttttttgtggagagaacatttaaaacttactctcttaatgattttcaaatgtgtaatacattattatttttctttttcaccatgctgtgcaatgtatcaaaaaaagtactcctcctgtcagattgaggctttgtaccctttgcctatcatctctgtatccccacatccccacatcccctgccccagcctctgtaaccactgttctactctctgcttcttggaatttggttcttttcgtccacatataagtgagaacatgtggtatgtctccttctgtgcctggcttacttcacttagcagaattgtttgaattccatctatgttgtcacaaatgacaaaatttccttctttttttaaaggctgaataataatactttttaatttttatgggtacacagtaagtataaatatttatggagtacataagaattttaataaaagcacaccacaatgtgtagtaattacatcagactaaattggatatttaccacctgaagcatttatcatttctttcttatttatttatttatttttgagacagtctcgcactgtcacccaggctggagtgcagtggtgtgatctcagctcactgcaagctccatctcctaggttcaagtttaagtgattcttgtgccccaccctccccagtagttgggattacaggtgcccaccaccacacccggctaatttttgtgtttttagtagagatgcgatttca

SEQ ID NO: 5609 - DNA, 1030 bp, Homo sapiens
ccatttccacgttttcttttttctttcttttttttttttttgagacggagtttcgctcttgttgcccaggctggagtacaatggcacaacctccggctccctggttcaagtgattctcctgtctcagcctcccgagtacctgggattagaggcatgagctaccaagcccagctaattttgtattttcagtagagacggggtttctccatgttggtcaaactggtcttgaactcccgaccttgggtgatctgcccaccttggcctcccaaagtgctgggattacaggcgtgagccactgcacccggcccatttccacattttcttaccacgaatacacctgtgttatccatctcagttggtggcaccatctctactcagtcacctaagctagaaacatgagaattagcattgacctcttctctcattctccttcattccctatctctaattctgctaattttctttcttaaaaaatttccaaaatattattgcatcacttcctttgtttaaacctttatctcttgtctgaactgtccttatcctctaaacgaaactattagacaaaaaattaacacatcccacattataaaacactttgttggctctccaactgcttacagttaccaaaaatacctatggagaggagttttcttttttgcatcaaaatgaaaagagctttggttgagtgtgatggctcatgcctataatcccagcacttgggaggccaaggcaggaggatcgtttgagcccaggaatttgagaccagcctggacaacatagtgagaccttgtttctataaaaaatttaaaaatctggccaggcgtggtggctcacacctgtgatcccagcactttgggaggccaaggtgggcaaattgcttgaagtcaggagttcaagaccagcctggccaacagggtgaaatcctgtctctactaaaaatacaaaatttagctggacatggtggcatgggcctgtagtcccagctactcgggaggctgaggcaggagaattgcttgaaccagggaggtgg

SEQ ID NO: 5610 - DNA, 1056 bp, Homo sapiens
gcttctataaagagaaacttcctatcatctactatttggtttcctggtggtagagtttgtatatgaaaagctggatgaatgcttgatcccttttcttcattcatcagttttcaaaataatgaatttgtttcctaccttcttccaatagtcaccaactagttgtgcatatgttttttgaaagtatcattatgatctcatggatttaaacagatttgatagatattagtccatttattatccattgatgttcaaattgtcccatctttggcatatgagaccagtggtgtgttggagctggctcatacccatttttgagagtgagttggcaaatgttgtttaatattcagtcagtttataggctggttgttaaacacagcctttatttaaaaaaatcatataaacttataattaaataaattatactagaagcaaaggtgctcaaactccatcactttctagttatcttatttttgaggttaagtttattgtagagttgggtgaaaatactatataactgtgcctctgaacacctcccaactccacatgtgggggcattacattggcggcttgaaattggccattgtaggagtgtttacatcacagcagtcagcaaatgctacagatcatggcatgatttattgtcttttttattgtctagacgtcaggaggtggtggtgaaaaatgtagattaaacttcaaaatgtatagtatctgtagctgttccattgtaagtagtaccaaaaatggtataaaaatgaggaaatattcttcaactgttatctgattcagcaaagaagttgctcacatcattgacacgtgaaattctcacataccccttccttgttttgctttagattaaactagaggtcagcaaactgcctggcctgcagcctgattctgtaaataaagttttattggaacacatctctttccatattatgggtgactgctttggcactacaatggcggagatgagatgtgacagagactgtatatcccaaaagcctaaaatagttaccatctggtcctttaagtgtgctcttctgtagtctaaac

SEQ ID NO: 5611 - DNA, 1100 bp, Homo sapiens
cactgccttagaatttttctgtgttctacctattcttccctcccttaccccaacctgtggcaactactgatcattttattgtctccatagttttacttttttcagaaattaattgacagatatcatcattatatgttattactgtgtacaacatggcattttgaagtatataggcactgtggaatggttaactctaacaaatgcattgtgtcacatagttaactctttgtggtaagggcacttaacatccactctctacattttaaaaaaatactacagtatattattcttaaccgtagtcacattgctatacaacagatctcttgaaatgtgttcctcctatctaagcgtaataatgtgtccttcatgtacaggtttctgtgtagactcgtgttttcatttttcttgggtaaatgtccaggagtagaatggtggggttatacggcttgtttgtctttttattattcagctgtgaaagttctttacctatcctggtcatcagttttttatcatctatttgttttccaaatatttcctctcagcctgtggtttgctttttcattttattaacattatctttcaagaagtaaatgtttcagttttaaggaaatatagtttatctttttttttttcctttttatgttttgtactctttgtgccctaagaaatctttgcctagcctaagatcacaaaggtttttgtcctgtgttatcttctagaagttttatagttttaggttttgggtggctggggtgggtggctgggagaatgaatgtcaaaggatccctgcaccatttgttgaattccattgctatgggagaagcttggtagaaatgccggtggatttgtggatagagtgatgggttgaggagggagtcctcaccagtggtgactcatgggaagcttcagagggaagtgagtggggcctgggggtcaggagcttcaggagtggagagggcagggaatagtggttcagaaagtaggggccgggcatggtggctcatgcctgtaatcccagcactctgggaggccgaggcgggcggatcatgaggtcaggagatcaagaccatcctggcttacacagtgaaaccctgtagaga

SEQ ID NO: 5612 - DNA, 1058 bp, Homo sapiens
ttggattcataattaattcagagtgtaaaacaatacatcgtagaacaattccctattttgcttgttaatctaaagatttcacattatattctacttattttaaaaataaaaaatattctagaagatagtaactttagaaaaattttaaaatgtagataaaaaatgtttacagataagataaaagaaagatgtcacatataatcccatgaagaataatccttcctgacttctaccgtgtgtgtgtgtgtctgtgtgtgtgtgtctgtgtgtgtgtggagtggaggcaggagtgtagagacgcacacacacatacacacacataaatacatacgtacatagatgttgatttctttttccaaaatgagatcacaccatatattctgtgctctgatttgggttttctccccagcttattttattgtgaaggtctttccatgtctgttaacttatcctcatgggagcatagtgttgcattacctgtgtgtgccatcatgaatttacatagttccctgttgtgacatttagattgtgtagaatttttcactattttaacagtgcttttattaacattcttaatcacacacatccatttgcgttttctcataatttccttaagagaaattcctggaagaactgctgtgttgattgtcacctttttaagcttttgatacatatttcagttgccctccagaaaggctgtcccagcatgcacccctgcagcagcacggactgcctccttccctgtgcctgcatctgcagtgcatattatcctttttgatctttggcagactggtgaaaaatagttctgtcttgcatgcctttgattaccaatgaatatatttatgtttataaactatttgtactttttccattataaattgctctttaaaaattctttgcctcttttatcacgcctgacccctgggttttggttggcccagagattactgaactactttcgaccccaagttttgcatatttaaatttatttttagggatttcaggtgagcatctttaaaaaaattagataattaggagaaatgaaaacggcttgtatt

SEQ ID NO: 5613 - DNA, 1034 bp, Homo sapiens
acagaaaccagctgtgcatgagagggagtgagctttgtggcaggactgaatctagagagaatggtgggaggtaactgtggaacggccgatggatttgagagggaggcaggggccagttcctatggggccttataggccatgatatggaatggacttgggatttttttctaatctaaaaggagttttggtcaaggatgcagcatggtctaatttctcttttaacaagtgcgcttggcctgctctctggagaataggtcgggttctgaggccgtcaccggttgggggaatgggggtttgccccaccaaggtggccgtgaaagcctaacaagcagttgtgctactggactagatacggggtgcgaggagaagagaggaaatgaggaaagatgggaatgaagaaggaaatacttttgaagttatataagatgaaaactgaaaatggaccattggatttggcaagagagaggccactgtggaccttgacaagagcaatttgagtgtatggttggggcaaaagtctgactggagaagaccgaggagaggagtggaaggtaggaaggagcaacaggtacaggcactttcagtgtttagacatgacaaagagcaaacacaggaaggtagctgggccggggcatttgttagttctgttttgtttttaggattcggatattatggcatatttgtatgctcatggatggttagtgtggggataagtggaagaacagaggccttgagtacattggctgacttgggaagaggtagttctggttgtttttactaatgaaatgcgtaaaacaagaaacagttaaggactgggagtggggaaaggagaaggggcgtgatgaaggtttgaagagagacgagaatgtatgaaatggtcttcatgaagagtgggagagagaatgatccagggaagaggtgggattgccaggcagtgctgtgggcccatttggaatgtatgtttctgtgtttaaagagggtccaatgcagtgccacatgtagacttagagtaagggaagagtgggatttgacca

SEQ ID NO: 5614 - DNA, 1022 bp, Homo sapiens
aggcatattataaagtaggttacactgtgtagttgaaagcattgtgcttatgtcaaaattttcatctccacagaagaattttttttaagtgttctgcatttgcccctactgttagaactggagtcttgaagagaatatttattcttttgttgcaaagcaaaattagcagaaacttgaatttaatgtaataacagtattttaggtttggtttttaagggaggtttttgccttccagactgttctctatccacttagaaggatttaatttctaaatattagaaaatgttttatacaaagacaggtcttcaactatactgtactatagttatactataactagaattatgaaaatctcttcatttgtgttaattgagagaagtagtttattttttttgttgttttttttttggtaatagtcttctaaaatctattaatagactaccattatcaattcagttctttacagttaaggaatgattgtgtgaagtaagatacatacaaggaagtagtacctctggatggtaggattatggatgtttttgtttttgtttgttttttgagatagggtctggctttgtcaactaggctggagtgctcctgatcttggctcactgcagcctccatctcctggcttcaagtgatcttcctgtctcagcctccaggttagctgagactacaggcgtgtgccaccacacccggctaatttttgtgattttatagacaaactcctggactcaagtgacctactcacctcaacatcccaaagtgctgggattgcacgtgtgagccaccgtgcctggccctatatattttttaatgttcacattgcttatctgtataaaatataataaggttacattatttaatcaacattaccaataaataagaatatggagtactctttctgctcattttagatctaggctttaattttacagtggttctaaagtggtaagatggaaaaaaaaaatgtccaggcatgacaagaaaagagaacagtaagagtaggtccaagtaagaaa

SEQ ID NO: 5615 - DNA, 1035 bp, Homo sapiens
tctgaagagatctacttgtatttatttcttgcaaaaaaaaaatccaccatattaccatagccaggccctattatgctattgtaatcatagttgaaccaagaagagtgattaacgatagcaatttattgtatctgaggaggagagaaaataggagatgttgtcgttatcataaatcatatcataaataaccaaaaagaagcactcagaatgcttgtgtggtgtcagcagccagccctttcagacacgttagcccaggatgtagccatagaaaccccaaagtcatattgttatcttagtcttgctgcagttatgtgatacaacagtattaacatatagattaggccatttataatactaggtgtcatttcaggttggcttgcttatatagcattttagttttttattgtgcagaatgttagtgaaatagtacttttttacaggtcactgtgtatctaggaatttataatgcatcatattcactctactattaatttcttgtgttattgattggttgtaatgtatgaattgtcattgcctaattgtcttgtctttgctagtaatttcattttttaagtaaacaggtttattttaaaaatacatacccacttacacatgttgagttgtgttttaagggtctaatttctgttacattatagacaggacaattttaaaatattttataaggagatgtcaatggaattattttttagcctcatttagtactagaagatataatgatgaagtggattatgattgtttttgacgccatgcccttcttttccttcccagcatcgagtgcctgttttcctattatttcctgactgccccagcctcttctcctcagagtagcttcccagctgggcctgaccctgaccttcctggtagtaataccccgtgttctacactcacctaatcctcaacattccatcacgttgtttcacttcggttccattttcccagtcttctcacttcaaaaagtagggtagagttgttcatttgttagtttcatggtcttaaaaatattttcacagcaac

SEQ ID NO: 5616 - DNA, 1031 bp, Homo sapiens
gtcccacgtactcaggaggctgaggcttcacttgagcctgggaaatcgaggctacagtgagtcgtgatcatgccactgcacaccagcttgggcaataggagtgagaacctgtctcaaaaaaaaataaaaaaagaacttagaattatcttacacatactgttcagcagcttatcccctcccctctaacagatcatgaacatttttccatgtctgtatgacatggtatttcattttactgttgtatcatcatttatcttgccagtcaccagttttcaaacatttaagttgtcaaaggttttgctataacaaataaagaaacaacatcctcatatatagatttttgtttattcagtgttactaggtcaaagaatgtaaacatttaaaatgtttaagagattattatgccaaattatcttctaaaaggctataccaattaaaattctcaccagccgtacatgaggatgaaatgaccctatatttaagaagaattagtgaaatcctattgttctaaaattgagcaagactctgggcaactagtagtgaatttatatgaaaagctagatccattcttctccctcgtgggcctgtgagttcatttcatagaaatcctttcttctttgggggaagctattggttgaagaatagttaacatctttattcaggctattcccagatctcttctgaaatctgtaggtccttggtgctggctccgtctcaggtgagtttttcttcattaagtgcactactcatgtgaacataatactacagagaattgccttctctgtgatagtgtttgtgctttggagtacatgtatcaaattcatctgtgaaggaacctgggaaatattatgaatttagtcataatatttataagtaacttatgtttgtaagtaatgtttataagtaaccaatttttaaaaacagtttttaaggccaatatatttgatgttgttactgctattaaatcaaggttatcagggctgggtagggtagctcatgcctataatcccagcactgcgggaggatcgctt

SEQ ID NO: 5617 - DNA, 1145 bp, Homo sapiens
tcagctgtcacctgtttcttctttgagaggaattgttcttttttccctctagctgcctttcagatttttcctctctatctatgatattttatagcttcactttgatgtgcctagatatagatttatttttatttatcttgcctagggtgtgttgggcttcataaatctgtggattggtatctttcgtcagttctgtaaaagtctcaggtactctttgttaacattcgtctctgccccatttttcttctagaattatgatcaaacatgcactaattagaccttttattgtattctctttgcttcttaggctatgctctgaaaatttattttgtcctaatactcagtttatagttctgtcttgtttccaatctgttgttaaatccctcctttcaattttaaatctcagttactgtattttttaatttctagaaggtctgtttggttcttttcaaatccactagatcaagtcactctctgtgacttcctacgacctatatttctagcctttgccttttattatttttttaacattgtaagcaaagttgttttatagttgataattcttgtatctgtggtctttgtctcttcatactagctgttatttcttaacagttttccctgatcccaccttacttcctcatagatttgattatctttgattatgtgctgcttattttttttaaagataattatctgtattaatatgagacctagattttaagatacttcccctcaggattgtgctgtgtgcctgggcacattgcaagtccaaattactttaaagtatcctagaacaccagaggtgaaaattcatgccattctcgtgcatctttaccttatgggtatagcccattgggaatccttagtgtcgggagggagttctattacaccttccacttcgggcagatcctgggctttgacattcgtcctcttcatcataaccaaatatcagacttgcctaatgcgtaaatgcccttggggtaaagcatctgtgttctgcttacctctcagggttcctgcttttccctttagctttggttccatcacttgtgtgttcaaccagtatgggaaactgcctctagaagcagtgttttaaaattttagtctaaccataaaaatagagaatgcttaccctctggatataa

SEQ ID NO: 5618 - DNA, 1058 bp, Homo sapiens
cacgctgcatttttattcagttggtgtcattacttgcatgaagaaaaaccccacacaaaatactttggctttaaaaataaatcgatctatcaccaattccatttctaaacaaagtaattgagtcaaaagagagctagggattctctgatattgatttaactgtattattagacagggtttggtgaagattttgatgtctccttaggcgtgtccatttcagagtgggcatctcttctctgatcggctccaggtatcttgcctccgctgtctctctacagatcctatatagaaagcaatcgtgaaaatcacttgtcttttagggatgagatgagcagccttgaaaccgagctcccaaagctccggtttgaaaaacttcagagggagtactctgggagcccagtgaccatgagatcagttttcagggtttttttccagggtgacattcactccgactgcctgagcaggactgtctctatttagttgatatgttttagctaatccaattattttcagactgctgcacgcgacagttgcattgtttatcctgagccaggaactttaatagagtccggatgcggttaggctgacagaagaacccagacctgcatgttcagtacatgaaagtaggcaggagggagagggaggcaggctagctggtggagtcaaaaagaaagcaagaggccgggagagctggaggcacaaagtggccacggtgcctggcaggggctgggcttgggggtggagggaaggattaagaagtggggtgcagcttgactcagaaacacaggctggggagctgaatcgaaagagagcagacctatgcattttgaggttgtgatgggatttcttttctttttcttttttttttaaagttctcttttctggtaaggctatgaggttggggagagctcgtggtatctgaggccggcgtagtggtttgtgcggggggaggggacagagtgacttttccaagatactctggtttctttaccctcatttccgtgtttgatttctccccctcttgtgcacactttctgccttaagtttagtcttttctt

SEQ ID NO: 5619 - DNA, 1749 bp, Homo sapiens
ctcgctgtggccctggtgcagtgaatgaaactagagtcttactacgatcccttattctcccttaggtcctgggactgtggtctatatacatttatcagcaattcaatccaagttctattttcactttggggaatttgcttgctgactacagtagagatagagattcgtgattaaaatctggaaggcttgggcttataagctattaggttattagcattagggtttattagctatccagtcatcagcactgcctatgaaattatttttgggctgtaatttatggatttcaaagaactttcatgttacttgattacatttgagcctgagatagtcccatgatgtagacagggcagaaattatttttatttcagttttacttgagggagttatgactcagaaaagcaagtcgcttgcacaaggtaacgtggctgagaaagtataagagtcagggcccatttcagagtcaggaggctttcctgggaagttggcagtgtcagaactaagaggagaaccaggggaaagggaatgctctctttttttagagtataacaaaattgtaacaaattgtgtgtgtgtatatttcatccctatattcgtggaagtataggaattataggagattaactagctatatgtttttttgaatagttagctgggatgagatatgatctcacttgtgtctgatcacatatatatatatttctgaagaacatgaatttctcaaatcaaagtaaagctgaggaatcctctccatggctcacttctacctcctcaatcttaatgagcttggtcttcatggctgggctccagtgaatgggagacagaaacttcctcatcctcaagagtggtttttctgtcttctctggtttaccaggaatttgtaaaaggaggcgattgatgtgtattgaacaataagagataataatctattaacattgtcatcacgttgcgttttgctctgcccttccagacatctctacatggatgccataagctctttcttcttatctaggtgttgagataactgcctacctcggtatcagcatctctcagtggtgttgtgactggttatctggggttgtgtggctactggtgtaactagatattatatttagatacctggctatgtatagctagatatcggcatcagagctgtgtatctggacattatcttggtgaagatttgatgtgggagtagattcctgtcatctctgtaggctgcatctttatcttgatgataactttgaagaaggaacctggagatgttcctctggcagtgacctttctgggctctcctgccatcggtcacgttgccttcctgggcttggggaaaataaggtctcagctccagtgtggggctttgtttccttctccaggtgacctctcccagctcagcttcgggaagctgggtgttggctgctctcagcaggttggccatttgaattcttcctttcttagctgtgattttctggctttgggaacagacaggtaaaacccagagccaagggttctccacccttgagaactgtggcggaaggcgatgctttcagcccgggaagtcaggaatggccaggacactgacattcactccttgagtctgtttgccaccctcccctgggaacatggccagatgtggagtttgctcttccgggcagatgtctgctgttggggttaatctgcttctgcctccctgtggggagtaacttctgtttactttgtaaagtttcctttcttgattctgggccccca

SEQ ID NO: 5620 - DNA, 1159 bp, Homo sapiens
gggcggggaccgggcggggtctgggggtccgggtgaggactgagcggagcgcggcgtgacggggaccgggcggggaccggcgagcgggcacggggtccgggcggggtgcgcgcgtgcgagtgtgcacgcttgtgtcatttgaaatgcggggctgacggagctctggtggccggggggaaagagctcttcttaccaaattacccgctcatctgatttaatatttgcaaagatcctttcctaaggtgggagaggggaagcggagacaaggaagggcggggggataattataaagcgtgaaactagccaggtgtactttattgcagaaattagaggtaatttttacgtaatcatggtttgtctgatatgcagtctgtaatttaataattaatgtgattctggttgttttacatgtcgtcaaactaaggtagagcgtttattggaaagaagtagagagctgggattcctgaagaaaggaaagtatgtctaatttttagctggcttgataggaaagtttttattagctcggaggggtcagtaggatctatttgtatttcaggcatgttaggaaaaggaaacctaaaaagagagaaaagattgccagagtgggaacaaaaggtctgtgtcctttttcgacattttaagttttctctgatcaggcgagaaattggatagcggatctaagctgtaattaatctaatccagtgagaaaaaaatggattggtatggtaagagtgcgtgtaaaatgtttcctgttctacccactgtaggacttaacatccctattctgtctggcaccttatggtactctgcagtattgaggttattccaggctttatgatccatttccctggcaactaactttcccctgccatgctagattctttttctagcatgttaagtgttatgagttaagagattcttgagaaactctgcagtggccaattatttgagctgcaaggacctccccaccaaaaaaaaggaggggggtggaggagggggatgatagaatctgttatgcaaattgtcttttgagtcaatattaagaatgttaatttgcttgtacacgatcaggttcatcttttccgtattctgttttggtagttttctccgagatgtgaatcatgattagtaacatttccacgatatttgttttaagaga

SEQ ID NO: 5621 - DNA, 1784 bp, Homo sapiens
agcgcttcatttgctccattgttgactcaatcacagtggcacctcctcacacaagtcctctatttccaccctgtgaaacaaacacaatttgatttagatcgaagcatgataggcaaagttgagaaagttggttgaggtgcatgccttcttggggcaggtgcgattgcatccctgggacattatatgtctttacatctcccagctccacatagggcttagccaaaaaaaaaaaaaaaaaaaaaaaaattgcttccaggggccacccactacatcatgggctctttctttgtccttagaacctggctttggtaccagaaaaccatcctggtcaattttactcttgtagacacaagatgagacccagtttctaatttcagcttaaaccccttgaaattgttaaagagaatctagctggatggggtgactcagtgcctttcatcctagctactcaggaagctgaggtgggggaatcgcttgaggccaggagtttgaggccagcctgtccctaaaaaaataaaaataagagaatctgacatgttatatcttagtattttgttcattgttgagtagcattttaaaatctaaggaactgtttaatgaaatagatgttccttggttttggatggaaaactaatgagaggaagaatttatgatggcatcgttgttttgtttttaaggcatgaaatttacaatctacgtggtatctcacgatgttgtaactcactttccaggccccagtagagtccaaactcttggaaaatttaaagaaaaattattgtgatggctttatccaaaatagaagcagaataaataattgacgaaggttgctcaggaaacctatagaccattcctgattctctggtgtctgtgtctgacaggatgatatgtcaccaaataaatgtttattgggtcataattaaattgtgaacagttaatgtatatatagtgaattagatgttccccaatatgtatgttgtgttaccttttctaacataaatgataaactcaaatgtatgttgggttttggacagactattttgtactgtaatacaaagattaccaattaggtattaacattcatggagttaaaataactttggggtccaggtgaaaagctttctgagtaatacagtgcatcgacaagggtgttttcattgtttgtgtaaatgattgttacagcttttgaagcaaagcctctacagtgaaaattctgaggcatagacattcctcatcaaatatcactgtccagtggtgaggtgtgagggcaactcaatttgtacatctcatgaattctttctgtgaatcacaaatactgtctcaatgttcagggcattttttttttttttttttttagacagttttgctcttgttgcccaggctggagtgcaatggcaccatctcggcgcaccgcaacttccaccccccaggttcaagcgattctcgtgcctcagcttcccgagtacctgggattacaggcatgcgccaccacacccggctaattttgtatttttagtagagtcagggtttctctatgttggtcaggctggtctcagcctcccgacctcaggtgatccgcccacctcagccttccaaagtgctgggattacaggcgtaagccaccatgcctggcctcagggcacatttttgacaggttatttgttgaggcatctgactaactgcctgggcttttgatagcatggattcttagccaatcagcaaaatttattttaagaaaggtaattagactagaaccaaagtaaatttagcttttaaagttatctaat

SEQ ID NO: 5622 - DNA, 1009 bp, Homo sapiens
tgtacagaattttaattatggagcctagaactctgagccaccaggagaaacctatttaatgtatcttctatgtagcgacgcacttccaagcagttccttgttgttctggtctggttggtcgctctgtttttcctgtgtaatggtttttgttgttgttccttggttcaacaaatgcttttaaatgcctgcttatgtgcccgttaccatcctaggtgctgggaaaactctgcatcctcaaagttatatccccactcatggaaatgattttttatttccctttgattttgtgagttcttctcttccaactgatttcaccttctacctttcaggtgtttttccattcaatattttgaatattttttcaaattatcaaaaatattcaatattttcaatatttttccattattcagggctgcattaagcctctgtttagctccatctctgtgataggttgttctctggccagctgctgttctatggcctcctgccatgaatatcttactttggttgggctgctataactaaatgccatagactggacgacttaaacaactaatgtttatttctcaaggttttggagactacggagtccaacatcaaggtgctgacacatttggttcttggtgagggctctcttcctggcttgcagagggctgccttctagctgtaccctcacatggttcaaaaaagttgtagtgtccttttttcttcttaaaagagcactaattccatcacgggagctccgcccttgtgactacaactcaatctacttcccaaaggccccacttcctaacaccatcatgttgggggttaggactttaacatacgcattttagggggacacagtcagtccatgataaacagtggtggtatcaagatgtagagtaagatcccgagagagagagggagacactacctaaggcaagacttagggaaatggtagtacagtatcgaaacccactggctatgaataatggtgttggtgtctaaacacacatgcctcaggatt

SEQ ID NO: 5623 - DNA, 1131 bp, Homo sapiens
tggtggaaacaaacgcaagtgaatatgcggctcttgtgttcagggtcttgttgggcagccagaggaatgcatggacacaagattggctgtgtttttgaacaaatgtgggttagaggtagatgctatgcttaggtccttactgggttgaaagaaggcgtgtgccagagcacaattaagtgtgctgtacaaaatgctacattagagttaaacaggctttggggtgctgagtggtgaatgtcatttggaaaggctgaagatgatgtcttagaatttcacttgggcttcaagaaagatggacagtatattaatgggcagagtcaagggtggagttgagcgagaaaaatgataatcatgcacttaaattcacagttggtataattcccaaagactcatttctgtttttaaattgaaaatgaaaataccactttaaaaaaactagtcaatttactattgatatagaattctaagattttacctgataattagtaaaagtccctaggaaagagaataaaagaaaaaaaaacccacggtctcattttctaaggtctgcccagagaatgtgaaaattactgtctagagaatacagaccccgcaacaaagaggtcattatcgtcaaactgctaaggtcatcagtatatacgcttttaaataaacccaatgatcctcttaatatcattacggaaattctaggcactaacacattaaaagtatccttttgggatgttctgctattactgtatttttcaaaggctttggtttctgaaaatttctacaaatactctggctttattagttgataatacaatgatattctcagtatttgaatttactcgtttggcttttctttcatttacgtaaaatattgagaatatggcagtgattttatatttaatcatcatgctgttcttccccctaagttaacaaaaagaagaagtataaccttaaggtttagtagatactgtcgttgaagacattggaaatcattttccagttctttacagacaagaaaactagacccaaagtaaagtgctgtggtcagcagcacatcattgttcagtggctggcctgggtctagaagccagaccttttaactcctaatttgatgttcaccttttataccataatcctgtt

SEQ ID NO: 5624 - DNA, 1028 bp, Homo sapiens
aaaataaattcacagaagtagcaatagcttttacttaagccttccttccagtccatggcaaaaataggacttcagtggatttcaagatacttgcccgactgtgctaattctaaagtaatcaattaaaagagaaaggcattagctggttcttctttgtataagaaacaaatttaaacatctaagcaattctcagttcataaggtaactttacttttcctatataaacagtttctgctatagctgaagatagaacaaatgcatatgctattgaatcttttagcaagttacatggctctaaaattggacttcttttcaggcatcgcaagcagaccattgtctgtagctttcatggagatgtgtgtgatttgtccttgaaactcggggccctgttctcctcccactaccaagttcagccatgctggtggcttcagacagcgtccttggaactcttgacttttacatccttatctcaagccctgcttttttcttgaatgccagtaattttggattggaaatctcttcctaggcaaccaaattcaatgtaaaatggagctcatttccccctttctttctccatggaagtcttataaaactcaaccaagcatgccttggaatcatgcctcactcctttttctctctcattccccacagctcatgaaaccctcagccctgtcagttttttctttctcaatttaaaaattttcctttcttttcatcgtttatggacagaccacttctcccttgcacagttggaacaacctcttcagccaccttctacctctacacaaaagttactgatgtttctaaaacctgagtctcatcttgttactccctattcagaattctccagtgcctctcctttgcctaatggttaatgcatcaacttctcagcaagtcctaagggtgcctcacaatgcggctgcaatctcccttttccaacctcttgttgagtgacttctgtacattcttcaccccagctagtcacccatttatcagaattcgaaaaaaatccacgctttgccagagcc

SEQ ID NO: 5625 - DNA, 1044 bp, Homo sapiens
ttggaaacgcagcactgcaatgagcattttattgaattctttcaaaactggaattacagaacgtccagcaaggcccttttgggagaagggttataaggttggaagataatcagctcagcctctcccactctgagtaccattcggttaggatgtactctccacccttttccatcctgctacctgcctctgaagtgggagctgtcatttggaagtgatttgaaatacttggatgagataataatatgtggcatttattaatggagtgcttttttactcaggggctcagactttctgggccttctaatgtgttaatctacatcttcttcccactgcctggttttacttacttttaaaaacttctgtgattaaaataggcaaatcgaccaaacaaaactgttgaacaacttccctgttcactaggttaggtcatctagtgatatttaaaagtaaagtagcttcatagagtggattctgttgcgaggcctttgttactgataagtgtttgtcagttgtagttaaaaatgattcataagaaaaagcttagtttttctttgatctgcattcaataaaatgtgtctcatagactgagaaatttttcttcctcccaacatagcccaccagttctagaggaaggctattgtcagtcacaaagaggatttatgtttctttttttttccctaatgggtaactgttgttgcttatggattggagaggattctaaatgcttgtctgtctgatatgaaggcagtctctcttttcacataggcaacgtgccctatgtcgtacaggttagagatgaaatacgattgaaatcatgtggatgcatcttcctgtgctatgtctttcctacaggcagagtgccccaagttcacgttggatacgccgaaactcagcgtgtttccacaggcaatttaagaacaaatcaatacctcagacagtaatacgtcttagaaagagatttctcatataagcaatggaagttttatcttttgaatttggttgacttataataatcaaatgtttggaggaggagagacctattct

SEQ ID NO: 5626 - DNA, 1025 bp, Homo sapiens
caggtcttgagcgctagtgccacagctgggtgtgctgataacttggcaaaatcagttggtggttttcgagctgtggagagaagagtgcctggtgagttcagcgaagttggttggatgtccagtggtggtcccttcacttgttaaattcagtgaagaaagagaccctgtgctccttttgatgacatggccaagaaaattatcagaatttgtcaaaagaaactttgaacaaaggtattaggtagcgtctattaaaaattcatcagtaagttgtttatgtcagtcggagaagtacactgaacatcatagtagaataatttattcattcgttaaccaacacttacacaacacctaaactatggtagatactattttgaacggcttacagatactattatatttaatccacatgacagtcatatgatttaagtggtatgatcaccctctttttagcgataaggaaacttgggcacagttaagtcatgtgcccaggatcacacagctggtaatggcagaactttcacgtgaacctgagcggtctggcttcagaatccacactcaagccactatgctgtgctgcttctgagtaatacaaggcaatgatttgtaaatcacagtgacaaccagtgataacctattttattcctttatatcatcccgctctactcacatcttttaggctcattaaaggatttagttgaatgccaaatgtgtggacttagaagaactggctttgaattccgacatttactggctgtgtggctttggaatagtcacctttctgagttgctttcttcattcaacgggtgtaacaatataaatcctgctgatttcacaaaagtcaaaatgttttgccctgtagaaattggttaggtatcattcgaaaaagccagtggctctccaggaatgaagatgctcaaggaggccttgctgtctacctgtgctaccagctttcctgtgctctgcagcagctctagaggccactcctttagacctaggtccatcttgaggtgttgttatacagcctc

SEQ ID NO: 5627 - DNA, 1027 bp, Homo sapiens
gtcactgcgaaactggaccaagtttggacagaaagaaaagaactttgtgacacctcattcaagaccttgaacattaggttgtagaagctactaaacaatgaggaatataagagcagtgacaacgcattgttcatcattgtgttctgaacacagtgcatgacaccaagtaggttctcaggaaacagttgttaaataaaaaaaaaaaatctggtgggaaagattaaataatgggactatagcaaggtgtcagatagcatcagctatacaagtctgtgttgtctttctagagagactgtgacttacaaaattatccttttaacttcccaccctttcaacttgtcaccttttaaccttttcactcagaatcctaaaggatgttcttgaacaaaacataaaaatctgctttatttcttagtaatcttttctcccaaaaaaggaaatttttccttcagttactttctgtagcatctttccttgaactgtgctgtagttcacaattccatagtctcaacttgtgtcttcagaatgcatcaaacttacataactcttgtcacagttgtcagtttctctgacctgctaaaatttcagtagcacctgtttggctgtggaataggcaaggatggctgtggactctggcaatcccattagagttatccagcaccccagcatcgagggaggtggtgggctccatcaatccaggtaccatgagcttggctgtggcgctgatttctctaaagctcataatcttccacggtcagacttagcaagtggagctcttccttccagaagcaaaaacagattccctggaccacattacaagaaaaaattttacgaccaagtgaagtcatgtatttctgaatgtcagctaaagcctcatttagagccgttggctcatgcctaattttcccaagaaactggcaatttaattttttttgctgttgttcaggttgacccaccacatttaagccattctagaggggcctttcacctgtcccctcttaaatatagatagatatttttgaatatt

SEQ ID NO: 5628 - DNA, 1059 bp, Homo sapiens
actaaagtttacttctggattcatgatacattactgactgaaaaaacaaactcccaaaagggaacaactcattcattgctcccatgtactccacccatcgcccttatttctcccggacaagatgacaaaaacaatcacaggtagggaaaaacccagcaggatacttagtcagcattaacccaaacaaagccgaagagtttaggcagagtcagttgttgcattgaatgacagcaaattagatggtacacaaatctcgacatttgatacgccactgtgtgaaaaccagagtaacatctcagctcatccctgaggaatgagccagtctgatgagctaagtttgcagtacagttgaaagcttctcctttaaggcaccatttctctttgttgtctcattttgaaggaatgcttcttacaacaagttatatatttcccggcctccttaagcagaatttattgagcttaatgtgaccccttggatgagacaagcttgtgattatacaaatgaataattgcgctgtgctgccgtccttgggaatggctagggaacacatctgagcccctgctgcgagtgggcttttcaccacgaggctgcttcagaccctggtgtctgccctcatcatgacatgggcctgcctattgcagagcctcccttttgtttgctcctcgtcttctcctgcaggtttgaaatgcaggtgatcaggctgtggaaaaccaacatgagagatcttggaggagtgggttgaagagttctccagagacctcaaagggcatgagcatccggatgggaagtttgtgacatacgtttctgtctgctctaagatcatttttttctttatgctgactattcacaaatattggagtttgaaggcatttttgggaaaaagaaaaatacacttgaatgtaataaatacatatccctcttcacaagtggattctgttttctctctaaacaactaccgtcattaatatgacataattagctcccatggactgtcaacttttgattttccagatcagtggaaggagacagtggcgtccttaatctcaagtgcgttcaca

SEQ ID NO: 5629 - DNA, 1027 bp, Homo sapiens
cggggtcggtgcggatgaaacagtaacagcctcccaccccaaattactgcttgccctgtgctaagtcccagggttctttcgtttgtacagggtcaagttatcttccatctagtcaaacagcattgtgtttttacatcaagaatgttggagaaagttaatatttctcccactgcatttaacattgaaagtgcaaatttggaaaataggatttgtctccttccttaaaaagatgagcaataacaaagaaacataataaaggctcaaatgtggtctcctaatgagagatcatggctttaggggaaggtaaacaccctggtgtggatgcacacccacgaacctagatagatggctctgtacttttagtctgtgatttgggtcatggcctttcagaattttgcacaaaagcattccaagagtgatatgccgttacttcttctgtattgtctgatagaatcatttgggagtgcatgttctgctgtattatgtatactgtatctttgtgtatgggtgatcttttccggaggtggccttgtggtgttatctgaagctgtgttttcatattttgaaaaaagatattttcaattttatttaatatgcaaaaaacttttttcttgattgagcttctgttttccccccattttgttggggttttatttttttgtttgtttgtttttgtttgttttttgcaatgctgcatctcccaaagcatgctgggagctaagtgatcattatgcgtcatgttttgtgggcaactttttttatagtgaatcaaaaggtgggtgcaaaggggggaaggagtgtgcatggcattgtcattcagtgtttactgtacttttctgacttgtgataccagcattgcaaagcctattgtctttttcgaacattgatcttgactttgatattcctaacatatcttatataatcactgtgttttcctttcagtgcaatgcatttttaagacactcacaaccccctacctgaaggcaagctcaggtgaaaatcgggcatgataggcgataatgagcag

SEQ ID NO: 5630 - DNA, 1009 bp, Homo sapiens
agttacggtaactgctagactacagagagagataattagtcacgctatgttggtttcaatagatctaacacctggttgttaaaaagagtaaattgattaattgttttaaggcagcagtgttagtgagtttccccagtgtttatgtttcttaatagagattggacatgaatatggatttacagccccagctctggggaccttcagtccatcagtagggagtagcaaccaaccctggaaatgcagagtaaactgaatttgtccccagtttaatgagggagttactttgctctcaccgtctccactttgcccttgtgtgttcatccgcagctcctgcagcaggccacctcctccagcaacctgggtgcgttcagcggcattcaacaaatggcaggtaagtcaggaagcacgcctctccttttgaccgtgctattgtcagaatttggggttggttccgagggcaaagacaagaagcaggggaagagaaccaagaatgatgatcagacttgttagctttctgtctttggtgttaacgttggaaccgcctgctctgaagtgtctctgttatttcttaggttacctacccaccttcgctgtgcatgaccgctatagaatgaaggggctgagaaatcctgattggcatctatatcaacaaatgattatatcaacgactctctagtcatttgttgtttttataaataagattgattactgggggctttccatccagattcctatatctagggcagccaaatgattgacagccctctaaaattttaataatagacagtcaataaaaatgttctgacctccgtaatgaaagccaggattgcaggcctatctttgatgcagtttgcagccccttgataacgacagacaattaacagggtgcctttttaccgtagtgccccagttgacagaatcatgcatcagaagcttttatgtgaaagtggaatctttgttctggagaaaatcaaagtgtgactgtatttgaaagccagctcgttgaagg

SEQ ID NO: 5631 - DNA, 1025 bp, Homo sapiens
cctctcctgtgaaggccagttgaggattcctgacccgctgcagaagtcgcctcaccagttctgtgagcgcccctcctcggaagactccatgcctggaacgcccaagaaacagccagccctcatctccctcagctcatatttatgcccttttgtgccgcttttaactttcacatggtgctcatatgggtgggggagagtcaggagaggaaaagcgagggcagcttaggagcacgcacctctccagccagcagggccaagatctccatcctgcccttgctgcctgtgtttactgggaaaggataggtggacgggcagagcttggcttcctcggtctttgcccagcttctacatccactgcattcatctccaaggctaacgcccaggagagtcattcctctcaaagtcatgagactcaggctaccttctttccttgccttgactcactgccagtcatttctaataaagatgattattagactgtgtgttaagagatttggcaaatcaaaactggctggaaaactaggcaaatgatagagaaatcggagcagcattactgctacatccattattgtcaattgttacaattttttagaatgcacagagcacccttttttccttctcacagcctgtccgtacctgagaaaatacggccacccaagaaaaacccatgccaagattatctgtccccattctgcccactgtcaccttcagccccatgaaaaggtgactgaaatgcatatgccaaggggcagtggcacctgtgactcacagaagactgtcagtggaaaggaagccattcgtaaccagcatctttggaaatcaggaaaatctgaaggatgattgctttcctgaaaggcactccagcacttgacatttatccatctgtttgtttgttcaactaaatgcttagcctacctgttgttaaagtattcctaagaagggactttggaaactaagactcaagggataccttactctgactttttttttcctccttaggtccagagggggcaaacctctttatt

SEQ ID NO: 5632 - DNA, 1175 bp, Homo sapiens
tcaacttagcagcttaacaacaacacaaatttatgatgatacaactttggaggtcaaaagtctacaatagggctcactgggctgaaattgagatgtaggcatagttgttttgaaaagattactttgcaacttgagtaatcttttcaaaacaaaaatctgactatttaatgtggagaaaaagtcttaaacttctgatggaagaataaactggtaagatactccttggatagaaacttggcactacttagtaaagttgaatattctcttacttatattttttatataatttccataatttaaagataccttttaggccaggtgcggtggctcatgcctgtaatcccagcatgttgggaggccaaagcaggcggatcacttgaggccaggagtttgagaccagcctggccaacacggtgaaaccctgtctctactaaaaataccaaaattagccaggtgtggtggcaggcgcctgtagtcccagctactcaggagtctgaggcacaagaatcgctcgaacccaggaggcagaggttgcagtgagcagagatcatgccactgcactccagcctgggtgacagagagagactctgtctcaaaaaaagaaagaaagaaagatactttttaatgccaatttcttcaaaaaaaaaaaaagtctaagattgttcactgcactgctgtttataatagtaaaaacctggaaacaagattgttcactgtaggccaggtgtggtggctaatgcctgtaatcccagtgctttggaaggctgaggtgggaggatcgcttgaggctgggagttcaagttcaacctgggcaacatagcgagaccctgtccctacaaaagaaaataaaaataaaaattagccaagaatgatggcgcatgcctgtagctaagacaagaggatcacttgagcccaagaaatcaaagctgcagtgagctatgatagcactactgcactctagcctgggggacagagcaagaccctgtctctaaataaaacaaacaaataagagccacctcttcaacatacacaaatttcaagaacaatgttgagccaagaaccaagtggcatagtgatacatacagtatgtggtcctttgcttaaagtttaaaaacctgtttaaacaaaaaaccaataccacataatatacatatggacccacaaataagtagtaa

SEQ ID NO: 5633 - DNA, 1032 bp, Homo sapiens
gctggaaagaggagcgatgcttttaggaaggtctgagcgtgtttgaatctgtggttgccgggggtgggggagttgcccattaattcattcaggaatatttgtagactgaccacctacagcgcgcagagccgtgactggtcgtccagcatacagtcatttctagataacagccacatggcccaaactgattaaaaccagatcaagcaagccttcatcggcagctgaagagatacctggccttggttccaaagttcttagacacccaaggcgcccagagttggcactgtgtgttgatttggaagatcatctcagataactccaggagtggagcctggaaacctgaagggggagagaggaagggcctgcgtagagcagagctgagaacaggggagcctctagaacttagaagttcaagtgcatcttatctgcagtgttgtggggcagctgccggtggcacagaggccattcgggaggtgccaggggaatcctaggagcatcccagaacctgagctctttcctttgacggtgaaggccatcgttgcgtttcactttcctttgcacttggtggcttgcttcctaggtgcctctgtgctctaagaagagggccttgcaactccgcccctgattgactgcagccgtccccgctccactctgaggggtctcctggccaccataggaaagcctgtgttcatggaggcactgccctctgcacgggttatgtccagccagtggcatcaacagcctctgtctgcggaactcacagtgaaggtgccgctttccataatgcccttgtcccctttctagactggcagcattcatcttgaaacctaagagtattttaagaaagttggtgctaggtttctaatctgtgcattcaggattggcagggaaggactgtatggggagagcattctgccttgtcggacagggatgggagagctcttcgtgaacgtgtctcttcggactaggtattgccagagactgtagcactgtgaagagttcatgctgtttatcttttttattatagtcaaa

SEQ ID NO: 5634 - DNA, 1053 bp, Homo sapiens
atgctgaagagaagctaccaagtgcttcctttaagtgaaaagatgtgaaagttctgaacttggagaagaaaaaaaaatcaaatgctgaggtcgctgagacctactgtaagaacaaatcatcttctgtctgtgaaggtgtgaagaaggaaaaagaaatttatattagttttgctgtcacacttcatacgttcaagttatgaccactgtgtgacaagtgcttagggacatttgtaggtagaagacatgaacacgagctccgattgctggcagacgggttgggattggtgctgtctgcagatccaagcatccactgagggtcttggaacataccccctcagagaagggagaactgcagcaatataggtacatggggttgtcttcagacccagcctggacctgtttttgtgaagtgtttgcaatggcaatgagttgcgtaacatagacatactaagcaagattggttctacatcacttggttaaggggaataatttttccattcacgttcagaactaccaaagacagtaatgaccttgtgatttggttgaagctgtctgtagggaatccaagtcttataagacacgatttctttccctcacatttcctcggtgcaaaacctaatagtagaatgtgagaaacttcatattatttgttccagcttagattcttcagtaaagtgcgttgggttaaccgttccctggttagttttgagctgaactgtgatgctagaaaaggttaccttcggggtttttcctcttcctgttcgtacacccttgcggtcttcggacttccctcctgaattgccccggggtttctaggtggtgcctgtcttttcttccctcattagatcataacttatctgcctgtatcatctcctgacatactgggtctttcaaaggctccaaggtgctgaaatgacctgataaatcatttctttaacctccaggaaacctttcctttctgtgttggtagcagccagactcaggtgccctccggtgagtgaggcgggcgggtgtctattttagaacaatcaggtcatgcccccgacacacact

SEQ ID NO: 5635 - DNA, 1043 bp, Homo sapiens
tggcttccagggtccggcccgtcggccaatcaggcgcgggggcgttgtctgggggcggggctccggccgcctctgacgagtcccggatttaccagggccggtgggatcccctcgggctcccgccttagcatgctggccgggacatctggtgaacatggcctctgctactgcggcagcagcacgacggggcctcggccgggctctccctctcttctggcgtggctaccagaccgagcggggcgtttacggctaccggccgaggaagcccgagagccgcgagccccagggcgccctggagcgccccccaggtcggggatggggcccgggcggtgggagcgggggctgggacgcagaagcctcccctggccgatttgcggtggggtgtcggggtcggggaaccggctgccggcctgaacgcgcggccggtggggaggagggggaggtgaggggagcagagggtaggtgtgggtgctcagtgttggggtcatcccccgtccatcctctgtaactgaggatctttgaggtccacgcttgggtggtcttcccatcttgctggtccggacctggtttcggaagggcttttctttcctttgttggaaacgtgtgagaaactctttttttctttctctttttgtttccttttttttttttttttttttttgagacggagtctcgctctgtggcccaggctggagtgcagtgctgcgaccacagctccctgcagcctcgaactcctgggctcaggctatccttccacctcagcgtcccgagtagctggggacacagagggatgaccacgcccagcttttttttttttttttttttttttttcatttttagtagagatggggtcccaccatgttgcccaggctggtcttgaactcttgagctcaagctgatcctgcagcctcggcctcccaatgtgttgggattacaggctgagccactgcacccagcctagaaaaccagctctttaatgaggcggagctgtgggagaagtaaagttttaaggtctcccaaggatacatttccaggaccatctc

SEQ ID NO: 5636 - DNA, 1011 bp, Homo sapiens
caacttgacctcatctttcttcttgggccttcctgaaagtgacaagatacaatgaacatacgctcctgagctacaggcttcaagggcatgtagtctgcctcagtcctgtcctacaggacaaaaaccaaatgttttgtcctgtagcataacactgcccatcagctttctaggtggaaatacctgtgtccttggtacccattgcctggctgctaatccaatgccatatatatttttaggctctgttagggcagcaacccacctctggtaccaaattctgtattagattggaagagttcaggtgctgtgatatacaaagagaagggatatcttctttccttccccttacggtcatgacccagaagttgcatacattgctgctacgttcccattgtccaaaacttagtcacatggccaccaggttatggggaaggctgggaggtggctctttgttctgggtggccatatactgggctctctattactatcaaagagagggttcagaatggaagttaggaatcgtagcagtctctgccacagaggtatagtaatctgagatgagcaatccacctttatctttttcacctcatatttcacatcaaatctttttagtttttattttttaaattttatttattaggccgggcgcggtggctcatgcctgtaatccctgcactttgggaggccgaggtgggcggatcaccaggtcaggagttcaaaactagcctggccaacatggtgaaacctcgtctctagcaaaaatacaaaaattagctgggtgtggtgcagacgtggggccaggcacagtgactcacgcctgtaatccccgcactttgggaggccgagacagacagatcacttgagacagggtcttgccatgttgcccaggctggtctcgaactcctgtcctcaggtgaaatgcttgcctcggccccctaaagtgttgggattataggcgcgagccaccgtgtccagccccaaataatttatacttcctaaggaatgaaaagaggg

SEQ ID NO: 5637 - DNA, 1045 bp, Homo sapiens
agagacagggtttcaccatgtgggccaggctgatcacaaactcctgacctcaggtgatgaggtcaccttggcccgccttggcctcccaaagtgctgggattacaggcatgagccactgtgcccggccattcattaagtctggatgctttttcatcaatcattcttctacaatattattttttaatggctgtcggcaatttgagatgagttaatgccattgcttgttcctcagaggatgggtttataaagagagaactaatgatagggagatgtcaatgaagaatgaggagggcctacgtttgtcttcaagattggagggtgcgggtgagggccactgagtaccttcacgtcgtactcatgctctctagggacagccaagttctgattaaacccaggagtgtgaggaacgttcagagaggtttgtttttcatgaaacagagtgccagaggtctcggtggaaggaggtggagacagagagggaaggggttggagatagggttggtggaagaagaaacctgcccgaagaaatggtagtctgagggagcatgtgttgccagggtgaatggaggacgtgcctgacatgagagaggacttcctctttctgctggtgccaaactgctacatgcctcatgttctttgtggcaaggagggttattttgtgccaacttctgtgtcagtattctagtgtatcattagcagcctggctagtgagtacttagaaatagaagcagtgggccagtcacagtggctcatgcctgtaatctcagcactttgggaggccgaggcgggtggatcacctgaggtcaggagttggagaccagcctggccaacatggtgaaacctcttctctactaaaaatacaaaaattagccaggtgtggtggcacgtgcctgtaatcccagctactccggagactgagatgggagaattgcctgaacctgggaaacagaggttgcaatgagccatgatcgtgccgctgcactccagcctgggcaacagagcaagactccacctcagaaaaaaaaaacaaaaccaacaaaaaccc

SEQ ID NO: 5638 - DNA, 2040 bp, Homo sapiens
gatcatctttgacacattcatctctggaggttggtgtcagcgtatagggtgggtacaggtgggggtccctgcgtggccccagcctcgtggggacaaatgaatgaaaaggggccactgctgccttgagactcccgtgtgcggcggcgcctccagggagttggggtcaccctgttatgacgggagtgtggccactgtcaggttaatgtgttactgggacaaaaacccaagctctctctcagcaggagcactggtgccacccagcacctgtgctcaggggtcagtagggccatgaaaacccgctccagtgtctgaaagcttccgaagcagtacctgctcaccgtaaaaattagaagtaattgaagtaaacgtctaagtcttctccccagaccctgaatcccattttccagggatgcccactcttgggttttgaatacctgccttaaatctttcctatagttatgcttctctgtaacattttcactgggaggaagaaaagtgcctgagggcctggacttctgacttgtccagagactgttctgtcgtgcccaccaccccctgtttcaagacagtggcctgtgttgtcagctgggctgtgagagctgcccattctttttcttttctttttttttttttttgagacggagtctcgctctgtcacccaggctggagtgcagtggtgcgatctcggctcactgcaagctccgcctactgggtttgcacgattctcctgcctcagcctcccgagtagctgggactacataggcgctggtcaccacgcccggctaattttttgtatttttagtagagatggggtttcaccgtgtcagccgggatggtctcgttctcctgacctcatgatccacccacctcagcctcccaaagtggtgggattacgggtgtgagccactgtgcccggccgggagctgcccattcttgtaagagtggtgcctgcggtggtattggagcggcatgtgctgtccaggaagctgggaacgttcccctttgagtttgtcttccactcgtaaaagcccagggcctgtgccgtgataggttatggctttcttttttgagacggtgtctcactctgtccctcaggctggtgtgcagtggcatgatctcaggacactgcaacctctatctcccggggtcaagtgattctcccacctcagcctcccgagtagctgggactacagacatgtgccactacagctggctaatttttgtatttttagtagagacggggtttcaccatgttggccaggctggtctcgaacacctgacctcaagtgatctatccgcctcagcctcccaaagtgctgggattacaggtgtgagccaccgtgcctagcccatgataggttttcattcaatgaaatggacatttccctaagtatagcataacagttctagaaggtgcatgtaatgaaagcagttttggggggccaggcagaaaactaacattgatttccccagctgagtcgtgtcaggccactttgtccccgcttcgtagagctcttactccccacgtggtacttttccaggagaggccaagtggctcctacaaagcggcatcgtcatcctccttccacatggctacgatggggctgggccagaccactcatcctgtcgaatagagcgtttcctgcaggtaagggtaacgtcttccggagtcaatgaatcattttcctgcttcctagagcttttctacctcctgcggatagcttaacgcccacctaactgtaacacagcttagtatttgagtgaaacagatttgatgcaatgtcaattttctttggaaacgtaatgcctcaggtataattgtatcacggttttatggcaattaaagttctcttgtgccaggatcagcagttcttataccaggctgatcatcagaatcccccagagagcttttttatttttatttttttttgagatggggtctcgctctgttgcccaggctggagtgcagtggtgcgatcttggctcactgcaacctctgcctcttgggttcaagcgattctcctggctcaccctccaagt

SEQ ID NO: 5639 - DNA, 1072 bp, Homo sapiens
ctgtgatcccagcttcctgggaggctgaggcaagagaatcgcttgaatctgggaggcggaggttgcagtgagccaggatcacaccattgctgtccagcctgggtgacagagcaagactgcgtttcaaaaaaaaaaaaaaaaaaacccattaaaagaggcctccttcctccactctctcaacccctctgttgggtaacatgaaaagactgtattcctctaagatgttgggattgatatacgtgatttaatctgcaataggtggaataaccaggggaactggttatgaatatgtgaatgcaaccagcaaatttatccttgaaggtgtgatggtagaaataggaaaacaacaaaagaaaaacaataacaaaaaaagaaagtgtgatggctgggtgcagtggctcacgcctgtaatcccagcactttgggaggcttaggcggctggatcacctgaggtcaggagttcaagaccagcctggtcaacgtggtgaaacgccgtttctactaaaaatatgaaaattagttgggtgtggtggcatgcgcttgtagtctcagctactccggaggctgaggcaggagaattgcttgaacctggaaggcagaggttgcagtgagccgaaatggcgccactgtactccaacctgggcgacagagcaagactccatctcataaattaaaaggaaagtatgatagtgttatggattttagctctgagtgagctggaaaactaggtcattatctagatgatttcagacttgaccctaattgaccatatatgaccaggaaacacttctgagtttacagctccgtggagatgacctcaacactgcctcttgatttgtttgatgcatgtcactttcattaattttccccctcctttttgaaagtcctgtggcagtactaatattttcattttatgtaatctctggtgctgctttccagtcactgtatgaagtgtctccccaacactagcaaatctaggtcctactaaatacaaatctctgggtggatgatcttctagtactgtatttttaaattaaggagttttagttataatgaaattgatttgtagtct

SEQ ID NO: 5640 - DNA, 1040 bp, Homo sapiens
aaaaaataaaatcttgtcatttgtagcaacatggatggaactggaagtcatcatgttacgtgaagtaagtcaagcacagaaagacaaaacttggatattctcactcacatgggagcttaaaaagtggattttggccaggcgcggtagctcatgcctgtaatcccagccccttgggaggccaaggcgggtggatcacctgagctcaggagtttgagaccagcctggccaagagggtgaaaccctgtctctactaaaaatacaaaaaattagccgggcgtggtagcggatgcctgtaaatcccagctactggggaggctgaggcaggagaattgcttgaacccaggaggcagaggttgcagtgagctgagatcatgccatttcactccagccaaggtgacaagagcaagactccatctcaaaaaaaaaaaaaaaaaagtggatctcatgaagatagagagtagatcggtggtatcagaggtcgggaggggaaggggtggggtgatgaaaagaagtagattaatgggtacaaatatatggttggatagaagaaataagacctactgttagatggatcggtaggtgaccatagtttaatcagtaggtgaccatagtttacaatatctactatacattgtgaaatagctagaggagaattcaaatggttctatcataaagaaaagacaaatatttaaggtgatggatatcccaaatacaccaatttgatatttacaaattatatgaatgtattaaattatcacatgcaccttgaaagtatgtacatctagcattcatcaattaaaaaaccccaaaagctcttactctatagaaatagtaattcattgtcattttatttaaatctgataaagcacaatctaaagcagactcctttcctcactgctaattgcaattttatttatttatttatttatttagagacggagtctcactctgtcccccaggctggagtgcactggcacgattacggctcactgcagccgcgaattcctgggctcaagtgatcgtcccatctcagcctccca

SEQ ID NO: 5641 - DNA, 1085 bp, Homo sapiens
gcctgggtaacagagtaagactctgcctccaaaaaaaaagggagtccagtgtgtgagccaatcggggagctcagctggagctgagcctgaagcctcaagcagcattgttcatctgggaaattgtggctgaggatgctggacagtgagagtagcaaggggtacaaccagtcgtgaggtttcttacatttaggaacagtggttgcctcttttttggaaacacttttttcaggcgatcctcccacttcagcctcctgagtagctgggactactggtgcgtgccacaatgcctggctaatttttgtagttttgtagaggtgaggttttgccatgttgcctaggctggtcttgaactcctgggttcatgccatcctccctcaaagtgctgggattacaggtgtgagccactgcacccagcctggacatactttaaatcgatggcagatttttttttgatgtttttaggttataaaggtaatattgatttattattttaaaaatgcactagcaatttatatacagatttatatgaagctgaaaagaaaagtgtcacttctgaggggagctctggaggatttggtagattggtgactatcaattgaggccttttctttgcacatacattcacttacatatatctatatacttcttataactgaaaagtaagatgtcctgtatatactattctgctactttgtttacttaatatcttacatgagctattaatggccatgttattattccattataaggatacgctgtgatttatttgatcattcattcaacaaatacttactgagttcatattgtgtgtcagcctttgtgcaaggtgccgagattagagcagtgaacaagacaatgtcccagttgtcatggagttgatatttgctgtttggggaggtacctggggtggggaaggtgctctaggaaggtgatctttgaagacagctgcaggaagtgagagaggaggccacatgaagacctgagggaggcatattctagggaagagccagtgcaaaggccctgaggtgagcctgtgcttggtgtgttcaaagatcattgaggaggggccaggcgcaggggctcat

SEQ ID NO: 5642 - DNA, 1047 bp, Homo sapiens
ttgtttccactttttatgaataatgctgttgtgaacatatttgtacaaattttgtgctgctcagctgtcttccaggttggctgctgtagtccacattcccaccagcagtgtatgaggttccactgctgcctgtcctcgccagcactagctctggctttttaatttcagccatcctgatggatgcgaagtggggcacaatcacagctcaccgcagcctcttgggctcaagcgatcctccccgcctcaacctccagagtagcttgggaccacaggtgtgtgccaccacggccagctagcttttttttttttttttttttttttttatctgagatggggcctcactttgtcacccaggctggagtgcagtggcaccgtcttggctcactgcaacctcgacctcctgggatcaagcgattctcctgtctcagcctccctagtagcagggattacaggcacgcaccaccatgcccggctaatttttgtatttttagtagagatgggtttccccatgttggccaggctcgtcttgaacttctgatctaatcatccacccgccttggcctcccaaagtgttgggattacaggcatgagccaccatgcctggtgggatccagattccttcttttgcttgggggcatcctgttgtcccagcatcatttgttgaaaaggcactagtatttttccttaaactttttatttatttagaacacagactgcagagtagtatgatggatctccagctccagttgtcaccatcttgctgttcttgtttcacctatcactgcctctaatcttttttgagtattttaaatcccatttttcagttttccaggtgattctaatgtgcagccaaaggttgaattactgaaatggatcctcaaaatcttatgacataaatttgttcatacctactcttcattccacaagagggaacgaaaggttactcatttaaaaatcttaaacattttaatatttaaatctgtccaggaatctcatgtcctgtaagattacatattgtctttcttggctgttgactggttcctggaa

SEQ ID NO: 5643 - DNA, 1046 bp, Homo sapiens
ggggccccatctctacaaaaaaataagaaattagctgggcgtgttggcacacacctgtagtcccagctgctcaggaggctgacacacaaggatggcttgaacccaggaattggaggctgcagtgagctatgatcatgcctctgcactccagcctgggcaacagagcaagaccttgtctcaaaaaaaaaaaaaaaaaagtatcaggtattctgataagtaatgtatttggggtttaattaatcactgtgagctggggtcatccagaaagtgtttacagtaaggtgatacttgaactgagcccacacactgggtctgacgcaggtggtacctcccttccaggcactaatcctcattgtttcttcttggtcacgagttctttcctgaccttgtctcccttaaggctgaatagtaaaatgagttgagcatccctaattagaaaatctgaaatctgtccagatgggtgctgagatagtgacatttttgctttctgaatattgtataaaattacctttgagccatgtgtataagatgtatgtgacactgacacataaatgatttttttaaattttttaatttttagtttttgtgggtacatagtgtacatatttatggggaacaagagatgttttgatccaggaatgcaatgtgacattagcacatcgtggagaaaggggtgtccatcccctcaagcatttattcattaagttgcaaacaatccaattacagtctttatttttagatgtacagttattattgactatagtcactctattgttctgtcaagtagtaggtctgtggtcgggtgctgtggctcatgcctgtaattccagcacttttggaggctcaggtgggcagatcacctgaggtcaggagttcaagaccagcctggcccaacatggtgaaaccccgtctcaactaaaactacaaaaattagctgggcatggtggcaggcgcctgtaatctcagctgctcaggaggctgaggcaagagaatcacctgaacctggaagatggaggctgcagtgagccgagatcgtgccactgcac

SEQ ID NO: 5644 - DNA, 1047 bp, Homo sapiens
cccgatagggggcagcaatcctctttacagggtataaatgaaaattaatgactgcgtggagaatctgttaatgtttttgtttttttatgtctcttgagggccctacttccccctctcttacttacctttttttctttcttatgtccataagctcctgtgatagtgacctaggctcaaggcaggacataatgacatcaggcttaagttcctgtttaacagcagtatttctattcacttccgggtcgaaacaaacacagaacgttttggtcactagcttatataaaatatgcattttaaaaatcatccaaacaggaaagaacgttttaccttgactaaggttcacattttgagttttgcttgttttaaaacttgtctggaaatagcagtgtttaaatacagtttgccacatcatttatttttcattctctccgtggctttggggaataccatatggctaagactcttcctgcaagtggaagggcttctagctcttcaagtagggatgttatttctgacaactagagtattgctacaggtgatattccacctgtctattttctcttgatgaatgctggttttatgtcggtgtacagagaaccattcactccttcctcacatcctcagaagcctagtgacttgtgtcatttcagctttgcaggctttgattgtctggaaaatgccatttaagcagctgattattttatttctctttttggtaaatgtactttatcactgattttatttagctgggttcagaaattctgatagtaatttgtattctaaattctgtttttaacaccctaaactataaccttgagattttgatcttgttttatatatatactgtgatgatattgacgtgcccaatgatttcttctctctctgtaggcaccagaatttcctgagtttgccactaaagtccaggaagctatcaattccctcgggggcagtgtctttcctaagcttaattggagtgccccaagggtaggaacacataagtaattctcttactgtttgaatattctttgttttgctgtttatttcatt

SEQ ID NO: 5645 - DNA, 1026 bp, Homo sapiens
aaattatatctgctatgatttacaatttctctacttgccaagactgggctctgtggcagatttgacttaaaataagatgaatcatgcttcaaggctcattagattttatgctttctattataagctttactcattgcattctaccagatcagtgattgatgcccgtttcactagtactttgctcagtgactcccatctttcccatagaaccagtctataacggggaactggttgagatgatattggcgtttggtttgaatttttaaatataggggcttatggttggggaacagagaacagtaaagcaaagttatataaataaaacattgcaggatgcctttttatgtttgaagttttgaggtttagaagcatgaagtcctcagggtcatttatattctgctgtctttgattaaaatgtactttaattttcaaaaggagatttacattgtgaaatattagttcattaataactgactttttttctcctttacagttgtgttcgatatatacagagacagtagggtaagtaaaaactctttctgatatgctttaatataagagctggttttataagcaggcagagcatgcctttgttatgtgtgtgaaggatccatgctcaaaaaatattttgtctgggtgcagcagctcatgcctgtattcccagcactttgggaggcttaggcagggagatcatttgagctcaggagttcgagactagcctgggcaacatagtgagccctcatctctactaaaaattaaaaaaaaattagcccaggccaggcacagtggctcacacctgtaaccccagcactttgggaggccgaggtgggaggatcacttgaggtcaggagttcaagatcagcctcggcaacatggtgaaactccgtctctactaaaaatacaaaaaaatgagccaggcatggtggtgggtgcctgaaatcccagctactcaggaggcagagattgcagtgagcggagatcacgccattgtgctgcagcctgggcaacagagcgagactctgcctc

SEQ ID NO: 5646 - DNA, 1033 bp, Homo sapiens
gaggctgaggcgggagaatggcgtgaacccgggaggcggagcttgcagtgagccgagatcgcgccactgcactccagcctgggctacagagcgagactccgtctcaaaaaaaaaaaaaaaaaaattattattattatttttagtcaactaaaagtgactcaaagtttgagttacttttatctttagacagaagaggattagtttattttttaaatcttaaaagtgatgaaaacttctgtaaggaaaaagttaaagtgacttactagtaaagttacttactgctgacttaatgaagaattactagagcagagatttcactgtccaagacatgtcatctttattaagaagtttaggtcactaaatgctgtttggtgctgagtgctctttgacattgtgaagaagctagcagatgcgttttcccgtgtcacctacacacaagcagaatatttctcattctctctccgtgcttagatcagcctcattgtaagtgagacagtcatttgaatctgaatcacctttggacatcttcgaatcatctttggacaaaaagatatggcccatatgatcatgtcccagaataactgttaactgttcatttaactcttacgtcaaaagacatcactatattttcacctctttgtcttcaaagatgatggtgtctgttaagagttactagaaagaggggctttaggccattgttgtggctcacgcctgtattttcagcattttgggaggctgaggtgggaggatggcttgagcccaggagtttgagatcagcctgggcttaacataatgagacctcgtctctacataaaaattagccaggtgtggtggtttgtgcctgtagccccagctactcccgggagctgagttgggaggatcgcttgagactgggaggttgaggctgcagtgagccatgatcatacatgtcatgcctagcagtgaacaccaggttgtgtctggtcttctgcagtctgccatggtgaataatcccgtacgtgtgtcatttcacacgctgcaggtgaatctacag

SEQ ID NO: 5647 - DNA, 1056 bp, Homo sapiens
ctccagccaaaataacctattcccgcaacaggcggtcgtggcgtggcctctgtacgtgagagccgtcgttcttgttaagtggtccgcttttcctgccaacaccaccctcctcccagggcatctctgttatccctcaggtgcccaggtcctttgggaagcatttccagccttccctcgcacatgtaggcaggctctcctgtgtgcctctccgctctcacagttccctgttcttgcctctcttgaagcaaaataccctgcacattgccattgttggatggcttttggttctgttttggggaagtggagatgtgtgttctgctcaagcctgagctcttggaaggagtcgattttgtgttacgatcttcatgcccagtgcctaacacagtgtctggtccctagagcttgatcggggcagggagacagtcagctggtacaaggacagttagtccgactgctctttgcttattggattgcctcaaagcagaattaacttctcaggctgtttgtgcttgagatgtcacatgaaaacatgttatggccgggcgtggtggctcacacctgtaatctcagcactttaggaggctgaggcaggcaggtcacctgagatcaggagctcaagaccagcctggccaacatggtgaaaccccgtctctactaaaaatacaaaagttagtcaggcacagtggcaggcgcctgtaatcccagctacttgggaggctgaggcaggagaaccacttgagcccaggaggaggaggttgcaatgagctgagatcgcgcgactgtactccagcctgggcaacagggcgagactctgtctcaaaaaaaaaaagttataaaatcctgatcctgatcctcctagtttatagaagttacagctgggttttttttaatttacttaaactctttttttttgtactagaggatagcttctgagctacagagtacactaccaattaacagtggtggtttgttttcatttaaaaatgtgttttgggctgggtacagtggctcacgcctgtaatctcagcactttgggaggcctaggcgggcagatca

SEQ ID NO: 5648 - DNA, 1100 bp, Homo sapiens
gtgcccgtgtgctgggaggctctggaaacgggcaagcacacagccttgggcttctgggctcccctggggagggatttctgaatttgaaggtgaaattctcagagggactttgaggtacctcctcttttgaggtcaggagttcgagagcagcctggccaacgtggtgaaacctcgtctctactaaaaatacagaaaattagctgggtgtggtgctgtgcacctgtagtcccagctactccggaggccgaggcaggagaatcgcttgaatgctggaggtggagattgcagtgagctgagattgtgccactgcactccagcctgggtgacacagtgagactccatttcaaaaaaaaaaaaaaaaaaaaaagaaaaggtgaagataacaaacttcagtgtccttattgattagtaaaatgagatttgggaagtgggagtttgggtagagcttgttcccagagaagctaatgatgactgtgtctcaagtacaaatttctggttcgaacttggccactgaatggacagtaattaggtttgctggtgccaggtggagatttgtgtgctctcaggggaggatttcaagggttaacttgttgagttttcctttggctgggtctctgtaaatctctttaatctttcctttccccaaataaatctccttaaatccccttcaatctctctcctcctgcttctcctcctctctcctctgggagggcttaggcatgggtccagcggagatttgtcacattactggtcaacttgcccaccggggatatgttttctttttttactttttaagtttttattttattttctgagacagagtcttgctctgtcgcccaggctggagcgcagtggtccagtctcggctcactgcaacctctgccacccgagttcaagcgattctcctgcctcagcctcctgagtagctgggattacaggtgtttgctttttttttttgagacggagtctcactctgtcacccagcctggagtgcagtggcgtgatcttggctcactgcaacctccgcctcccgggttcaagtgattctcctgcctcagcctcccgagtaggtaggactacaggcgcgtactaccacgccc

SEQ ID NO: 5649 - DNA, 1844 bp, Homo sapiens
ttgcagtgagccgagattgcgccactgcagtccgcagtccggcctgggcgacagagcgagactccgtctcaaaaaaaaaaaaaaaataaaataaaatgtttattgtccgggcacagtggctcatgcctgtactcccagctacttgggaggctgaagcaggaggttcacttgaggtcaggagttccaggctcctgggagatggcacagttccaggctatagtgagccatgatggcactgctatactctagcctgggtcaaacagcaagaccctattaaaaaaaaaaaagtttgttgggtaaatgaatggataagtggaaggaaaggagcataggctttgattagattcatgaagttcaaatcctaactgtgtcattcaggacctatgaggccttgggtgagttacatcatctttctgagtttctcttctctcacatttaagtgggggtaacagtacctacctttccagcttgttgtgaggttttgttgcaataacaagaataatagtaaggactgtaggctgagcacagtggttcacacctgtaatcctagcactttgggaggcccaaatcattccactgcactccagcctgggtggcagagtaagaccctgtctcaaaaaaaaaaaaaaagaaagagtataacacatgctgcgattacaggtgctaaatgaaaggacgttgactttatttatttatttatttattttgagatggagtcttgctctgtctcccaggctggggtgcagtggcgcgatttcggctcactgcaacctctgtctcctgagttcaagcgattctcctgcctcaggctcccgagtagctgggactacaggcatgcaccaccaagcctggctaattttttgtattttatagagatgggttttcactatgttgaccagaatgatctcaatctcctgacctcgtgctctgcccacctctgtctcccaaagtgctgggattacaggtgtgagccaccacacccagccaggattttggacaattgagagacagattccagcttttgttattgcaacaaaacctcacaacaagctggaaaggtaggtactgttacccccacttaaatatgagagacgagaaactcaggaagatgatgtaccttgccaaagggctcataggtcctgaatgacatagttaggatttgaactttaaaacaacaacaacaaaaccatcagataggatggattgagtctactccatgccaggcactaagaaagtgttggtaaacaaaacgtggttcttgtcctgagggaactttttggggagacagaaaaacatgtaattacagttcagtgtgactgtgtatcggtaggaaggtgcacatatgaagctgaaaagagggtcatctcatcgggatgggggctcagggacagtgagctgggctgttgcctaagaaagttccagaagtcagaaattacatagcattgctcagtgagtatataatgagttgctatgtgtcaaagaggacgccggcttctgtaggataaaggaatatatagttttaataatatatttaaatagcattatgttggccaggcgtggcggctcacgcctgtattcccagcactttgagaggcccaggtgggtgcgtcgcttggggtcaggaggtcaagaccagcctggccaacatggtgaaaccccgtctctacaaatacaaaaattagctgagtgtggtggcgcgtgcctataatcccagctactcgggaggctgaggcaggggaattgcttgaacctgggaggcgaaggttgcagtgagctgagatcacgtcattgcactccagtctgagtaacagagtgagactctgtctcaaaaaaaaaaaagcatt

SEQ ID NO: 5650 - DNA, 1082 bp, Homo sapiens
tcttcaggcttcaaggagaggtgctcagtgcaggagactcagcttctgcccagcaccacagggtcgagggcttggagcatccaggtggtttcatccaggcctgagtgagaacgtgacctagttactgtgcctctctgcacgttggcagaataaacagaccttgcttccttccctactcacagcaagcagaattctgctgagcctctcggaggctggagggccggttttagtaacgtgccctttcctggttggcgaccgtccagttattttgggtgaatgttaatggccgtgagtttgaaagttgtagttagatgaaaacgccctctctggacacagtgtccttgtcacctactgtctgaaggtgcttcctttttggggaataggattgagagcaaaatggtcacaaaatctgtggctttggattgtcatttgattttttttttttgatgccttctgtctgcatttaggtcagtggaagggatgaattcatcataggcacttgtagtagaacatctccttgagcctcaaagagaaggctatttttcctgtgggtcatctttgtgctgtgcatgggaggtcctgccccatggggcaaggtgagtttaacttttggaggtggctggtgatcttggggggaatttaatttgaggacatgtgcatgaccaataaactgttctggaggaatgaatagtcctgtgtctcccatatttttaccttttataaagcgcttgtactgcacggtgtccttattctaggctgatgcaaaattttcatactgcatttgctagtgatttgcaccagtggccgaagaactataaagtagttgtctctattttttaaaaattaaaaaaaaagatggggtcttgctccattgcctagactggtctcaaactcctggcctcaagtgatcctcctgtctcagcttcctaattgctgggattataggaacgagccactttgctcaaccttagtttctgttttattcagaatggaaggaatttctcatataagtagaattctagagctagaagagacattgtatctctagctctgtctctgtctttatctctgtcactatatct

SEQ ID NO: 5651 - DNA, 1034 bp, Homo sapiens
tgtattgactcaatgcccacattactaagcgcccgtctttaaaaattagccacagtctagcacgtataaacagataggacaattaacacctgaaattgtcttgttatataagtgaaaccagtgaaacgtcattaatcaagaccctcatacatttggaatgccaagtgacagtcaacagggttagaccgaagttggctggagccagtatctatgagacaggagtttgttgagcaaacccgtgatatcagcatgacatggtcatattgtttaatctgctttacaagaacaaacacttagctttaatattggcatgcgttgttaaacatttattacaagtacttcttatcaggaccaacgagacttctgcttagcaataatttgccagccctttaaagttgtttatgaatttcagagcacttaaatggcgtttttatgtgaaggttttgaaatcgacgggagaaagggcaaatgcgagcatctgatttgtttgtaccagtgctgcttggaagaggactgggctttgaggagacactcagcatttcttgtcgcgtgtaggattgaatgggtgcatcaatcaaatggtgctgggattagcggttggcttgttgggaagaaaacagctcattgtgtttctcagtggcagttccattggcaccacagccaagatgatctttccttgctcaggtttgtgctgtgcactccggacattcagcttccctgactcctaccccgtggaagtttgtttctgacttgtttccagatacccctggggaaacagctccctccctggttcaggaccgtcatgtcgcgccaaacaccaaaacaaattccaggtattagaaagttcagtgtaaaaacccataaaacaagaagaaaatactagttaatatctggcaaaagctttttattgttattgtttttttaattaagctgttggccagatgtggtggctcatgcctgtaatcccagcactttgggaggctgaagtggatcatttgagctcaggagttcgagaccagcctgggcaacatagg

SEQ ID NO: 5652 - DNA, 1037 bp, Homo sapiens
accggagggagggctctgactagcactgggcggtggagagaagcagaactcacttgccatactctgtgtcagtttccagcaagagtgaagttctgtttttccggtgggttctgccctttccttatcagttcagctgagcttactccagggcttcccctttgctcccagctttccagggcatgttctgccaaaaatgagctttgccttgggtgtgtctgattgtgttgttggtagactccctaaaaaccttccggtgctagcgatgctgtagacggctgagacccatggaggtggttgttaattgtcactgggggcccggggtcacactgcttgggcctgcatcccagtttaatggtgggactttggacaaggttcctcaagcccccgaagcctctctgtcctcatctgtaaaatggggacagtggcagtacttgtctctcatagaacatccatgggaggaacttacctcagtgcctggcatatagcaagttttcaaaaaatattagctgttaatattatttttattacctagacgcaggatgatggaccctatgaccttctgagtcttcttccatctgtgtgtgtatgtaagacagaaaaagagactgagagagagagagagagacaaagaacaggagaactacactgtggatttgggtgatgctccagggaggtttgaacagactgtcaatgtcatgttttgaagagagcaaggaattttggggatactgctgtgccagagaaaacaggttcgagagaaagaaaacagaggcgggatcccttacagagcaagaggtaaccaggagttgtttaggtggcatccagccaggggaattgctcagggttctgcagagggcagcctctggggctccggctggggtggggagatggcttggccctgggctgttggcctgggaactggggttcagccacagttgagttccaagcctcctagtgtttcctctacctcctggctccttcagaaatgagggctgggggaggcccgaggctggccatctggggagctgtgtaagcaa

SEQ ID NO: 5653 - DNA, 1058 bp, Homo sapiens
gttcccaagagaaaggagggagaaggagctgggctggtgccctccatcccctcctggccagctgggtaagtctgttctcttgccttgggaggaggaagaggtaggagggcctggaggagattcctctgtagacattgggaacctgctccatcttcactcttgccctcttcttgggacctggtatccccagggacccagtgccctggctccatttgaggatttccaccctggggcagctcttttcctgtctcagcttcacagactaatttatttagagggggcgagagaaatgagataaattctgataatagtggcacttaataaatattaattgtcattcatatacatgatatgcatttcttgaactggtaaatctttcaaagaatttattttacaatttctctcaaactctgaatatttgtggagtaaatgaatataccaatcctttgttgcattgggaggcagagacttgaggatggttatgtgtttgtgtgtgtgtgtgtgtgttggagagtgggtcagagacgaagtgggacagggagctaaggcttctggaagattccctgggggatgtccatgttctcagtgtcccgggggctactctggccgatgggccttcgaccaccggggtcccaggaaccagagcaacagagacattggggatctgaagcagcacatgtgctgggggccgcctccttttccaagtggccaatagccccttaattgagggagaggaaccatccaggttcagaggcaaagcccacttgagagggaaggaggagagtctcgtggagcaggcgagtcaggtgggcgatgtttgcggatccctttgcaagcctgttttcacagtgttttcaggtgtgttctgagagcagcgtatggaacccgacaatgacctttgttcacattaatggagcagatgattgcattgcattttttgggttcttaaaaaaatggtaatatgtattattgtaaactgaatttacaatatttatacaattatttatattgatttatattgtataaatatacagtgtccagtttttctcacatctagc

SEQ ID NO: 5654 - DNA, 1039 bp, Homo sapiens
gttcacggtttgggggataagccaggctgtccaagaagccatggtgtcttcctccgtgactcatttctctacaggtgtacgcacatttttctaggtagaaaagtaaacttgtggaaagaagttttcacgcaggtgttcagtgttctttctaatgagttcttgctgggtttagagccaagtgataatgcagctatttactttaaaatggtttgaattgcatatccacaaatccacaccagatttgctgcctgtgaacgtgtggtttctttttgttgatgtcgtcgtttgtttaatcctggtaggacctcttccagggcaaagccacttggtacagcaacggggtgggcagccctaaagcacggcagagtgcaaatttcagagagtgcctcgaatttcgagcttgaatcagaatggtcaagatacctgggattatgttaaaacttaggaggcaaatctgtttgtgggctctgtttttgactggttccatgttctgttggattcagaacatggcacattgtaggtgggggccacttttactgagctttcctttaaatatgtctatagagtggttagaagtttgatttgttctgggacccactctcagttaggcctgcccgccctcccaccttgcctgcctgtctgctttcctgccttcctgccctccttccctccctccctccctctctccctgtttccttccctccctccctccctccctccctctccccctctctccctctttccttcccttcccttcctgcccctcccttcccttccttcccctcccttcccctcccctacccttctccgtccccccttcccgtcccatcccccacccctccccctcccctccacctcctctccccacccctcccccctcctctccccctcccctcctctccccctcctctcccctcctctccttctcccctccccttcccctcctgctcctcttcccctcaccctcccctccccttcctttcctttccttccttcctcttttctctctccttttctttcattttctctctctctctcc

SEQ ID NO: 5655 - DNA, 1097 bp, Homo sapiens
caatgtatctggactaaaatatgcccctccctcccttccttccttttttttttttttttttttaatatagctttaatgggagactggagcctgctgtttctcaccccttgtctcccgggtgacagtatttggtgtacaaagctagtgactctgcaattgttgaattagctacagattaactcctctgagaacttggtttccgatgagagtgaaacatgtactttgtatgcagaactcttactcttcaaacaggacttattaactagaagaaacttcactttgtacttgaaaaatggaatgtaaatcataaaagattgtaccatttaagccccactagaaagagaaaaacagaagtcatggagaaccacatcctgttcatatggaccccagcctaagaagaatgcaggagtgtgtggagagggtcctatggggaaccccaggaatggccaatggtgggaaattaggttctgggaaatgtgtgtattgttttgaaaagtattattttacctggagaaattgaacaactgacatcagctaacatatatttattattgtgttgaatggccagcattctgtgggggcattgtgcttttttcctttattttattttcataggtttgggggaacaggtggtgtttggctacatgaataagttctttagtggtgatttctgagattttggtgcacccatcatctgagcagtgtacactgtacccagtgtgcagtgttttatcccttacccatccccaccctttcccccaagtctccagagtccattgtgtcattcttatgcctttgcatcctcatagcttagctcccacttatgagtgagaacatacgatgtttggttttccattcctgagttacttcacttagtattatggtctccagttccatccaggttgctgcaaatgccattatttcattcctttttatggctgagtagtattccatggtatatatataccacgatttccttatccactcgttgattgatgggcatttgagctggttccatatttttgcaattgtgaattgtgctgctataaacatgcatgtgcaagtatgttttttgtacaatgacttctttttttctg

SEQ ID NO: 5656 - DNA, 1050 bp, Homo sapiens
ataccaattaaaagagactgttagagtggatttaaaaaaaataaataaatgaaacaagactaggccaggcacggtggctcacgcctgtaatcccaacaatttgggaggccaaggcaggtggatcatgaggtcaggaattcaagaccagcctggccaacatagtgaaaccctgtctctactaaaaatacaaaaattagccaggcatggtggtgcacacctgcagtcccagctactggggaggctaaggcaggagaatcatttgaacttgggaggcagaggttgtggttagccaagatcacgccactgcactccagcctgggcaacagagtgagactccatctcaaaaaaaaaaaaacaaaaaacaaaaaacaagacccaactataagtcgttgacaagaaactcacttttaatataaagacatatataaattaaaaagatggaggaagatatgttatactaacactaatcaaaacaaacctggagtagataacattaatttcagacaaagacgtctcagagcaaagaaaattaccaaggataaagagggacattacataatgataaaggggtcagttctccaagaagacacaacaatcctgagtgtgtttgcacctaacaatggaatgtcaagacgcatgaggcaaaaattgatagaactgcaaggaaaaatagatgaattcactagtatagttggtattatggactaaaatgtttcccccagaattgatatgttgaagccctaaccccagtgtgatgatatttggagatgggacatttgagagttaattatgtttaggtaaggtcacgagggtggggccttgatgatggagtgagtgcccttacaggaagacacaccagagagccctcccttcctccctctctgtgtgcatgcaccaaggaaaagccatgtgaggacacagcaagaagcaaccatctgcaacccaaggaaagagccctcacccagggtgtgaccctgcccacaccctgatctctgatatctagtctccagagttgtgaaaaataaattcctgttgtttgagccacccaga

SEQ ID NO: 5657 - DNA, 1039 bp, Homo sapiens
ggatacatttaagatagcctgttataataggaatatattccaagctcaatccaattaaaagctatattcaaatcttggacttttttctaactttattttaatttttttaattatctatactctgtatcactactccattgcatctccatcattacatctggataatcccagggcagaacagtactccttactgtgagactggattgcttttagcacagtccatttgaggaaccaagtgaaaccctctaaaactctgaaaccttgtcagtgtaaatatcagccaacaactaaaactgctaagctcttaaagtatatattattagcagaggagaacaagtgttgccaacatacaataaaagtgtattataaggctgggcgtggtagctcacacctgctatcccaacactttgggaggccaaggcaggaggattgcttgaagtcaggagctcgagactagctggggtaacatagtgagacctcatctctacaaaaagtaaattagctggacacagtggtgtgcacctgtagtcctagctacctgggggtgctgaggcaggaagttcgcttgagcccaggagttcaagactgcagtgagctatgatcataccactgcactccagcctgggcaacagaacaagaccttgtttccacaaacaagaagtgtcttgtaaagagttggtattctccaaaactgaagaatgtatttatatcttaattacatctgagacagactctaagaaacagaatacagcagtagaagctgtggttctcattgagggggctgcaggcttccttctcaaggtagagaattgcccccacctgagatgctactgcctgccccagccatggcccacttgaagctccctatgggtaatgaaccatgttgctgctggtgggcatttattgcacatgtgaatcagaattgagatagaagagacttaaactactcagcaaaagcttctgagtggcttttaaatttaagggatcacagaattgtttgggtctctttgtcattgttaaatgtgaacctcaggcctta

SEQ ID NO: 5658 - DNA, 1078 bp, Homo sapiens
acatttaatagacttgctagttaagcatcccaaatctgaaaatcccaaatctgaaatgctgcagtatttcctttgagtgtcatgtttgtgctcaaaagttttagattttggagctttttttttttttttttttttttaatctattaactcattgttacagaaaaaaccctgggctgtatagaagaacctttccctagctgggcatggtggcttacacctgtaatcccagcacttagggaggctgagggtggcagattgcttgagctcaggagtttgagaccagcctgggcaacaggacaaaaccccatctctacagaaacaaaatttagcccggtgtggtgacatgcgcctctagttccagctgcttggtaggctgagtggggaagtcaaggctgcagcgggccaagattgtgccactgcgctccatcctggacaacagagcaagaccctatctcaaaaaaaaaaaaaagtttcctcagaactgagaaggatccaaaagccaaagaatgactcggacttatatgtaaggcacccctggatggcagcaagattgtttgggagatctgcttatttgtctatttttgctttggttacctgtgctttcgtgttactactcaacaaatcttagccaagaccaatgtcctagagagtttccccaatgttttcttttagtaatctcatagctttgggtcttagatttaagtctttaatcttttttttgagacagtcttgctctgttccctggctgtagtacagtatcgtgatctcagctcactgcaacctctgcctcccgagttcaagtgattctcttgcctctcagcctcccgagtagctcagactacaagcacgcaccacagtgcctggctaatttttgtatttttagtagaaaccgccatgctggccaggctggtctcaaactcctgacctcaggtgatccacctgcctcggcctcccaaagtgctgggattacaggcgtgagccacggtgcccagcctcttgaatacattttgagttgatttttgtatatggcgagagatagggatctagtttcattctcctgcatatggatatccagttt

SEQ ID NO: 5659 - DNA, 1004 bp, Homo sapiens
ggtaggggtggggtagggaaacttgttattttattttacttatttttttgagacagagtcttgctctgtcacccaggctggagtgcagtggcgcaatcttggctcactgcaacctccacctcgtgggctcaagcaatcctcccacttcagcctcccgagcagctgggattacaggtgggcgccaccgtgcctggctaatttttgtatttttagtagagaaggggtttcaccatgttgcccaggctggtctcaaactcctggcctcaagtgatccacctgcctcagcctcccaaagtgctgggattacaggcatgagccactgtgcccagcctaatcctaccttccttatcaacctttatgaaatgctttcatgcaaatccaacatatgtgttttatttttcttaacctgtcattggtagcgtagggattaaatgtgtaatcacaggccactggaacaggtaagtacacagtgatctgaactagcaaacaaaaacaaccgtgtccttcaaggagaacctggttgatctaaagttaataatcttcacaatagattttttttttctttttactgtgcctttttctgtttagaggaaataaatggctttctaaagaaaatcatctttgtctcgagtttcgttaaaataaattttccctttccaaacatcaaaaggaaatctgaagtattttagataccaaccatcctgaatagcaaatgaggaacttctgaataatgggtgtggaattttccccaaagggaacttcaacattcaaagcttcaggcggactgatggataacaaacttgacaggaagagatcgcatggattgggtttctgtgtagaaactggtgatgacagaagtaaagcttgatgtttgtagcaggtgaaatcatacctaatgacattttagaaaatctggagcacaaatctatgtgcgtaagtatatctctagtagcaacccattaggtgtaaaatagacttctctgatcccatggctagagatttgg

SEQ ID NO: 5660 - DNA, 1085 bp, Homo sapiens
aaaacatgggaccattgaatgaaactttatagtccttaaatgttgctgaacttttgctgtcttgcaatagaatttgaatgtaaatattattactggtataactcaaatgttatttttcttgcatttcaaagcttgcttttatcttccaagaagtgtaaattttagtatttgtcatctctcaggacagatacaattaataggaaatagaagtttgaagaaacagagatggcacatcatagcaaactaagttcaaaacagaataaccccagtgcatcaaggttaaggtgggacagtggtttgtgatgccagggagagtggggaaattgtgatgatgctggtagacctgggcagactgtgttcccagccacacccgccaacagaggaggaaggtgctggtactgatgtccccacccgagagtctgtcctggccttggttttccacagtgagggctcgttctaatgttgcacaatgtcatactcagatatcactgtgacctgttactatgctttagaacccgagaggcctctgttcacatggcagcatgtgtgagtggatgctcccggagcaggtggagtggtggcgctggatagcggtaagagcgggggctccaaaggcagaacttccagcttcacatctcagctctgcacctgctcgctgtatgactttagcaagcaactggatctttctaagcgtcagcttcgttgtcttaaatggtagttggtaataatagtccatgcttcgtagcatcacttttgtgttcaagcagaatgctgagcacactggcaaataataagagctcgtaaatattagttgttgtgtcactgttgtcattagagggaagccagagtccctttcaggagccctgtgtttaggggcagtgtgtcctcacaaaacaataacagtaataatgatggtgttagcagcaacagcagtaatcatggaaacgttgattaagcatttactgtatctgaaccctgcggctgttcctgctttcagccacttctgcattgagaagggccggggatgtggtggaagctagatgtcaccaagtagggggatgtagattcacagcggtctattctgg

SEQ ID NO: 5661 - DNA, 1203 bp, Homo sapiens
gttccacagggctgtgaccattcgagggaagcacattcaaagatgtagatcccctcagagaagttttccatttccctgaagttaaagatcttcaaatgactgcaaataacatgaggatatatagaaaaatgcccttccccaatttccaaatcgtgaaaatttggctcagcaggtaagtatttctgtttgtagttgtttataaaacagtgaagacataccttttaaaatcaatcacagtccttagataaattcctcccattcttcctccccagactcctatccattaagagttgtgtctctgaattcaaatttcataaaacactgagttcccttcagaagtaaatagtgcatttcctaggagtgtcattgccaactgcaaagacagagcagtatttttcagtgttgcagcatagagcctgcaacaatctggaggttgtggctgtgatttcagtctttgggggacaattaggaaagtaaagctaaggccaaagataattgacatgtggaaagagacaaaggacagtccgaatctcgtaggaggaagggagcggtcctgagagaccagagctaggcaggcagctgtcgctaagaatggaacttagtgatctgctgtgggcccagagcgctcagtgagaactcagaggactaggaaacaggcttgatagcagtatgacttttaatgctaagctctgccttctggtgatatcctgacctactccagcacttcagagcactctagggtttgatctcagtaaataacttggaaatgcaaccacctttttgttggaaagaaagtaataatgtatccggaaagaaagcaggttggaaaacaccagtgtttccaaatctttgatagatttgaatttggggattcatatcattggctgcttttcagccacatgtgctcacctttgtacccccgcctaccctgccccaccccatgaggttaatgcttcacacagaaggatggtagaacgaagtggggcagtttcaatgaaagggagcattaagctgagctctgcctctttcctttgtctgcatgtctggtaaacacaacttaatggattgtgcctcctccttcccccagtatactcccatgaagcccctaaagaataagtttatcccatagcaatctatggtatggtgtcatattgggagtcttgagctgaaaagtactttctcacggtatattgacgcaagagc

SEQ ID NO: 5662 - DNA, 2079 bp, Homo sapiens
taggattgtacaaaaaggcacacagtattcgctttgcatctttcgaactagcaatggacgtggctggggtgtaaagacccttgtgaagattaaaagaatgagttttgtcatggaatatgttggagaggtatgtttcatttgccacgtagtaaatgatggacatgcaaggtttatacttttggaaaattacctttttatctctttaagagatacttggtacattttgatattttcatttgcagatatgtagaaatttattcagatttaggagaagagttcactggcatatttagaaataaaaaacttttatatgaataaaaaatatacgttaaaacaaattgatatagtcatctttcaacaaatacacattcctactagtcaaacctaggatttgtaaaatttaaaatatgacaactgtttttacccaaaagtcctaagaagaaactcagatgtaacacatgctgctttgaaacttgaaagttttaatttacttcatctatttgaccaaatatgattaaatgtagttggcagaactctattttggatcaacatgaaagatactatatttatgagttttgtaaaatatacacaagcatttattgcatccataatctgtaacttacttttgaactgtgaagaccattctcaaaactaccatacaaatactagcaaatttatttgtatacaaatcatatatatgtatatatatatataaatgtaaaaagtatttgccgtgtgtcacatactattctaagcacttgatgtattaattcactaatcctctccaaaactcagtgaggtagtactgtttcttttttttttttttttttttttttttttgagaagtagtactgttatgtccattattgtagagaaattgagtaccttgcccaaggtcacacaggtcacatagtaataagaaccgagattcaaagctctaaaatcagtagtcttcaccatggcaccacactgcttcaaactgaagggtaggttgagctgtgactagaaagacacaagcatggctacatatctggagttgtcaactctggattttttagttggaattgggtcacctataattatctgtattcatctataattctgaaactaaattagatggctgttttgattcttacacttttagacagtggtagattattataaattattcagtatacaagatcttgtataatcaaattactctttttgttaaccaaaattttttaagttgcattcttaatgagtgcagcagccaaatttggttggtaacataaagtactttagacacttttggtttcttaagccgagcgtgtcataaaacttgtgttcttaagagcagaactgtagatgacgatcttagacttacagaattgcatgaaaataacatattctacaaaaacaaaaccttccattccaaagttaacatagcttctcccctgtatttttaacaattttccatttgtaactgcatatatataagttataggaaaaatgtgcctggatcatatttagagcatatacttgcagatttagtccttaacattcagttgtgtcctgtagagagctatagttgtatagctttttgaacatcctaattataatgaaagtaatgcagtgttccaatgtactgctcaaatcctgtttaaaaagtcataaatcaaccagttacagttaatcccagcacttggggaggtcaaggctggaggctcacttgagcccaggagttccagaccagtgtgggcaacatagtgagaccccacatctctataaaaactaaatcattagctgggcatggcggtatgcacctgtgatccagctagtcaggaggctgaggcaggaagatcgcttgatcccaggagttaaaggatacagggagtcatgatggcaccaccgcattctagcctgagtgacagagtgagaccctgtttaaaaaaaaaaggtcatcagtcttttgcattatcatttttcttcccctcattttcccacctctttgcatctgagtcttagtttgtgtgaatgtttgctttgatgacacctgaatttcttactttttaaatatttgtaggtattcgcatatta

SEQ ID NO: 5663 - DNA, 1021 bp, Homo sapiens
gtttacaccgtttgtacttaaatgggttctaatgttcctttttagtgtgacccaaatcttcaggtgttcaatgttttcattgataacctcgatactcgtcttccccgaatagcattgttttccacaagaaccataaatgctggagaagagctgacttttgattatcaaatgaaaggtatgcttttcaagtacagtttcattggtgtcagtttcaatatgaagaatcaaatcagactaggaacagaccttagatatttgaaccaaacctaatactaaagatgaaaagttgaggcactaagtttgtcatcctaaggtacaaagctaatccaacagctaatactagaacccaggtctgcctgagcttcagctgaggaatggttctacatcgtaaattttcagaacttccattttggaaactgatttatttattatagcatcttaatactgtactacttgtctttttttttttttttaaattgtgggctaagcatgctggctcctgcctgtaatcccagcactctgggcttgagcccaggaattcaagaccagcctgggcaacatggtgaaactctgtctctacaaaatatgaaaaaactagccgggcgtggtggcgtgtgcctgtagtcccagctactcgggaggctgaggtgggaggatggcttgagacagggaggttggggctacagttgagctgtgaatagcaccactgcactccagcctggacgacagagaccctgtctgaaaaaaaaaactataagcctacatttttgaatttttactgagagatgtatattcaaaagattgaaaatatttaaatcacatacaaatttattctattcctacttgaacctggcttttaaaaagaacatttaattctatttgctttattgtgacaatataaatgttttctttcctttaagaatgatggcctttacatattgtcattgcttaacctcttacatactgtgcttttatatacggtgtgaaatgaatgtgtattagatattcccagtaagtttca

SEQ ID NO: 5664 - DNA, 1057 bp, Homo sapiens
tattggtttcctgaagatgtcagaatttttcagtgtaagacaaatatcaaaggtaatagatccagtttaaaaggtgaatccactgtatgtattatattgataccatcattttcaggatctacattaagaggatggtgatacataattagtaatctcagggttttttcccccatatctaaaatgtagacaatagttgtttctcttttagttcatcagtttctcttagcaaaataaattaggttgggcatttaatgttctatttaccatggcttagctttgtttctgttttacagtcatttccagtaagactataaaaggggcagaaaaatactgatgtattgactacgtgctagcaagattaaccgaaggtttatattcaattcctttaaatgttactttccttttaagatagctttcatggttcatgcatttgatactacacttgatcttggccaaaaggccaaggagtgatggttcatgcatttgaatattaaaggacaatttgacatttcgctagcataatgtggatgaatacttcagaaatttttgagcattgtcactcaccaggtacgtaaacatactatggtaagtactgcctagaaatgcaaaggaattttagaattcagagctcatattcattgacccagtcttttatgccttttatatgtattcatgtgcttctaatgaacctgtcaggttggtgtaaggtaacaagcttagactgttaagataatgtcaacatgccaagatcacccagtgaactttttaaagtatttaatcttcggcttcaggcagactttttaaaaaactagtttatactattcaaacatttaagtcctggaactcttctccaagataaatgtggctgactgctgagtgtcttctgtgatacatcttggcattttgaaacttcatgtttcggctggacacggtagctgacgcctgtaatcccagcactttgggaggccgaggcgagtggatcaccagaggtcaggagttcaagaccagtctgaccaatatggtgaaaccctgtctctactaaaaatacaaaaattag

SEQ ID NO: 5665 - DNA, 1047 bp, Homo sapiens
aatagctgggactacaggtgcccgccaccacacctggctaattttttgtgtttttagtagagacggggtttcaccgtgttagccaggatggtctcgatctctctgaccacatgatccacccgccttggcctcccaaagtgctgggattacaggcgtgagccactgtgcctggccaatagctgggactacaggcgcccgccaccacacctggctaattttttgtgtttttagtagagacggggtttcaccgtgttagccaggatggtctcgatctctctgacctcatgatccacctgccttggcctcccaaagtgctgggattacaggcgcgagccactgtgcctggccatatgagttctcttatatgaagtgtccagaaaacacaaatctatagagacaaaccatagattagttgcggcctaaggccgggaatagtaatggggagtgactggaaatagacataaagtttcttttttgggtaacaaaaaatgttccaaaattagatagtggggatgattgtacaattctgttatactaacagtcgtggaattgttcacctataatggatgaatttatggtgtatcaattatacttcaataaagcttaaaaaataattttgtattgtggagtttataaagttaataacagagaatgtatgacaataacagcacagactgggagaagaggaatggaaatatactgctggaacattcctataccatatttggagtaatatatcatttatcttttcactctgatatgttaaagatgtatacggtcagtcctctgtatccacaggttccacatctgtagatttgactgaccacagatcaaacatatttggaaaaaagcaaaaattaaaatacaaaaaacacaaaaattgatacagtataacaactagttaccaagcatttacactgtattaggtataagtaatccagagatgattttaagtatatgggaggatatgtgtaggttatatgcaaatgtaacaccatttaatatgacttgagcatctgcagattttggtactcttgggggggtcct

SEQ ID NO: 5666 - DNA, 1027 bp, Homo sapiens
cggcactttgggaggccaaggcgggaggattgcttgagctcaggagttcaagaccagcctgggcaacagtgagactcccatctctattaaataagtaaataagaattaggttgacttgcatgtgcctggccagctcttttgacagattttcttctcactttataaattcagagcctgcaggccaggcgtggtgtctcatgcctgtaatcctagcactttgggagaccaaggcaggcggaccacttgaggtcaagagttcgataccagcctggccaacatggcgaaaccccatctctactaaaaatacaaaaattagccaggcatacgtctgtaagtccagctactcaggaggttgaggcaggagaatcgcctgaacccgggaggcgaaggttgcagtgagccaagattgtgccactgcataccagcctgggtgacagagtgatactctgtctcaaaaacaataaaaataagatgaaataaaatgtagagcccccaggtgtaattaagggccatttctgtagcttagattagatgaccttgattactcactatgtttgtcttcctagggctgccatcacaaaataccacaaactgggtggctttaacaacagacatttattttctcacagctctggcagctggaagtcccagatcaaggtgtcagcagtgttggcctcttctgaggtctctctctttggcttgtggatggccgtcttcccttttatgcatgtctgggtattgatcttttatagggacaccagtcctattggattgagacctaccctaacaacccccttttaacttaattacttctgtaaagactatctgcaaatacaaccacatcctaaggtgctgagggttcgggctgcaacagacaaattttgcagggagatacaactgagcccaaaatgctccactgcaatagtaatggtctgtttggaagctactgtttttggagttattttctttgattgttaaatttgaccttccaagtgatgactacacatctttggagaatctcctcagt

SEQ ID NO: 5667 - DNA, 1022 bp, Homo sapiens
gagctgggattacaggcgtgcgctaccatgcccagctaatttttgtatttttagtagagacagggttttgccatgttagccaggttggtcttgaactcctgacttcaggcgatctgcctcccttggcttcccaaagtgctggaattacaggtatgagatagcatacccggcctttttttcttttctttttttttttttttttgagtcagagtcttgctctcttgcccaggctggagtgcagtggtgccatcatagctcactgcagccttgaactattgggctcaagcgatcctcccacctcagcctctcaaatagctgagacgacaggcacatgccacacctaatttttttttttttacttttgtagagataaggtgtcactgtgttgctcaggtcaatgtcttgaactcttggcctcaagtgatcctccagccgcaacctcccaaagtgctaagattacaggtgtgaaccactgcactaagcctgtaaaatattttttatgtggaattttcgtaatgcattatgtagtgacaccagtttttttgttaacctgttttcacttctctgtttttatttttgtgttagtaataacttggtcaaaataggtttacattcattattactatataacataacaatttcacattagcattaaggacaattttttataagttgtttctatacaaagaatgatgtattaaattttagaccttttatctataaatatgcgaaagctttgtaagtggctatactatctctgactataaggtcttggtccatattctttacaccatacatcgtatttatatatatgcctgcatatattcatgcctgcatattgtgcagaaccacctgtgaaccagatcctagtcttctcttcctctgtcaactgatcatagggaactccccatgataccattggtgcaggctggggagagaaggcagggtggcaggattggagaccatgggcatttgagccacttcctcacataacttacttgtgtcttcaggacccgttcgag

SEQ ID NO: 5668 - DNA, 1031 bp, Homo sapiens
ctcccgggttcaaccgagtctcctgcctcagcctcctgagtggctgggattacaggcatgcgccaccatgcctgggtaattttgtatttttagtagggatggggttttttccacgttggtcaggctgatctcgaactcccgacctcaggtgatctgcccgcctcggcctcccacagtgctgggattacaggcaggggctgctgcacccagcccagggttatatttattaccccttcttgcaatgaccaaatgaagaagacaatttaaattactagagtcttatttttctaattaggaaaaggaaagcacactgcagttaaagggcttgtttcgtgtcattcagtgaacagtggaattgagattaggtcttctggtcctgggttagcatagcctcttttttaggctaagatgtgatgttaccttgggttaatacttctttattaacagagacaagaataactaattttgatgttcatagtaaatacctacatagttagtaaaacaaacattggacaagttgagagactgggttctagtttaggctatctgaccttcaaaagattaaggattccattttagcatctaaaaatgaagtcatcaaattaaatgatctccatagtttattccagctcaaaaattctaaagtcaaatagtatttaacattaattgaaatgcaaatatttttattttaagcattatacattttaatacttaataatatattttacctactttaaaaaccattaatctcaatttaaaaccagtccttacttggatgacatttaataatttgacattttttagcagtagatttgtaatttgacttaaactttctttttttatttaagaaatgtattaaaattattaaagttgcagatataagtctaatcaaaaagagatgaaaattacagtctttttttttaaatagagtctcactctgttgcccaggcatcctactgcaacctctacctcccgggttcaagagattctcctgcctcagcctcccaattagcggggattacaggcacccg

SEQ ID NO: 5669 - DNA, 1025 bp, Homo sapiens
catttatctttttcatgactttttttttcaaactggggtctctgttttactggaagccatgaccgtatttcctaggatttttttttttttttgagacgaagtcttgctcttgtcacccaggctggagtgtgatggcatgatctcagctcgctgcaacctctgcctcccgggttcaagcaattctcctgcctcagccccccaagtacctggaattacaggcgcctgccactacgcctggctaatttttgtatttttagtacagatggggtttccccatgaaggccaggctggtcctgaactcctgacctcaagcaatccacccgcctcggcctcccaaagtgctgggattacaggtgtgagccaccacgcccagccttttcctaggactttatgagaggtggttggattgagagagcagtggataatctgtcaaagtggtttacttcctttatttatttcctttataagaagtacagttggtttacaaattaaatcatatatgatggtggcgtttgtgtttgtttttctgagtctgactttagggtttgtttatagcagtatcctaagggtagaaccaagagttaagacttgttgtgagttttctcgtctttgcaatttttccagccctgcgatttgtgctgtgtcttccacataatctacttttttttttttttttttgagacagagtctcgctctgttgaccaggctggagtgcagtgatgcaatcttagcgctctgtagactccggctcccaggttaaagtgattctcctgcctcagcctcctgagtagctgggattacaagcatgtactaccatgcctggctaatttttgtatttttagtagagacggggtttcaccatgtaggccaggctggtctcaaactcctggcctcaagtgatccacccgcctcagcctcccaaagtgctgggattacaggcatgagccaccatgcccggccacataatctactcttaacattacctccttaagattgatggctgccgggcgtggtgagtcacgcct

SEQ ID NO: 5670 - DNA, 1027 bp, Homo sapiens
gagctattaaagtggtggaatttacgggatttagaaactgagtgggtgtgggtgaggcaggagtcttggatgaaatctgagttcattctgttgtttgtttgtttgtttctgagagcatgaacttggctcatagcctcgagtccaggctcaagtgatccttctgcctcagcctcctgtgtaggtgggaccacaggtgcatgtcaccatggctgactaattttgggatttgtttttctagagatgaggtctcactttgttgcccaagctgattgcgaactcctgggctcaagcagtcctcctgcctcagcctcccaaagtggtgctggggttatagcatgagccaccgtgcctggctgttttttttgtttgtttttttgtttttttttttaatttaaataagagcatttgtagatgttgcatcagagagaatgtgaaaaatatagaaatgtcatgtaaattaccgagtgctgggcttggcacatggtaattttacaataaggttgctatctattgttattgtcggctaaactagtctaattaatcttagcagaactgtgtatgaagtgctgttcatagtcaatatttggcattctctaagcagacttaggttggaattgcagcctttcagtccaggggcaagtttcttaacttttcttggccttactttcctcatagaatatcaagccagcaatgcattcgtgaaaatttgagataagagatgtaaagtgctttaagcaacacatagtagaagcttagtcaatgaacaaaaggcattattgttggttcccagcctccaagtgaggccacaggactcttatctatctttgtatctcccatagaccttacctgcctcgaataacatcttacacttattaactgcttaatacatatttatcaaatccatagtaactttttatttcatcctgttgaggcttttcgccctccattaaaagggtttcttgggagggagcggtggctcacgcctgtaatcccagcactttgggagatcgaggcaggcagatcactt

SEQ ID NO: 5671 - DNA, 1023 bp, Homo sapiens
aggatatgttcctgctaggatgcagcaatatttttatcgtcaccacacaatatttattaaaggtctctcagtacacacgccacagtagaagtcagtatctttacgacaagcacaataggttaatgagtaaaaagttgaaagcatcctgaaaagcgaaaatgaaagacaaatgacatctaatgagttaacatttttcacagggtgcgtctcctggtggaagagggctgtgaagatcgaattctggtagcacatgacatacatacgaaaacccggctgatgaaatatggaggtcacggctattctcatatactcaccaatgttgttcctaaaatgttgctgagaggcataactgagaatgtgcttgataagattctaatagagaaccctaagcaatggctaactttcaaataggatggttgcttatgaattcacaccttgagtataaaacttgcagagaacattcagcgatttccagtccactgtgagatattaatcagttacctaggactaatgacagatcatttccttctgatgagaactaggagggtttgccttctctgagaccagctattacaactgtgcctctagggagttactcagcctaattgagccctattattttaacttaacaaaataaatacagaagtacctatttctaaacaatgatttaaagtctatatcccctaagcggagttgttgtttttctccctaatctatcagctgcactacttgagaaaatttaaagtgtttctagttaaattatttccttcttgagcgatctaatgtttcttgtaatattgatgatcctactaattatcctgctgttctttaattaatgcttaatgaataatatggcactgtaaaatagcttctgcaacaagggaagttaaattttgagacttttttccccaaaggatactgactgtaatacaattaccaattcacaatgataaaaatattttgaaaggttaattttatactgtccacctatctatatattcttctactgaaatgattttgata

SEQ ID NO: 5672 - DNA, 1044 bp, Homo sapiens
agtgggaggggaccctctttcctaacggggttataaaaacagcgccctcggcggggtccagtcctctgccactctcgctccgaggtccccgcgccagagacgcagccgcgctcccaccacccacacccaccgcgccctcgttcgcctcttctccgggagccagtccgcgccaccgccgccgcccaggccatcgccaccctccgcagccatgtccaccaggtccgtgtcctcgtcctcctaccgcaggatgttcggcggcccgggcaccgcgagccggccgagctccagccggagctacgtgactacgtccacccgcacctacagcctgggcagcgcgctgcgccccagcaccagccgcagcctctacgcctcgtccccgggcggcgtgtatgccacgcgctcctctgccgtgcgcctgcggagcagcgtgcccggggtgcggctcctgcaggactcggtggacttctcgctggccgacgccatcaacaccgagttcaagaacacccgcaccaacgagaaggtggagctgcaggagctgaatgaccgcttcgccaactacatcgacaaggtgcgcttcctggagcagcagaataagatcctgctggccgagctcgagcagctcaagggccaaggcaagtcgcgcctgggggacctctacgaggaggagatgcgggagctgcgccggcaggtggaccagctaaccaacgacaaagcccgcgtcgaggtggagcgcgacaacctggccgaggacatcatgcgcctccgggagaagtaaggctgcgcccatgcaagtagctgggcctcgggagggggctggagggagaggggaacgcccccccggcccccgcgagagctgccacgcccttggggatgtggccggggggaggcctgccagggagacagcggagagcggggctgtggctgtggtggcgcagccccgcccagaacccagaccttgcagttcgcatttcctcctctgtccccacacattgcccaaggacgctccgtttcaagttacagatttcttaaaactaccactttgtg

SEQ ID NO: 5673 - DNA, 1093 bp, Homo sapiens
ttcaccaaaattagatggacttacagaatttttaacttaaaattggaatccaaaagccagaagatccccattatagtttatagttgtattccctggaatatttactgggattaactgcaaagcactctcagatgaatagtgtagtataacattttgaaactgaaatacatttaccaaattaatttaaccacagcaatgtgtgtggttcattttagtccttgagcatttttgattatcatacctgtcatgttttctgcagtgtagtgagttaacataaaacaacatcaatacaaaagatcctctgtttcgagattaagcaaaattcctcattctcttcaatgtgatagaataccacattgatctttctttggaggttagtaaaatatcttttatgtatttttcagggcttaacaagtaaaaatcaatgttttcatcaagtctgatctttttgtcacccactcttcattcatttttccactaaggtgatagaaaagtctcaacagtttaagaccgtaaggctatgaactccaaatataattgctgacaagataagcaatcctcacgcatccttttgagaggaaataaaatcttagttgcaagattacatattctgatttggaatgctgagctttttaaatggaaatatagaaggacggctgaatcagcaaaaatcctttatgtagtttcattctttgcaagcttgaccagtcattctgaaacaggctaactgaactgatacagtggcaagtgaaaaagacatgcctttacaggatgagtcaaaggagttttagaagaaaaatccaccagagaaagccaagcaaatacagttcagagttacatttcttttccattttttcctgaactgaatctttggcatgcatatcctgaattgggttattgaatataaatctagccttgtacaatggatgccagatgactacatatttgctttggagcctaaggataagtttcaaaagatttgagtggagaagaaaagctaaaactcttgaagcacaagtttctgttctccatgtactcaagtgtacatgaagttgtgaaaatttgtccacctctatcatcatgttattccatg

SEQ ID NO: 5674 - DNA, 1050 bp, Homo sapiens
ggagtccactgagtaccggagacaggtgcagtccctcacctgtgaagtggatgcccttaaaggaaccgtgagtaccaaccctgcagtaaaagagggaaaataatgacccattctgctgactaggctcatgatgatacctgaacaaaatgttgagtgagtaaaaatgtatatcataatgcaaagaaaatgagttatcaagacagactcaaaagggacttcatggaactcttgaaggttttagcttgcctatatcattgcttctaatatgaaggacttggtactcgcattctccacctaaaattagagtggtcgccatttgccgctaatggaaattattgcagaaggtctgtaaatggttctgggaacagctgggtttttctgagaaataacaccagacatctttctcaccccctgcagaatgagtccctggaacgccagatgcgtgaaatggaagagaactttgccgttgaagctgctaactaccaagacactattggccgcctgcaggatgagattcagaatatgaaggaggaaatggctcgtcaccttcgtgaataccaagacctgctcaatgttaagatggcccttgacattgagattgccacctacaggaagctgctggaaggcgaggagagcaggtagggaactcagacttggatgcgtgaactaatggtgaccatttgttaggccctgtgccactgggctctaagcagtgtcacatttaatctttagaaagtttctttgaggtaactgctttccactttttgtagaggaggaatttgaattgagagagagtaagtgacttgctgaaaaagggttaatcaacagcagagctgggatttgaacccataactctgtcaaagcctccactcctaactcctgttcatgctcctgtggagaaaatgcttgtagtaacatattttaaatgtactaacaagaccagtcatgggaaaatgtttctgagacaaatctctagtttatgatttaaaacagtacgttttcttacgtgacgaaaacaaaaagtgtgttaatttgttcccagtggttgaa

SEQ ID NO: 5675 - DNA, 1031 bp, Homo sapiens
ctgtgattttcatcattttggttaccgtgggtactgcatgaataaagaaaggattggggctggatgcagtggctcatgcctgtaatatcagcactttgggaggctgaggcgggtggatcacttgaagtcaggagttccggactagcctggccaacacggcgaaatcctgtctccacaaaaaatacaaaaattagccagccgtggtggtggatgcctataaccccagctactctggaggcagaggcagtagaattgcttcagcttggaaggtagaggtttcagtgagccaagactgtaccactaaactccagcctgagtgacagagcgagatcctgtcttagaaataaagaaaaaaaggattggctgctgaagtaactcctagccattctaaaggtaaattctaaatgtaaaagtaaactttacattctagtttacttgggacattcttggtttatgactgttgtgtaagcataattattaataataacagtttggacaatagattgtatgtggtcaggtcatgctacccttagaataatcttacagaaaatgtgtctgtcccctcagcccccatattcaaacaactgacatggacaatggcataattaattttattagtgtaaacatccaggtctttgggcccttatgaaaccttttctatttgatttttcgttttgctttctgttctttagccattctcaccactgttccccgcagcctcctaaccctaggatccctgtctcctcttccacttgtatcccacctttggcttataagggtcatccagggaagaccccagccccatattggctttcttcacacaccagactcattattatttttttaaaaattgaaaaacaagccacagttttctttcaggggaaaagaaccaggacagcaagttctgctcatacctattgagattagtagactcccactcttaaaaatcctttacagatggaggccaggcatggtgaccaaggtgggtggatcccctgaggtcaggagtccaagaccagcctggccaataa

SEQ ID NO: 5676 - DNA, 1064 bp, Homo sapiens
ttaaattttttcattttttttctctctgtacttcagtttgggtactttcagcatattttcaaatttactgatctttcattcttacctgattaattccatccactttttaattttacatatttttttgtctctagacttttatctgggccctttttaatatatttcttcatcattatgtggatgatttccagcatgcttataatagcttatataaagtccttgactgctaatttcatcatctttgttatttctgcattctcagttgactgaattttctgctagttgtgtatggtagttttcttcttcatatcatgtcttcatatcattttattgaatgcttagtactttgaattttatatttttgagcatcaggtgttgtattcctgttaaggagtattggactttattttttcagaagtggttacattcgtctgtggcttatgttgttaggcagtatgtaggtatgattgagctgcattgctagggtctaaactcccctgtatatccactgaatcctctggattttcaatagatgcttcactgtggcctcatctctgacgactgtgtgagcgttggatctctttagcatatcgccctcggtcactttttgaccagtttcatggagtttttcacctgtgcatgcgtgggtttttcagaaggtcttcactgatacttggaaagtgcctctaggcagaaagttgaggcaaacttctggcttatctaattcattttccttcttggatattatcattcagtactgcctgtggcctcatgtctttaaaaagttaacctcagtgtggaaaatctgtttttccagttttctaattgtttacaacgggagtgtaagtctggtctgtttttccaccctggctggaagtggaagtcatggcctaccattttattttcaaacctttttttttttcctacccagaattagcctgaaatgcctcatctacgattactaataagagagcctgttaattttgtttgaaaaatttaaaggaactagtttacagtttttcaaccgtgttattaataaaaattaaatttccctactttatcat

SEQ ID NO: 5677 - DNA, 1051 bp, Homo sapiens
gccaattatttagtaagcattggtttgaaatacattcatgacatttcatagaggagttatttcttctctggtatctgtgaaggtttctttatatctattacatcaaatagtaagacttcaaattattgccgctatgaagatacatcagtattttaatgaactggccaggttttttcccttaataagcaatgagtaaaataatttattttgaaaactcactacatttatctctttctttaatacggaagaataatgccctgcacacctgccttagactaacttgaatctttgttatacatcaaccataaagagttatgttattttgggctgggcacggtggctcatgcctgtaatcgcagcactttgggaggctgaggcgggcgaatcagttggggtcaggagttcaagaccagcctggccaacatggtaaaaccccgcgtctgctaaaagtacaaaaattagctgggcatggtggtgcgcgcctgtaatcctactcgggaggttgacacaagagaatcgcttgaaccgcatcccccacccccctctgggaggcggaggttgcagtgtgctgagatcgagccactgcagtccggcttctgccacagggtgagactctgtctcaaaaaacaaaccaaaaaaaaagaaaagaaaagaaaggaaaaaaagttatgttattttgaagaaattaaattttcaaaatgattaacatgcagtgtacctcaaactaggccccagataattaagcatcatggaaaaaatgcatagtcatgaacattaagaagtcaggaatttggaataaaggaactgtatcatttattctctccttcccacttttttattgctttgcaaaaagcagacacttttccttgtcttactgatgtacaaaccttgcttcgttgcaaaatattctgaaaagtcctttcagatctccaaaatcttattacctatttaatgctttaatttgaagtgagatatatatgatgggttttttcatagtgtgaacattagttttatttcgaataactatattttcttgtctatagctatgcat

SEQ ID NO: 5678 - DNA, 1027 bp, Homo sapiens
cagagcctgagtgacatatggtgatggtctgcacttgggaagtagtggtggagatagagacacgtttgagatctattttggaggatttgttaggttgagtctttagactggtaagaattacccttggagcaataaaatctcgattctccaagattgcctttaaggctttgatttattaagtctgcagtgaagcttgatattcttgactttccaggcagttttgatgattattttgaaaaaaaggtcaaggaaaatatctgcagctaaaaaagaaaagtagatttaagagtttgtattttttattacccagaataatttacattgtatttgttcagtaaaaataggagttttcatgctgttccaattttgttaatttatttttaaactttcagttgtgaatgaatgaataaactgacaaaatgatttttgttcaatgtatcaggatatgttctagtttctaactatactattgaaggaagaataccttttatcttgatgtctttttctacttcttcagactgttggatataataacattttgggtctttaaaaactcattgttttctagccattgagttgtctctcaaggaacaaaggcagcagtcaaccaccctttccactttgtatccaagcacatccagtctcttaactaaccaccaacatgaaggccgaaaagttcgtgctatatatgactttgaagctgctgaagacaatgaacttacttttaaagctggagaaattattacagttcttgatgacaggtaatgttaatattacatttaaaatttgtatgaaagtgtgtatggcttctgtgtttcatattattcctgttgattgcagttaccaaatacaataataaatattgacccagatgctgctctgtatgacagttggctgatttgcttgtgttatactgggtggattcttattttgttgtttaatttttttcttatttattacttagtttataatttgttttggaggcctagtttaatctattcattttcggttccacctaataatatag

SEQ ID NO: 5679 - DNA, 1100 bp, Homo sapiens
actctgatgtgtagtaggtgattaaccttttttcagaaatacaactcttattattagtgaaatctctttttatggaaactgtaaaatgtttacaagagaaaattaagaaatccaatttcataaagtaatgttgtgttattactgccaaaatctgcaactcagttatttcttaaattgcgccttttagcttgctgggagtataagaaaaatccccaaatctctcttggaagttaaagtgctttaaagtagaattttaaatgtattattaaaaaaagataacttttacatatcttacagttaaaacagagaagaagacggtacaatttagtgatgatgttcaggtagagacaatagaaccagagccggaaccagcctttattgatgaagtaagtggtttccatggtgataggagttggtactttgtattgaaatttaaatggttttgctttaagaaaaaattgattacttgagtttttttgttgtaaaaatttttgtatttttttataaaaattcaagcaatatagacgatgcagactgttttttgaaacttcctctccagtcctttgtttgccgtgccagagcctcattattttaaattcctgctgaatattctgtagagtggccttaccatgatttatttaatctattgttgaatgcctaggttgtttacagtttttacagtgtagtagtgagattttttttttttttgaacatctatctttgtgtttctttagggtagatattcaggagtgaaactattgagttgaaggatttgtgtattttccatgttaatagataatgtcaaattgttgagcaaaacaagtttttacactcgtattcatatcatgcgagaactcctgtttcccagcatactcaacaaggatattaagattgtttgcacatgactgaggaagggacactcattgactatctattgaaacaaataaattactgttgtaaaaataaaattgtcattaaattacttctacataaatcattgcataaaagcagtgctaatatattgaatatcattggagatgattcatgattcctccttgtgttgaacactttctagtatttgaggaaaagcttacgctaat

SEQ ID NO: 5680 - DNA, 1044 bp, Homo sapiens
tacattgcctcagagtataagaattaccagggatgatttcatatactggttttggtattaagaaagtcatggctctaatgactagttaacacagctgagatggttccatattttttgtttttaaaaaataggaccaaaatgaattttcagctagtagatcattaaaaataatttttaatgacagaccactgtcattccattccatctttcagaagataccgaaagaacttaatgaaattgctataatagcttgattatatgaacaaaatttctcctcactttcaactataaaaacaaaaaataggaatagaactggtgctgaatcctggctcattttacttttcaaaacttgaaatatagttaatgttgttttgaccctttgcatattaataataataatcattaccttatacatatgaatgaatctaatactgagagtattatcagtttacatacttttagtgcaaagaaatcccatatggtcatcggtagaaaactttcaagtatattaggataaaattttggaggggaaattgagtagaaatatgataagttcaaggaaaaaaacaatttgaaatacatgacagagactgttgtttgaatggtaatggtgagtgcagattgctgtggtgtttaaattcctttggctatatttaaaggaatttttgactattttattttaaaatgtcaacacttaatgtcctgggaatcttatcctttgtaacattttaaatgtataagaaatgagatgttatctttgaaatatgtgaaggggtttatgggcttttagcaatcttttatgggaggcagaaacaaaatttgaagagcgaaacagactgtggaagactgtgctaagggcaaggaatccacctgggctaggagaagtgatgtttggctgattgcattatataagaaaatgctggccaggcgcagtggctctcgcctgtaatcccagcacttcgggaggccgaggcgggcagatcacgaggtcaggacattgagaccatcctggccaacatggtgaaaccccgtctctactaaaaa

SEQ ID NO: 5681 - DNA, 1059 bp, Homo sapiens
tgatgtaattgagtgtttttcttcctccacagtacaatggtcagttccgttcaaggaaacacatatcccagccaggcgccagtatatagtcctcctcctgccgctactgctgctgctgcaactgccgatgtcactctgtaccagaatgcaggacctaatatgccccaggtgccaaactataacttaacatcatcaactctgcctcagcccggaggcagccaacagccacctcagccacagcaaccatattctcagaaggctctgctataggacccggtgttcctcttggtggcagatacctgctaaatgccactgacaatgttatgagattcattactatcttaagatgtgtttatcctcagcttataggaatctctccaggtcaacaggttcaaatattcaagaaggtagaactctcctcaatttacactgactttttagaggttcttccccccccgcccctgcagaggaatgaaactacttacaacatttaattcctttcataatatgaaagaattgatacaaggctatttgtctcgtaaacctggtctgcagaaagtcaaacttacaaaaactgttgtgacaaatgttatgtacatatattgatatgtaactgcattagtggccattttgaatcacagtggtgatcgtgtgaatatatttaacactgtgttaaattaatttacgttgctattttattttaatcataaacaactaccatgtttcttaatgttttgtgtaaatttaaggtaattatactatccttttaaacttcaagaaaacaaagttgttagcgtatttacatgaaggcgcattatgttgtcgtgtgtttcagtttcacattaaactgaaccttttactaattgtgagctaaagagatatatatatatatgtgtgtgtatatatatatatctacatgtctttctgtagcctctgcatactactggctgtcatcacaccagcgtacagtagctaaatttttggtgcaattatagcaaatgataatgttcccttttgaacttttacattttggcatgacatttcagagtattgtgggac

SEQ ID NO: 5682 - DNA, 1067 bp, Homo sapiens
gttggcgaggctggtctcgaactcctgacctcaggtgatccgcccaccttggtgtgccaaagtgctgggattacaggcatgagcaaccatgcccggcagcatactagattattaagtaattagaaaaaatacctttacatgttgttttttaaagtaagtgtatgttttttaaacaagtgacttgcatcgacacatattgcgtacttgtctgtagctagggaacatatataattggtattacaaagatatttgcccaatagaattttgttttaaaatatcttgcagttagagtctactatagccctttgattaaaaatagttcctatataattttaaaaaccttagaattttattgttataaacagtatatgatttgaaagaaatttaaaaagtaaaatattcagaaacactaggtatacttttaggtagtctttataataccaagatttaaaagttttagaggttgataatgtgaaaatttgacataaaggaaaggaattaagaactttaaaaaaaaaaaaaacaacttggagaatatcagagagtttgttaaggaataaattgtcctcctatccaaccctcaaattcatctttagaagcgcagacacccagtgtgactatatttggagatgaggcctctgggagtggggctctaattcattaggactgttatcttttttttttgtttttgttttttgttttgaggtggagtctcactctgtcgcccaggctggagtgcggtggcctgatcttggctcactgcaacctccatctcctgggtttaagtagttctcttgcctcagcctccccagtagctgggattacaggtgtgcaccaccatgtctggctaatattcgtatttttagtagagacagggtttcgccatgttggccaggctggtctcaaactcctgacctcaagtgatccacccgcctcggcctcccaaagtgctgggattacagacatgagccaccgcactgggctgttatccttttaagaagacaaaaagagaatgaggttgcatgcacacagagaaaaggtcatgtgaggacacagtgaggaggcag

SEQ ID NO: 5683 - DNA, 1055 bp, Homo sapiens
ttagccgagtgtagtggcaagtgcctgtagtcccagctactcaggaggctgaggtgggaggatcacttggactggggaagtggaggttgcagtgagccaagatcatgccactgcactccagcctgggcgacacagcaagactccttctcaaaagaggcaaaaagctagcacttccatctggagagttgattggaaatgtttttctcttctcttgaatcttcactgtttccctgagatgccatttgattgtgttttctagttttccacgcattgtttttttgtaattttttttcaaactgtacaatatccctgagagtagggaagaaagagatgttcagagttgaaggtgtcagagctaggaagtggcagagactggatgtgaaacccttgtcctgtgcccattagcccactccaggctgcccttgctatccaggttttattaattttagtgtcatcagccttcactgcgaaaagcctacacctattttactttattttcagtggatggtgtagctaatggacaagtataagactagcatgtctgtgtttgtcctgcatgtaatgaccagaattccctagtcattatgaacaccaactccaagcctgaattcttatccacgctcctgaactctttagtcatcacacattgggcaagttacttaacccttgcgagtttcaattcatcttcaaatagggaaaataataaggcctttttttttttttttaaatggagttttactctgacacccaggctggagtgcagtggcacgatctcagcgcactgcaacctacacctcccaggttcaagtgattctcctgcctcagcctaccgagtagctgggattacaggagtgcacaaccatgactggctaattttgtgtttttagtagagatggggtttcaccatgttggccagactgatctagacctcctgatttcaagagatccacctgcctcagcctgccaaagtgctgggattataggcatgagccattgcacctggccataaggcctatcttataaagctattttgagaaatgaaagagatgatggag

SEQ ID NO: 5684 - DNA, 1044 bp, Homo sapiens
atctcggctcactgtaacctctgtttcccaggttcaagctattctcctgcctcagcctcctgaatagctgggattacacgtgcctgccaccatgccctgctaatttttgtatttttcgtagagatggggtttcaccacattggtcaggctggtctcaaactcctgacctcaagtgatctgcccgcttcagcctcccaaagtgctgggattacaggcatgagccgctgcacccggcctctggctttttaggttcagaacattttcccctagaattactgtggtggtcaatagaaagaaagcccattatacgtatttatggtaggaacctgagagcagtgagtacttgttcgtgtgtgaaagacacctacagcatgttgtaactagactgaattctgaatgcagcctgttatacatgagaatatttcattcctagtatcatttctagtatgccaaagacagtggtgcgcttccattcatgaccacatagtgctcaccacacaattgtaccagtgcatatttggctttgtacaaacaggattaggacaagaaaattaccagttattgcgggggtcagtaacccaccaatataaaatagaagacactgatgatggtgaacagtattatgaaagagagacagtctctgattccaggaagtttactgttttaatgaggaggtaaaatgtgcacatgatgtatttaaaagaagaaaatgggaaggctttaaatagggaaatagagaaagtgctctaggagtttagtgtaggaacatattgttcttactagggaatcacaaaagcattgcagaagaaattaaatgtgaacctccaacagtggggatgggaaagatgggtgttctaggagtggagaccagggtaagtgaagctacagaagagggaaagtcacaattcctatagttgagcaatatttttcctggcattgaaggaacattgaaagtgattggaaggtaagtctgtgaaggtgggttgtagcaaatggtggagatctagaatgccaaatggaggttagcatttacagggtgcaagt

SEQ ID NO: 5685 - DNA, 1094 bp, Homo sapiens
gggtgaccagagaaggcttctgagcaaagttctgagtaaacctccccgagatgacatggggcagatggaaccccatgagaaaaagccctggagagaagtcttgcttagtaggcttgagagagagccagaaggctagcatggttggagtgcactgatggagaaggagtaataggagacaggattgtcaagggataagggtttggataatgtcagatcttataaggtataccagatgttcagtttaattctaagtgaaatgaatgcctttgatggactttgattagggtaatcatctgacgtgatatatactgtaagataattactttgtcttctgtatggagaagagattttgagggagcaagactggaaggaggaaaaccagagaagaagctattacagtactaatagttcaggcgaagtgtgatggtagcttggtctagaacattggtggagaattgggaagaagcggttgggatctgtatacattttaaggtagaagcaacctgtagagtttgcaatgcattgtatatgaaactgtgtgtgtgtgtgtgtgtgtgtgtgtgtgtgtgtgtgtgtgtctgtattgttgtaaacaaagatgagcaaaaaagaatcaagtaagataatagtggcttctcaaatcaaacacttcatttagtttttgtttttaaaaatcaaacagacatccttgaacagtggacattttaaaacattgttcctaaaaattactaaaaagttccaacattgtttaaaaatactaaatacgtgacaacaattgaaaagcacttagggtgatcatttgcatttgtgccattaatttagacatctttttgtaggtattacattaattatactcaaaaaaaaagtttttttgtgttgaagatcttcattattgcaattgtgaaagaattgaggatattttgacttctgtaatccatatattgtactaatttaaaactcattctgcttggtgtaatctttggtatatcttatgacttacatgaattggaatatggctcctttccattcatgaaaggaaggggaaatctgattgaattagtgcataagaatgagcataaatataaataataaat

SEQ ID NO: 5686 - DNA, 1032 bp, Homo sapiens
tacatggatttagttttttagaaaattattggctaaaaatcattgggtcttattggttgtaaagtgctgaacccactgtgcaaaaatcaagacacttagaatacaagaaatactgagactttttcccttcacggagattcccagtatggtattcatgggggcagtgacatctagcgttccctcccaagatagcaggcactctgaatgaagacagtgtgtttatttcacaagtagcctacaaactcagttatttcatccagggcctgaattttaccatttttgaaagtacgtcacattcatctaagtgagggggcctggtttgttccaaattttcatgaccatcggagcgggtctgacggtgagaccagacattttgcttgtatttctggttcagctccagctagggctgaactcagggggccccctggaaatggggcatttctgggaccaatctgaggatttgcaaagaattttaagtaagcacaaaacttttgattaaaaaggagggcacaaactgaagcccagcctttgtttctaacacactttgacaaaatggtcattttgaattagatatgattagaaacctcttaagaaataaaaatgaaaactcgccaaactcttttatggctatgcatgttctgtcctttgctgctctgtgtcagataatttttcttatacttgggatgtcctgaatatgtattttatttgtgctttttgatgagcacagcactaaggaaataagcgaggtgaagaatttaagaaagcagacggatctttttaggaggctataaattttccgcgtccctccactgcccactcccaaggccatgttgatgtttaagagaagcctgtggtctggtttttcagtctcgtgttggtgccaagtcagtgctttcattgtttcttactgagatcgggtctagatgctctgtgaacaattgtgcttatggttatgtagacttttagaatccttggtgattgtcattctataattctctcctgttattttaatttaaagtaagtcttgaggcc

SEQ ID NO: 5687 - DNA, 1496 bp, Homo sapiens
gcaagaggatcacttgaggccaggagttcgagaccagcctggccaacatggtgaagccctgtctctactaagaatacaaaagttagctggatgtggtgcctcttgcttgtagtcccagctccttgggaggctggggtgggaggactgcttaaacctgggaggtgaaggttgcagtgagctgagattgcgccactgcactccagcctgggcaacagagcgagactgtctcaaaaaataaaagtaaaaaatgaaaacctttgtgttcatgagcactgaaaaccattttaaaagacctttataaattcattgcaaaagaagtaaaatgtttgaaaatcatatctttctctcctctagtatagttttctttttatccatggaaaccaatccagaattttggaaggcattttgtgttctgtctttatcaaaagcttgcagtgtttccttttggaaagtagcattggcccaattggtattgaggtagtttctctttatagaagtatttcatctactacacaaaggagggaccagagaattaggatttcaccattatgcagtcctagagattggctggcaaacttgccaaagaaaggcagtgatatcagtagttgctaacgttacaaggaaaggaagaacctggcagtgtgtatccctggcaggagtacacaatacacctgtgacgtgtcctgccacattcacatcacaatccgatccaacctctagattgaaacagcagcctacactggaatatgttaaatgaccacatgccgaggcagaacccagattgtgtgaaattctgtaggacaaatgaccagttttcttttatgaccccattgctaaggggacaatgggaagaaatggggaatctgcagaggaaagaaacataagacccagcaaccagttgcaatgtttagaccttatttggatcctgatttaaacaaatgattgaaaacacacacacatacacacacacacacacacacacaaattctgtgagaccctctgcgaaataagaacacagactggatgtttgctgatattaaagagttactattttttgtttgtttgtttgcttgtgataatggcttttgttattaggttctatttaagtagtaccgatcatttagagatgcctgctgagatattcatggatgacatgcaaaaactggcattggattcaaaagcacattgagcataaaagatgtgaaatggccaggcacagtggctaatgcctgtaatcccagcactttgggaggccgaggtgagtggatcgtctgagttcaggagttcaagaccagcctggccaacatggtaaaaccctgtctctactaaaaatacaaaaagcagttgggcgtggtggtggacgcctgtaatcccagctacttgggaggctgaggcaggagaatttcttgaacccaggaggcggaggttgcagtgagctgagattgcgccattgcactccagcctgggcgacagagtgagactccatctcaaaaaga

SEQ ID NO: 5688 - DNA, 1115 bp, Homo sapiens
ttgtattcctttaagtatgactgggctatcagagaactgggatttattagggttacacaatcttgttctcacaatcttgaatgtagcaagtgtagtctacctcaataacacaaaatatgttttaaatttatcattgaggtttagtgtgcattccatgattattagtaatttcaaaagtatgactttttccctaatttcattgcttttagttatcttatttacttctcctgctatctgcgtctaggtggtaaataaacaaatgttgccactctcattactgagaaaaaaaaatgattgattgttggtctgaaaaacaaaacaaaaaccaaaaaaaatcccgtacatcaaaagacaacccagacactttggtgagaaataaaggaaaattagagaaaggttttcagttctgtagaagctggaatgaaatagagtgtgcattttggtggctaaagaagtggagttcagtggaagctgcaagcagccagatagagattttgttcaggaccctaaggagagaaatgaggactggaccaagaaatagaagtacactggcactgacatgaaaacaaaggtttatcacagatcggattactgaagactgaacttcagaaatgcatggaaatgttcaggaatgagagaacacgggaacgtgtatgtattacattgggtttcattttctgtttctgtccttgcacttacctacttgaattccccaatatctaatagattcattcattttccttatctcccatcttcagctccttagcatgagagcatcatcttttgcttgggtaaaagtacttcctagctgatctccctggcttctctctagccgtcttccaatctgtcttcaactgtcctgccaaagtggattttaaatggcacaaatctgatcatgcctcttgtgggaaagaaatcccactgctcttagtagaaagagaaaagatccccagcgtggccctcatgatcttgcctgataatcacctgcctctctaacctcatcttctcctccctctcttactttattctccaactgcttaagctgggccttctcccttctaccacgtagagcttccctctccctgcctttagtgaactccttcccacccttgagc

SEQ ID NO: 5689 - DNA, 1010 bp, Homo sapiens
gctcattgaatacaaagggcagccagacccctatgtggtactggtggttaggacctcgtcatactggttgggctgtcctggtgtcctttctcaaatctgttgtcagtttccaggaatcacaattctggtaatactggaactaaatgtcaatatttatatacatacatgtatgcatatatctgttagatctaattacataaataatatattttagatgtaatataaatcaattgataaatatgcacctgtgtgtgcatgtgtcttaatctttcactagttcttataccttttctttttagtatgacagctttcttaagaattcctcctactcaaacattgtctctcagaaagaatatgaaagttatgtgggtttcaaagaaagttatactcatatgccatagttctttatttctaggtttttacctttctaagctgttgcttttattaggttgcctccgctcacttgtttaacgttacattcagattcaaaacttctctgagcagtgggctcacagaagtaggctgcagactgtagtcctgtcttgctctttaagactcaatgcataagctttattcttgacattattattgatgttcaatatctagtcttcattcttttgtttactcctaaccatcattcttttagaactcagcttcgcagctcagaagtaattcctgtgtttacctaaactgtcttgctatttcgttaaggacatgaaaatctgtgagctgaataaatactcttaaatttaaaaggatatataaacatggtaagctctgtgtgcatttctgtgaaacacttctcaagtattgacatttgcatgctttggagagcagagacactaactctttttggtaagctttttgaaaaaatgttttaatttttgtgggtacataataggtgtatatatttatggggtacataagatgcttggatacaggtatgcaatgcataataatctcatcatggaaaattgggtatccatcccatcaagcatttatcctttgtg

SEQ ID NO: 5690 - DNA, 1050 bp, Homo sapiens
ttacctcctaccaggtccctcccaccaatacgtgggaattgtgggagctacaattcaagatgagatttggatggggacacagctaaatcatatcacgtagttgatctgttttcaatttttattccactgaaaggtcaattcagatttgctaaagtatccttgattgataggatatacctggttggacacaataaaaatcagttcctttactggaaacatgtgcacttaaaggagaatgctgaatcccatcaaggaacaaaactttctcccattctgtccccagaaactagtcacagaagggtttgcatattctttgtggtgagtgcatactgatgacaacttctgtttattcctccaacccacttcctagagccaggatagctttgtgcatctgattcttatgatgaaaattgttagattatttttggggaactgctgtgtatgaggcagtatgcttggtcctagaaatgtgaagggtataaaaacaaaaaaatatatagaatgcatttcttgtctacaaaaaaagacgattctggttgaaggaactggatgcaaatggttgagcttttagagataatggggaactagggagtactaaatcacagatttggtcccatttttacttatccaagacgaacataagaaattcaatgggaaaggaattcacctggggctctttgagaaataatgagctaaatgtattggagacgtaagtgagaaaggccagcagtcagcagttctgtgctcatcaaattcaggttatgcacagtccttttcctagatatgtatggtagtcttacagatgtggcacatctggtctccagagatgcacctctcccaacccatgagccatataccctgtattcctgtctttgtacagtcctctcccttgaatctgggctgcctccgtgactcacttttggcaggtctaacgtggtgaaagttatgccatgtgactttcaaggttaggtgagaagctttgcagctccttagggtttcttggaatgcttgttcttgggatgctgtctcttggaacccagaaaacaagct

SEQ ID NO: 5691 - DNA, 1695 bp, Homo sapiens
ttttacagtgacattaatgaaaggagcttggaatactccaaagagtcatggaaaaggagaagggagtgttagtgatttgacatctgtattagctagggctggtgtaacaaaagcaccaaaaaatggtgtggtttaatacaacagaaatttactgtctcacagctctgaagcctggaaattcaaaaacagggccaggcgcagtggctcacgcctgtaatcccagcactttgggaggccaaggtggacagatcacctgagcccaagagtttaagaccagcctaggcaacataacaaaaccccattcctacaaaaaatacaaaaatcggctgggcacgatggcacgccctgtagtctcagctacttaagaggctgagttgggaggattgcttgagcccaggaatttgaggctgcactgagctatgatcatgacactgcactccagcctgggtgacaaagtgagaccctatctcaaaaacaaaacaaaacaaaaaaacagaggtgttactggggctgtgctattgctgatgattgtaggggaggattctcccttgcctactccagcttctggtgtttgctgacagtcctggcaatgctcagctcctagctgtatcactccaatcacgtgctgtcttctcctgtatctttacatcatcttccctctgtgcaggtctgtctctgtgtccaactttcctctttttataaggacaccagtcatattggattaaggcccaccctagtgacctcatttgaacctgattacctctgtaaagaccttaatttctaaatcaggccacattctgaggtcctaaggcctagaatttcaacacagctttttgtggggtcataactcaaacccataacaacatcagaacattgtaattcaaaggaacacaaattcaggtttactttgaaactaaatatttctagaattaaatttgtccagagttacatggtctagtcttactttcatacaactctcttctaacacactgtgtttgtgctggatatccctttatgagttttaagaactctgaaatgtgaaaagtacaaataagtaatctcttgcattcctattttagtcaaaagatcaggctccaaattgctttattcatctttgagtagtattgcagaaaattttaactgaaaattatattcaaaatactgttttcaatttcctaatggaactgtaaccaattagtcaaccacaattattgaacaaccatgagtactgtattccctgaggagaaaaaacatagtttttaggcaactatagcaagatgcagcaaatgagatttatacacacacacacacacacacacacacacagagatacccagtagatgcagaatcaaggcactcttttatttaaaaaatccttttctctgccaggcgcggtgcctcacacctataatcccagcactttggggggccaaggtgggcagatcacttgaggtcaggagatcgagaccagcctggtcaacacggtgaaaccctgtctctgctaaaaatacaaaaatcagccgggcatggcagcacatgcctgtcctcccagctactcaggaggttgaagtgggagaattgctttaacccaggaggcagagattacagtgagccaagatggcatcactgcactccagcctgggcgacagagcaagactccatctcaaaacaaagaaaagtaaagtaaaaaaattt

SEQ ID NO: 5692 - DNA, 1084 bp, Homo sapiens
atcactgcttattttcctcactttctccagcaagccaacttctttccacctttctggtcttgctggattattattattgttgttgttattattttaaacctggaatattcctccctgccctttactttgatcctaaacatctctgtggttctgcagaaaagcttttcctgactacattgcacaaaggagcttctcccattattcacatcacccagtttgcttcgtataaatgtaattatttgaccagcagtttacattttgatcctctctcctctcgtctctttttctccttcatttttttttttaacagagtcttactctattgcccaagctagagtgcactgacatgattgcagctcactgcagccttgacctcgagggctcaagcaatcctcccatctcagcctccaagtagctggaaccacaggcacatgccaccatgcctggctaatttttttatattttgtaggggtgaggtttccccatgttgcccaggctggtctcgaactcctgggctcaaacgatcctcctgcctcagcttcccaaagtgctgggattacaggcttgagccactgtgcctggcccagactcaatttcttttttttttttttttttttgagacggagtttcgctctgtcgcccaggctggagtgcagtggcgcgatctcgactcactgcaagctccgcctcccgggttcacgccattctcctgcctcagcctcccgtgtagctgggactacaggcgcgcaccaccatgcccggctaatttttgtatttttagtagagacggggtttcaccgtgttagccaggatggtctcgatctcctgacctcgtgatccgcccgtctcggcctcccaaagtgctgggattacaggcgtgagccaccgcgcccggctgactcaatttcttttacctgtatttcagcactcgtcctttatcatcctgaagtgaaatgtatagttaatgcaaacaaccaacacacaaatttttaaaaaccatttgggtcaaaatactgacccaatgaataaaaagattaatttattctctggtaatgtgtatttcaatgggttattatgctggcat

SEQ ID NO: 5693 - DNA, 1049 bp, Homo sapiens
gagcctgtcaaggtggactgtcagcaagcaggaactatagcgtatgtttcacagcggctcagtgtttaacttcccgttgtattgttttgcttggtctttaacaagtactaagtagggaagtggaagcagatatagttaccccattttatggatgagcaaactgatggtggatactgaaggatcttgcccaagctcactgagctcataaggggcagaattagggcaaggacccaggcttctgcctcatttttttttttttaatgttctttcacctcatcaaggagctgcttttagaaagacacaggcttatgaaagcagaaagtgcattaaaaaaaaaaagacaccagctgagaatgcattaatgtttcctctttgtttcatgctctagagagattaaggaaataaaagcttttttttttctctttaactataaaagcaaaaataaagcagggcagctattaagacgattttaaaagtataaacatcttcgtgcaatttttttttgctgttgagtctggatagagtttacaagcaaaaaactcaccttttgtcctgctttttaaagtttagtttattgtcattacaccattgatgtgaaacaagtcaatttttacacttcaacattatttaaacaaaaatcttgagctaaaaattctttttttttttttttttttttttttgagacgaagtttcactgttgttgctcaggctggaatgcagtggcgcgatctcggctcactgcatcctctgcctcccgggttcaagcgattctcctgcctcagcctccctagtagctgggattacgggcacacaccaccacacccggctaatttttgtatttttagtagagacaggtttcaccatgttggccaggctgctctcaaactcctgacctcaagtgatccacctgccttggcctcccgaagtggagataaaaattcttgaatttaatatgttgttagttaaaggaagaccttccaggatgtctgtgtatatccttttcatggttaaatggagatacaaatggaacgtacttaatactatttgaa

SEQ ID NO: 5694 - DNA, 1050 bp, Homo sapiens
agttggttaaaaaaaaaaaaaaaaaaaaaaaaaaaagcctgagcgtttgaggactatcaaagaaaatcagaatgaaagagatatgtatcagtacattcttgcattgttacactgttataaagaaatacctgagactgagtagtttatcaagaaaagagatttaattggctcacagttctgcaagctgtacaggaatcatggtgttggcatctggcttctaggggaggcctcaggagacttacagtcgtctaggaaggtgaagggaaagcaggcatatcatacatggctggcactggtgcaagagagaggtgggaggtgccacacatgtttagacaaccagatcttatgagaagtcttatcatgagaacagcaccaaaggggaaaatctacccctatgatccaatcacctcctaccaggccccacctcccacactggggcttacaattcgacatgagtctggccagggacacaaactcaaaccatatcaagatagaacactgtaaacaaagtgaatatgggaaaacctggccgggcgtggtggctcacacctgtaatcccagcacttcgggaagccgaggcaagcggatcacctgaggtcaacagttcaagaccagtatggccaacacggcaaaaccccgtctctactaaaaatacaaaagttagccgggtgtggtggcatgcgcctgtagtcccaactacttgggaggctgaggcaagagaatcacttgaacccgggaggcagagattgcagtgcgccaagatcgcaccacttcactccagcctgagtgacagagcaagactctgtctcaaaaaaaaaaaaaaaaaagaaaaaaagaaaagaaaagaaaaaagaaaatgagtatgggaaaaccttaccatttgctcaagtcccagagaatatgaaagaatctatatcacagaaaagcttcttgactttaacagcgagttagtttgtgtcgtgcatgtggcagatattaaactgtgttgatgagtttggtttgaggacgtttacagtggaagaccacccaggaaatgacttgtcttgggct

SEQ ID NO: 5695 - DNA, 1050 bp, Homo sapiens
gttggttggcaagaggtcatgtgaatatgatggatgaggcaaaacttcgtagcccaattcattcaacttttgaagcgccggttgtgtgatgtgcagccaggcgttgtcacggagaagaactgggccctttttgttgaccgacgccggctgcaggtgttgcagttttcgctgcatctcatcgatctgctgagcatacttctcagatgtgatgttttcgctgggattcagaaagctatagtggatcacaccggcagcagcccaccaaacagtgaccataaccttttttttttttttttttttggtgcaagtttggctttggagcttctcagtccaacagctgagctggttgtcagtggttgtcatataaaatccaattttcgtcccacgtcacaatccgactgagaaatggttcattgttgttgcacagaataagagaagatgcttccaaacaacaatttatttttgcttggctcatgaggcacctacttattgagttttttcacctttccgatttgcttcaaatgtagaaagaccatagaatggtcaatgttgaattcttcagcaacttctcgtgtagttgtaagagaatcagctttgattattgttcttgagtagtcgctgtcaacttccaatggtcagccactatgctcctcatcttcaagtccctcgtctcctttgcaaagcttcgtgaaccaccaccgcactgtacgttcattagcagttcctgggccaaatgcattgttgatattgcaagttgtctccactgctttacgacccattttgaactcgaataagaaagtcactcaaattcgctttttgtctgacatcatttccatagtctaaaataaacataaacagcaagtaataagtcattagcaaaaacgcataaagcgagaaatgcgcattaaaatgatatataacataaccacatttatttaagaatgtattccaatatcaaatggcaaattccaacagtgcaaaaaccgcaattacttttgcattcacctataataaaggttttcaaagtagttgtttgttatctcaaagctg

SEQ ID NO: 5696 - DNA, 1698 bp, Homo sapiens
ggacagtcttactagaaatcagtaatcctgaggctgagcacagtggctgtcacctgtaatcccagcactttgggaggctgaggcaggcagatcacttgaggccaggagtttgagaccagcctggccaacatggtgatacctgtttctactaaaagtacaaaaattagctgggcacaatggtgggcacctgtaatcccagctactcaggaggctgaggcaggagaagcgcctgaacccaggaggcggagattgcagtaagccaagatcacaccattgcattctagcctgggtgacagagcaagactctatcttaaaaaaaaaaaaaaaaaaaaattgagcaaataaaaagttgtttatctcatggaaaccacgaggaaaatacacaagaaaaagtatagtaggctgggtgcagcagttcacacctgtaatcccagcactttaggaggctaagggaggaggactgcttgagctcagaagtttcagaccagcctgggcaacataatgaggccctgtttctactaaaaaaaaaaaaaaaaaattagctaggtgtggtggcatgcacctgtagtcccagctacttgggaggctgagccagggggatcacttgagcctgggaggttgaggctgcagtgagctatgattactacacccttgcactccagcctgggtgacagtgagatgctgtctaaaaaaaaaaaaaaaaaaaacacattatatgacatagttcattgactattatttacatagtttcaataaatattaaatatggagccagccaaaattaatttgtctatttgaatccctctgggacattctagcctgttgcagtgtagatctttctttctgtgctgggtgtcattctggaacattccgtgttatatgcttggggattcctttcacctttgttttgggttgaagctcctgtttcccagatcccttgatttctttcaagctttactgtcattttagtcaaaaaccttctcatttccctaggaagggtatatacatgtttttttcaatagcctgaatgtttacaaacctttctgtttaattgctagtttaaatgcttatggaattctgattgaaatagttttccctccaaattttgaaggctttttgcttcattaccttgtggcttccattgttgctttgagaagtacaaagcattctagtgctttgattctagaccctttgggacctgtctttttcctctgaaagcttatgggtttctctttgtccccagtgttatgaaattcataaaaatatgtcttggtgtgggtatttcaacccgtgtgccggaccctttcaattcagaaaatcagatccttaattctggaattaattctttattttctttcctctgtcttctttattatctttttctgaactcctgtaatttggaatttgaacctcttgggttatgtctacttttcttacttttcttctcctatcttccaactcttttttgttttaccctttggaaatgttacatttcttttaacctttcttttgctttttttctatttctattatcatgttacttccaaaagctcttattctaagtctttaaatagaaatttgttctagtctcatagataaaaccatcttttagcttttaactgtgaataattgtcataattgatttttctgtttgttttgctctctcatgaggttttctgaagatgcctgacaaactgt

SEQ ID NO: 5697 - DNA, 1047 bp, Homo sapiens
agagtggatgacctcccggattggtgtgagataacttttttgcttgaaagagactgctctatttattctgtgacatgaacattttttcctagtacctttggctgctaaggcagcagcatgtttaatttataacaacacaaacctctgagagcaacacttgaatcaagtgcagctgaactggaacataaaagattttttcttaactttttttttttaacacactaatcttcagttggatgaatgtaatgtataactatgttttcagcaacaattcttctgtttattctaattaatcagtgactgccttgtaagaaatgtttgtcatatgcgtgatgtcttctgaaatattcttataaccttaatgaccaattgctttcaattcttgaccagcactccctcccaaccagagaattactggtttgatagagtagtcttggaaaccatcaggtactgcctgcagacttctccagcactaaatatatttgttccctctataaaccattcatctttcggacagaacttactgtaaagaaagaaatctgcctagaggatatatgtaaggaagattccacatcatgagtacttgccttttaactttcccccacattactgttgagtcatggaataatgtttaagttgttatttgcatggaaattaagtaggctgtttatttatctaaaggaatcaagtccactcttctgcctgcaacatttgttcaaaaactaaccaaggtaaaatatttatttgaaagcccaactttgatgttaaatattcttgaataaatctgttattttaagaatatcacattattcaatgcatataaaactatcagaagttagtaaatcataccagcactaaaaataagacaattggaatatattttagcatcagtttacaaacaactttattatcaacagaaattttagctcttttctttgcaagatatatcacagctgctttgggcagtagctgaagccgaagtatgaacagtccattttgtttcttaaaatttgaagtcgtgtctgtcatagcatttttactaccagc

SEQ ID NO: 5698 - DNA, 1044 bp, Homo sapiens
tgacatttcatgatataatttgaaatatctttgtaaagttcaatttgcataatttttatattagttaaccttttcctccaccagggtaacttcagttggaagatgtttctactgtcaatcgaattttttaattcactgtgtgagatagaaaaagacatggtttctatatataaggggtgtgatttacaagaggctatgtgcatgtgtataacatggatacagtgcgagggacaaaccaatacttgtggttgcacaagggagccggggaagagtcccgcggaggtgtgtgtggtgggaaagttctccagggaagacaacattcgattgtcttgtggttgctaaaaggacgcttttgacgccagatgggcttgagtccaaatcttggctctgaaatttcctcgttgccattttgaccttgggaaaaaatattaactctcgaacctccatttcttcatctgtaacacagcagtaaaattactcatctctctagtcataataactgttgtcaaaaatgtctgttctctgaatgtttggtgggtttcagtagaaaaaataaggaagttggaagtgggaagttaaggatgtcagaggcagagacaaaaaagggcagggcaaggcatggaattttctctgaaaactttacttaatctcattaagtgttggttattgatgaatctatatttcaaagtaccagacataaaaccatatcaccttcggtctaatgatagtcaagtgcagtgctactgttgcaggtctgggaaaaattcaggccaatgagagcctttgatggccgtgggaacagtaaattgcagcagtgctgcaattaactagaagtgccgactgcacctccagcaggctcagacttgcatggctgcctgctggaatgcaaagcttttctcttattcacaaccctcccactcactcattgatagcctagggccagatctggatgtggaaaacattattccaataaaaggtgcgttaaaagaacactcaaggagtttattttttaacaaactcatgttgtgtaaaatgagatgaggg

SEQ ID NO: 5699 - DNA, 1025 bp, Homo sapiens
agcaaatgaagtagctgcctttccttgctaaattccatcatccacccccaccccagttttttctatattcaggcaaccccaggtaggcaagatgacagatttagaaataattcacagtggaatttccaacagattgtcaaaagaagagaaaatgataaagattagattttaacaatgtctttctgggatctattgcatttgacaaccttcctactatggcatttatagtgtttaatagcataaaatatacttcgtggaattttgaatgttggtgtatgcacatggagattctgtgacgtggcctagtcctagtgtcagccactatgggtgacatctataggcagagaaaggagttcctcagttaaagtattagctgatttcttcttctgtacaaatatggctaccatctgtctcctctgtgccgccccccaaggtaagacagtttgtgtcctgcctctccttaaagaagcctgttctctttgcaataggttttacttggttgccttgtgacagctctctgattgtgtcatgaaaaatgataatactgtagacagtccatttttttcttattgttagtgtggcagtgacgttgttgcttttaacacttgaggttgcctcatacataaatggaaggacttgaacttctggttgtaacttacctggtgctctttatgttgattgttaaatatatacaattgttagaggtttttattttagataccctgccattgtcatagcttgggttcttggttacccatgagtattgaagccattaacaaacatttcttcagagttagaaattggtggaaaaagctatcaacaaaattcaacacccttcatgttaaaaacactcaagaaactaggcatggaaggaacatacctcaaagtaataagagccatctatgacaaacccacagctaacattataccgaatgggcaaaagctgaaacattccccttgaaaactggcacaacacaaggatgacctctgtcgtcattcttattcaacatagtattggaagtgct

SEQ ID NO: 5700 - DNA, 1052 bp, Homo sapiens
gtaaatgaaggttttgaaggttcatctagaaacctgcttaccactgaccatttcattttttaatataatttttgatgaaatatatgtttaaacttccaaacaagcaattttgacattcgaaacatatctgcaagttggaatctgcttctactgttaatactttcagtttattgagagatgtctctgccagacattaagccaaggaattttcaaatatcaaacttaacattttcacagtgaaggaaactgaaatttttaggagctgagctacgtgtgcagggtctcatagctcataagtgataagtttggaatcaaacctccgtctttgtgacacccagcttttggtcttgtgttttcaatacctgctctgtgtcacacctgccaggttgcaggtgcattaagcaagataattttcattgctttctgaaaaattgtagacatattactgaaaaataaatctttcctagttgataccacaagaaagtatcatcgttttgaaactggcgtaagaagaatgtagaggaaaatcgagcaaagtctaagacttttgcatattattgaaagcatagtttctttaagattactggggaaaagagagttggtgaggcatatgaatgagaaagaaattcatcaaagaacgctactaaaaaaaactacaagttttctgaatgttaccttttggtgttttattgaataccgaacacttacttaaaatcttggatttatttttaattcttcagcaacccagttatatacatatcaaaacctgtttaattaatcggtttaactatgcctcattgcacttttgttcaacttaatttccccactgcattttattaatttctccttagacctgtaatcttcgaaactttgctttgctgcccagaagcatttccccagactttagagcttttatgaacaaattcaacaaaacaggagaagtcttatcctaagcagcacaaaaattgcccctctgatttttttctcccatagctcttactttcttctttgtgcttacttatccctgaatgataatcggttggtggtaatta

SEQ ID NO: 5701 - DNA, 1052 bp, Homo sapiens
tttttgagacagtctcgctctgtcgccctggccggagtgaagtagcgccatctccgctcactgcaacctctgcctcctggattcaaacgattctcctgcctcagtctcccatgtatctgggactacagacatgcgccaccacacccagctaatttttgtacttttagtagagatggggtttcaccatgttggccaggctggtctcgatctcctgacctcaggtgatctgcctgctttggcctcccgaagtactgggattacaggcgtgagctaccacgcccggcctgaattttactagaaatgaggtcttgctttgttgaccagcctcgtctggaattcctgagctcaagcagtcctcctacctcagcctcccaaagtggtgggattacaggtgtgagcatccgtgcccggccagagcaatttttttatagttccgatgatatgttttggttgtgtgtgagaatgcactttaatagaattacagctgttattctagtgtgatttagcaaatggaggataaaatcaatcatagaaagtttgggacttggtgaaatctttatagcgttactctttgacttttttttctttgtatcatgttacggtttgtggtgaataggtcactacgcagtggaacgtatggtttattagtaaacactgacaatgagatgaggctgttcctgggggtgtcacagtagattgaaggctggaaaagataggaaaataaggtgggtattcagagagagaagataatgaatagggagtgtcagaatgccagcatcatttgcctcaaatgccacttgttacgtgcttccactcttttattctctctgaggacatggtcaaagtgtcagtgtgaataaggtagttaacttaaaaggtgtattagggctgggcatggtggctcaagcctgtaatcccagcactttgggaggctcaggtaggcagatcacatgaggtcaggagttcgagaccagcctggctaacatcttaaaaccccgtttcttctaaaaatacaaaaaattagccgggcgtggtagtgagcgcctgtaatc

SEQ ID NO: 5702 - DNA, 1029 bp, Homo sapiens
tataacactttcatcatggacactgtccattttgttcttcagtgactcttaacataaaagatccacgtacaagaagttcttttaataataaagcatcaggaaaattatctcccttgcgtatctggtatatttcctcctttttgatagatctgtgaaatacattctgtttgtctttttgtcctggttaccaggcagcctagaaccaaatctggtctttagttacatcagctatattaatatcattattagtatatttgttccctctttctccttccgtggggtttaggacttcacctcttatctctgtttctctgcgtgttgatttcattctctcatactacagactctacttcatgaggctggaaccatgactgctggcagctcttgtttccagccccttttaccagaagaaggggctctctagaagaatcctggaaaggactctgattggcctgtcttggatcatgtgcccatcatctctgtggctggagtggggagggtactgtgaatggcaaccctcactagaactacatagttggagtcaggggtaagagcagtttccataatgcaggggggtgggtgctgtttgcaaaacaagggggatgcttatgaagcagaaaaacaatagatgtctatcatactggcttttattatttttctttttttttttcttttttttttttttttttggagacagagtctcgctcttttgcccaggctggagtacagtggtgcgatctgggctcactgcaacccctgcctcccgggttcaagcaattctctggcctcagcctcccaagtagctgggattacaggtgcctgccaccacgtccagctaattttttgtatttttagtagagatggggttttgccatgttggccaggctcgtctcgaactactgacctccggtgatccacccacctcgacctcccaaagtgctgggactacaggcgtgagccactgtgcttggccttatttttctttttttaattgttataatacttgtcctttattgtagactgcctcaa

SEQ ID NO: 5703 - DNA, 1024 bp, Homo sapiens
cctttgctattctttgttttcttttttcatctatttgagttgcagaaggtgtttatatgtcctaaatactgatcctgtgtctgataaatgttttgtaaatactttccccaagtctatatggtttaactatttattttaactgtaccttttgatgagcagaaatatttatatctgataagtttaatttatcagtgttttcttttgtagttattgcttactgtgagctaagacagttttgcctaacctcgaagtcatgaaggtaatttcctttatttcctctaaaaggttttgcttttgctaatttatatttaggtctgtgatgcatctgaaattatttttgtaggtttgagtattttgcatatggctatccagttgtttttcaccatttgttgaaaacagtctctttttctcactgggttgctttgggaacatcacatggctgcataagtgggatatctttcagaaatctttattctgctccaaaaatctgtttgtctagccctgttattctgataattttgtaactttatattgtcttgaagtcagaattgcaagtcctaaaacctttttcttctttttcgaagttctgcatattctccgtccttcacatttccatataaattctaataatctcttttctgtcttctccaagaaaggctgatgggatcatgattataattgtcttgagtctgttgatcagtttgaggagaactgacatcttaacaacgattgagtcttaatcattagtatagtatatctctccatttatttaggtcttttttgctttgtctgagcagtcgtttgttgcttttagcctttggtcttgcatgtcttctgttttaaaattactttttttttttcctgtttttttgagacagagtcttactctgttgcctcgctggagtgcagtggtgcaatctttgctcactccatctcctgggttcagacaattctcctgcctcagcctcccaaggagctgggattacaggcatgtaccactaagcacagctaatttttatgtttt

SEQ ID NO: 5704 - DNA, 1695 bp, Homo sapiens
tctccagcctgggcaacaagagcgaaactctgtctcaaaaaaaaaaaaaaaaaaaaaaaggacccttcatcctcaccaccgctttctctgaaataggcaaatgttccctgggcaaaagtggccaaaaactgtacctaggactttcattcttttccggttttagcccagaaactcctcactatcatatcagctctttaataccttcagtcgggaggctgaggcaggagaattgcttgaacctgggaggcggaggttgcggtgagccgagatcgcgccattgcactccagcctgggcaacaagagtgaaactccatctcaaaaaaaaaaaaaatttaatatgaaatttaacacatttcaaattaaaatagtgaaatgattattactaatattaaaaatattgacactaagataaaaataatttcatgttgacatttaaaatgattaagataattaaattttgtcgtaagtattaaacttttaaaaactccttttatagtggttctcagaggtagcgttgatctgaatatttagtctgcctgtataagaagtgttagtgccaacatctgaatttataaatgtttccctttatttatgtaactgtacatcataactggggaaatgattaagaatgcttttttttggtagtggtttgagtattctcaagcaatggaagtaagacagcaatgagaatttgttaatgtccttgttgtgcatttatttcaatagacatttaagggatctgttaaggaagttaacggtgttaatttgctttcgataaaactgaaaagatgacatttatttatttatttttaggttgggcccatgtggtttgtgccctgtatattccagaggtacaatttgccaatgtttccacaatggaaccaattgttttacagtctgttccgcatgatcgttataataaggtacagtggatattattttattactgtttgaatatcactactgggaagtagaaaggaagtttttgtgtttttaaaatcacaggtctccatcaaatccagggagatttggaaaaaaaattactactccaaactgcagttattaaaatgttattaatatgttactaaggtcacaggagtacaaagcaagcaaaactgtgttaccttttatagtaacctaggtatttagtattctacgatatacaggatattttaatccttacagattggtgctttatgaattactgacctcttttgcgctttcaagtatcaagagcctgttaaatttgaattaattattattttgcataatattcattacaatgtatcatacattcttttttgaagaacagtcctatattagaatgttacttgtctcctcctcccaaagttatttgtaccccaagatatggtttttattgttggccttaaaaaaaaagtttgcttttttcctgtatatttttcttcatttagtacatatatattattgttttattctcctgtgcattttaggttttaccattacccaatgtgcctttaaatatagttttattatttaattgaaggtacacattccatccgtggaagaaattgcagccagctttaagattttaaatgtttttgtgtaaaaaacctttttattttgtaattaatatttattttaaaaacttgaaaatacagacaagtaaataaatataagacaaaaatcattcataatcttattcaggttcatcca

SEQ ID NO: 5705 - DNA, 1025 bp, Homo sapiens
gttggccaggctggtctcgaactcctgacctcaggtgatccacccatctcggcctcccaaagtgctgggattacaggtgtgagccaccacgcccagagaatcctaggttttcaatagaggagttgaaatcatgtacctagttagataattagtttttttttttttctgtgtccttgtaaatattgttgcatggtgttatttggcaccacagtgcaaagtgaatgaaaccatttggttgtgttgaagttgggctaggttatgctttattactatttagaaattagtttctttttcaacatgtatcacctgattatatgtagttagacataactttttgtatcctcaacttggagtctgctgattttattcattatacaccgatacttacagattgttgtttttgcagttcagtcttctgtcacatgaccagccatgattttgagctgtgaaaagttaatattgcgtattagttacttgcacatggaaaatggaagatgtcagtcaaagtttctcggggtgttcattggctttgtatctcttgggcatttctgacctacttagctaaagtatcttcttctgtagcccacatatgtcagcttggtggggctgaatgacagcctacccgtataggattcctcacagacagtggaaatgaatgacctaaacgttgctaattcgtgtagggctgttatttgtctcttaggtcccaataccctgtttcaaaccctcttagatatgattatttcctgcagaggggaaagataaacattgtttttacacccttgttacaggaatcagtcttgatgacaaggtgttgggaagaagaggtgtggtagattgtgtcctggcccgccagcctcagtgcctgggaagagtcttcctgtcttgcaaagtttgtgagactgatgaagataatgcctttgtgaatttttttaataggactatttgtatgtctttgtttatatttttctgtttgtattgtatgcaaaaattagattattgtccaaaatgaattcatattttga

SEQ ID NO: 5706 - DNA, 1122 bp, Homo sapiens
caggaacacaccacacttaaaccatagaataggattactcacctctttgaagagagctagactactttcttctgtggccctcaaaggaataaaactctcagtcatatcattggaatgacttctctttgtctttgtaaaagttttctagcattgagagttacctggtacctgccctttttgtgtactttccttttggaattttgtgctcaagttgaacctttcagcatctgtatatgtgaagagttaagagaggacaggtcttttcaggaacatcagtttagaatgtgagggtgtgttgggtgagactgaagagtatggtaacatgagactagctaagaagaggctagtttatgaagaatttataagcagttagagttttagacttcgtccttgggcattgagccaggcagccagtaggattaatttttttttttaaacttttggttttttcaatagtttcaaacttaaagttgcaaaaatactacaaataataatgctgtactactcactcattccaaaaatgttaacattttaccatattaatgttaccatgtccttcgctctaccctcctttgctatctctctcactctctttctcctctactctctgtagaatctttctgaaccattgcagggtaaattacaaataacaatgcctctttagcccaagtactaaagtgtatagttttaattaaaaggggaatttcctaaacaattacagtacagtgatcaaaatcaataaattaatattgttacagattattatctaatctacagatcatattcaaattgcagccactgatgtcatctacaccaaagggggaaacatttttctcttccatgtccaggatccaatccaagatcacaagttgcatttagctgtcatgtctattcagtatttcccagtttggaatatgtccttattcattgtcttttgtgaccttgacatctcttaaagtcctatttcaggttatctgaggtattgccttctgtctttcttaggtcttaaaaaaggggtttgtagccatactcttttttaaatcttcatacagctgttttctaacagtggcctagattttatctttctctgggagccattctttgatttgagcattgtttgct

SEQ ID NO: 5707 - DNA, 1012 bp, Homo sapiens
tggagtctacagaggaaataaaagagtaggttgagtagtagaaggataaatgttatgttctttggatttagcaccaaggaagtcattgaagaggagtttcaatgtagagtttcaatatatttattggtagataaagtgggtgtgaggaagtacaggtagtgagagtacttaactcttaagaatctcagatttgctgggcttgcgtgtatagtcccagctgctggagcgctgatgtgggagtatctcttgagatcaggagttaaaggctgcagtgagctatgatcatgccattgcattctagccttgacaacagaatgagacctcatctcttaaaacaaaaaattaaaaaagaatctcagatttgaagacaaaagggaggaggcaggaaaaatgatactatgtcttcttctgttttggtggggaagaaagaagagaagcatgtaggtgaataactaggtcacctgggtagtagagcaaagaaactagatgtgggttgaaccctatcagagatattgctaggcagattgggtatacaaataaggaggccaagtgcgttattttcaaaagtgtttaaaataatggatcatgagattgaggtgggataatagatgtagtggaactagggaagggctggaacatagagttacaggagatattggagcatgggcctagagggctcagtaaggttcaagaataagtatagtaagagtgtgaattaactgcaaggttatgaagaaagagtagatcattgtggtttaatatttcattgggatatgttgggtgatggcagcttccaggtgttggaagacagttctccatggttctcacatttatacacatcttgtgagtggcagccctgactgcctttgttcttttcaaggttgtttatgttgtttatatagcaagcaaacagccttggaaaacagaggcactatcattcaaatttctcctgtaattcagtccactgtgtgtataaatgtcatcttgccccaggtcaccctgtcagaatggg

SEQ ID NO: 5708 - DNA, 1031 bp, Homo sapiens
gcaaatgacctagttttcatttccatttttatagatgaagaattagggacatgaaggtttaattagatttgataaatgtttacaaagcgtctactcaattcgagacaccatgctcaatccttgggaaaacagaatttaaaaatctggagagtcacaatcaatattgaacagtttgtttaaagttttgtatttgggggcataacaccagtagaatccggtttattttttaaaacttttctgctcctttctatggcctctcttttgtattttttcagaaatgtagctataagcagtgagagtgttatagtagatagatctgacttatctgagaagccatttaactgtggtatataatctaatctcctactgattgtaggatgcaccttcattttatgtgccactaagaaaaaatcatgccaagtaaactatgacacagcagtattataatacataacctgattttagagatttatttaaataaataaatctcttaggatctattaaacatggcatgtcaaagaacttagagttccttttaactctttcaggtgttgcatatacagttaaaagatgtgtatatgattgttcatcactatggtagctcatatttagaaaccatgtaaattgcccgtaacagatgaataaattatggcacatctgtaaaaatggggcattatgttgtgtctcagtttcttcatctgcatcaagttgattttagtgcttacctcatagagtttttaaaactaaattagttagtacatgtaaaatgtcctggcacatattaactgaaaacctggttgtttagacagaaaacacaggagcatcttagttattaaccaacattattattgtaacacttatgatttagaatcatgatttagaagactaatgaagtgcaaagatgtttttaatataagtgaaagatacatagtgtattcccagttttggttaggagatttttaggccaggcatagtggcttatgcatgtaatcccagctctttgggaggccaaggcgggtctaagagttgga

SEQ ID NO: 5709 - DNA, 1032 bp, Homo sapiens
ccatacccagtgatacaagagctgtgggagcaaagtaacgttgagatagctacagagtaaacagtgggtttcagggtcgatctaagtttttgttggaacaagaatcagaggagatgttcagagaaaaggatggggtacattgcaccttgttctcggagcacagtggaaggctttcagctgttgaaggaggggtggcaggtgtggacataataggggaggttcacaaccgtgtagggatgaggcaggtgaggatggaccaggagtcttttgatgactgacataaaaacagggagaaagtcattatccgattgaccctggtagacttcaggcaaataagatgaggccttgagtgtttgaagaggttgggtagagaggtagtatgggcttcttcttgatcctgatggctggtagaagccttcagtcataggttcctttttggggaacggtgtcattttacattggttcaccacactcttatcttctcttgatggaaagatagggataggtcagggaaagaaaggctgttttacccagaactttagggttccttctagactatatgggtttttaaaaattattgatatatcgtagttgtacatattttggaggtacatgtaatattttgatacatgtacacaatgtgtagactccatggttgatgatggtagagcacacttaaattgaaagtcaagggaactttaattcactactgtaatttttaaatgtctgtatcatgtagtgtttgcacagttttaaccttagtttaccatctcttactccttagtaaaaaattccgtttcatttatttctttattaacttagattatactgccttatattttttagtgcactttttctgtgactaacctttaacccttttgcatataaatgttttaaaactagaaattagcaacaagtatctacttcaatattatgttattaatgtggtatcactatcaccttttaaatattgcaactataatttactagtgtaatattttcacacaaatctttggtaacgatggtagtgga

SEQ ID NO: 5710 - DNA, 1072 bp, Homo sapiens
gtttccttcaaaagttttgctctgtcctccgctagccttataaactcatggatatggtcctctaatggatttgtagcaccttagttcccttattgtcaccttcctgtgttgaatactaaagcttattttaatttcatgtctaggaagtgtagacattgttaaaaaaaaatgatgttgcttgacaaatgagtatcttcagtattactgtgtcacttcataaatataactaatacatacttttactagttgttgcaatttgatcctgaaacagccatctttaaattatgtaggctttttcttttcttttctttttttaaaagtaattataatagacttaaattgtttttggatgattttcttaggtgaactgacttatttttagaacagaaactttgtgtttattctgcaagttcttcttattaatgtggcacccattgttttctgtaactaaaatgtaatcaactctttttccttccctttttgaatcaaaatgttagacttatacaagcactagcaacaactctatatctggatcattgaagcgcttggaagatactactgcacgatttacaaatgcaaatttccaggaagtctctgcacacacctctagtggaaaagatgtttcagagactagagggtcagagggcaaagggaagaaatcttcagctcacagctcaggtcaaaggggaagaaagcctggtggtggaagaaatccaggaacaactgtgtcagcagctagcccttttcctcaaggtattagtgatgttttagttaaaatacttgtgtttaagatggttaataatagttatgctttgtaaaataattggtttgtttttgaacttataactaatggatgttctagattattatatgattagttgctttagtaagattactttaaagatagtgtttcctattaaatttttttaatagggactttttctttccttttataatatgatttgtgcttccagagttgaattgtaattttaatgtttaactagatatggaataatgcttaaaattggggagaaaaataataaaagctggagctttgctttgagttctgtag

SEQ ID NO: 5711 - DNA, 1096 bp, Homo sapiens
tttttctgggaactgtagatcaaattagagtagaagcctagaaaacacctataaaatgtttgattcagagttcagattctaaaatttgtattatggattgaagtgtgtcctgataaatggcctgttttatagtgacttgtacaaaatggaaaattagtgtgtttctaaaagtgatttctaagagttttaagtttggggcttataggttttgttggttttttgactgaactctttcctacgtacatttttttgggttctgaacagttaggcacgaggtcttttgaaacatcaaaaacagttttggaagagttgacaatctgtcctttcctcttcgctatttatcttcaccacattacaaaaatttgatttactaaagtgaaagttgagaacatctttttcttcactaaaaccatcttgttattttctctgagaaaagtctgatattcattaacccatttatgctggaggttgcgcttttttgtgtgtgaaaaatcagaccttggtgatgaccttgagcagtaggatataaataactcccacaagcttaggttccagtaatggaacacgaggcataaagaactcaaattgcaaggggttgatggtttagcattcacttcctttcttggggcatactgtgtcctttcaaagtacaggttgagtaacctttattaaaaattcttgagaccatagtatttggaatttcagatttttgggagattttggaatacttgcattatatatacttaccaggtgagcatcactaatctgaaaatctgaaatccaaaatgcaccaatgagcatgagagtcatgggcgcactcaaaaagttttggattttggggctatgtttttggttaaataatatccaaggaattcccagttatccctcctttaaaaaaatttttgccaacagtgttagccataagggaatatcagttgtttccaggattagcaaacccaggtcctttgagtcacagccttggtcctagttttatcaattatttttccctcagaaagccatatagaaattaatttctcatattctgagcagattttgcttttattagtgttttattccttgttctctgcaccctctg

SEQ ID NO: 5712 - DNA, 1030 bp, Homo sapiens
atgtactcacttggaaaatctgcatacctacagcttcaagtatcacctatcacctgtgcttcttagcttcccaaatcgatgcctccaatttagacttttctcctgagttgcagacttatatttcgaaaaacctaataagcttcatttccgtatgatactcagccacctcaaccagacttaggctaggaagttaacttcaactctaccctctcattttcctagtcatcatttttttaaaaagcttttttctattattgatcagtttaacttctttttcttttgtatttccactgccccatttggttatgtcctacattgtcatctgaactgtttcagcaaactcctaaccttcattccattatccagtcccttttctagatgctactagaattgatggtcaatctaaagtgcaaatcagaccatgtcaaactgtcttacttagagaattttctgggacttatgggataacatttatactccttcacatggcatgtggagtttttcttcatctcgttgtaatctgattctccagtctcatcccttcttctccccgactttacgttgcatcaatagaagctacttgtagtttcctgatgttatactactatgtgcaacatctctgacgtagaccttgtttgtatctgttggtgtggacttccaactttatctagtaaaagtagtcattaaaactaagtgtagttgcatttacttcctgcaaagtttttttttcagactctttgatagaattaaccctttctctcttttttaatacttctgggttctcatatgtgatgttctaatacttcctccaattgatttctactctttctctggacacttttttttgtttttgtgaaatatatcttagtcatatttatctcacatttgtgaaacttcaaaaaaaagctttcattagacagttgaaactatggattattttcatcatttattctagcaactgatgcatttcaaaatgttttgaataggactttataaaactaaaatttattacttcacaaaacttattctg

SEQ ID NO: 5713 - DNA, 1077 bp, Homo sapiens
tggcatgttttacctccaagatactgatatttgatatgaaaaataacaacattagctattagtccaaggagttgaaagcagttggtgttgagttggaaaaaagataatcaaacctgtactttaggaagtttcaactggtgggtagcatgtaaaaagatggaaaagagctaatgctgaaacagagtaacccaatagttttttgttacaatctaaccaaatttattgatggcctgaatgaggatcctggaagtcaaactgatgagatgtgtattacccaagaagaactggtaatgacagtagctggaaaggatgggtattcatttactaacacaatatttaggtagagatgtttagcacagaattaaatagagcttgggcaccaaagagaattgaaactaggccacttagggggtagtaactgaaactctgagactagtataggctgaaaaatgtgggtagagaagacagaaagaggttgaatcaggtttattttaaaatagtgaagtcttaataggtagaaaggagattaaggattaagattcaaggagtgatatttcatagatcaagaatctggagcagatgggaagagatcaagtgaacatgtagaaaaattaagtttgaaggaagacagagaatcactgtggaaacattcactgtcagaaaaccccccaccaaaccaaattagttttctaaaaccttcataatttgaattaatgaatttttaaattattagaaattttaaaaatagatttccccccaaaagaactgattctttcaggtatgtgtagtaacttgaatgtgtttacaaaagcgttttctttttagtgtacttcagaatagggctttaatgattaaataagagtattaaataatacttaaatatgcaacggttatgcatctgagcgagttattttattttaaattctcagtgtcgcctgagaagtgatctctttcctctcctcttgtatttttttgtccgaaatacctctgtcctggagttactgtttgtgcctgcctgtctgtcattttctctgcctattccttaactattacataaatcaccaagtgctgccttct

SEQ ID NO: 5714 - DNA, 1050 bp, Homo sapiens
gtcaatattatgttgaataagagttgtgaaggtgggtgttcttgttttgttttaggtcttagaggaaaaattttagctttttcctgttgagtataatgttagctgtgagtttgtcctatatggcctttattattttgcagaatggtccttctgtgcttagtttgagagtttttaatatgaagcgatgttgaattttatcaaatgctttttctgcatctgagatgatcatatgggttttgtcctttattctattgatgtgatacctattatgttaaaccatccttgcattccaagtgtgagtcccacttgatcatggtgtattaccttttgatgttttgttgaattcggtttgctagcattttgttggggatttttgcattgatgtttcttggggatattgacctgtagtttccttttttgatgttgttgtatccttgactggtcagggccttgtagaatgagttaaggagaattcccttctcttggatttttggaatagtttgaagaggattggtattagttcctttgtatacatttggtagaattcagcattgaatctatccagtcctaggcttttctttggttgggagacattttattactgattcagtctcattactcattgttggtctgttcagggtttctgtttcttcctgattcagtctgggtaggttgtatgttttttggaattcatcaattttctctagattttccaatttgttagcattcatactattctctgctgtctttcatatttctgtggtatcagttgtaatgtctcctttttcaattttgattttgctgatttggttcttacctcttttttttgccttgtctagctagcagttcatcaattttgtttaccttttgaagaaccaatttttcatttcattgatttttttttttttttttgagagggagagggggtctctgtctaatcttcattatatcttttcttctgctgattttgggtttgatttgttcttgcttttctagttccttgaggtgcatcattagattgtttatttgcagtctttctacttttttgat

SEQ ID NO: 5715 - DNA, 1249 bp, Homo sapiens
agtctcttgtttagataaatgcctttactagaaaaacaactaccacattaattttagctaacccgtttgggaaattggtcatttccaataatactttcatttattgtatcaacttttgccagccatcttttaaaaatagatactttccttctttagcatacgctaaagatactttatctttttttgatgatcatcattatgcaaattagttgttgtgccatactcctttctattttgatctttagtatatatagatctaatagatagggaaactaagataattcagagactagatcaagaaaatgccacccctctgaaatttgaagctaataaggataaatattaatataaagcccttggcagaaggaacccttcctaaaaaagagtatatttctagttctagtgagagttggatctttggattcttatctaaggcaagtgatgagactgataattgaaagcaaaaaggtattccaagtgatatattgatatgtcacatagatgactgcatgaacgagagtcaaaaggctgggagtgtttccttgctttggaagtgctaaggcatctagaagtacactttataaagttaataataaactaaaatgagaatgctatcctcagtgtcttcttggaggaccaccgtatccgcattctgtactgtgttttctctgttggtcctatttttctctgccctgtcctgtggtcagctgttacttcttggtgtcaacagactgtctcgagataagactgtttcttcctccttctaattaattttccatttctaatctattaaatgtgtagtggatcttttttagaattgtatctacagtaagagtaaattggctctacaaaagctatttttaagtattaggatctgagacgtcaacagatgggactggtaatatctgttttttctgttgaattgtttgtatttttcttattctatattgttttattaatagctaagattcccaaagaattgacttctggagagagaaaaaaatcttaactgtatctctgtttatgaattgtgtgttttatgtgccctctactactaaatacatggtaagtgaacagcacgatcttcatgttgaagttataacttaccttttcccgagggacagttgattgttaaacaggactgaagagtaccaacttactgactttgtctgcatatttttaataagaggaaaaacaaaacccagaaattgacagatttaatttacacattaaagtgtgaactataaaa

SEQ ID NO: 5716 - DNA, 1056 bp, Homo sapiens
tccagaaggtacatccaggaacactttgcctttgtgcttataaaaatacaaacatagataggcaatttatatccataaacaaatttaggaacaaaactttatcatttagaaacactttacagaatttctactgttctattttaacttatttctaaggttaccggcactgcgtaaaatacttagtcttatgtgtgtacttgtcattattaaaaactatccaaatgtgtggtagttttaggaatgctgaagtcattacaccaacttcaagttgaaaaccgaagattagaggaacaaattaaaaacttgactgccaaaaaggaacggcttcagttattgaatgcacagctttcagtgccttttccaacaataacagcaaatcctagtccgtctcatcaaatacacacattttcagcacagactggtaagtgtgaaaatatttattttgtatctaaggaaaataggctttcagttttatttgtattataagtgagtaataattggtcaccagttatatgaagatgtagaaaaggaactataggttgtttttgaagggcataaagaatcctgttaagtgatcaacttgaatttaactttcttagtccataatataatggtaaaatttacttaaatgtctaatgatctcgttattgatttaaagcgatggtattcaatatagatttttttttcttatttaaatcagtcttaggaatagcaagactagatatttaagtggttttgatacgggcttcagcataagctttttaataagcctttaatcttacacataatgtaatttaatagggtaaataggtttctttttgtcttttattattctagctcctactactgattccttgaacagcagtaagagccctcatataggaaacagctttttacctgataattctcttcctgtattaaatcaggtaatttttgtatggttattttcatctatgttgatttacttgtgaataatagtatattaaatggtttaaaattattttaaacagttttgcagtgttctttaaacttagtttctcttctttcttacgctgg

SEQ ID NO: 5717 - DNA, 1141 bp, Homo sapiens
tccatttttttcaggattaagaattggaaggttttgaacagaatagtgaaataatgatttacattttaaaggattagttttgctgctatatggagaatagtctgtgtgtgttatagggtgtgggggagtgaagacagaggcaaaagtggaaaaagggagtgatccaggcaggagacgtaggtgttaaaatagtatgggctacgtattgaaaactgcctggaattgtggtatatatatgtatatttttgagagggagttttgctctgtcgcccaggctggagtgcagtggcacaatctgggctccttgcaacctccatctcctgggctcaagtgatcctcctgcctcagcctcccgagtagctgggactacaggcatgtcccaccatgcctggctaattttgtattttttgtagagacagggtttcaccatgttgcccaggctggtcttgaactcctgacctcaagtgatctgcccttagccttccaaagtgctggaattacaggtgtgagccactgtgcccagccaagatgttttgaagacagaaccaacaagacttgtttgctggacatacaagagaaagaagaattctgaatggttggttagtgacttttactgagatgtgggagaacagaacccaaccaattttggagagaaaaataggtgtcatggacacactaagcttgaaatctctttagatgtacaagtcaaatggagataaggcagttgcacagtaggtgtctggagtcccaggcagagatgcagttagttagaaatctggggttagtgctgcacaggtgatgagagccatcagatttgatgcggactcctagagcatgaagactgagtcctggacaccctagaaaaggagaataagccagtaaagaaaggctattgagaaactgtggccagtgagccaagagaaggacagtgtggcatcttaggggcaaggtgaaggaaatgtttccagaaagggaggagtcaactgtgtaaaatgcttctgtggtagggtaagaaagaattgaccaaccgggcgtgctggtgcatgcctgtggttccagttaattgggaggctgaggtgggaggatcactggagcccaggaggttgagggtgcagtgacacctgcacctgacagggactgt

SEQ ID NO: 5718 - DNA, 1046 bp, Homo sapiens
atatattgaaaatacttttgattctggatcattttcagtctgtttttagagtggtgttaaaggcacactgcatgtaagtgtatataaattcttaaatgctggccgggcgtggtggctcatgcctgtaatcccagcactttgggagacggaggtgggcggatcacgaggtcaggagttcgggacaagcctgaccaacgtggtgaaaccccgtctctactaaaaatacaaaaattagccgggtgtggtggcgcgtgtgtataatctcagctactcaggaggctgaggcaggagaatcgcttgaaccaggaggtgtaggttgcagtgagccgagagcacaccaccgcactccagcctggacaactagagcgagactcggtctcaaaaaaaaaaaatcttaaatgctgacactaagatgggatcttgttttttcttaccagttgcctcatcttaatatgagcactaaaactccatttatttgggtgtcttcctattaatcaagattttactctaataatagcatgtgtagctgtctcatttccagaacatggttaaggaattttcagcacaaattattgcttggagaccatgaggactaaaggactgtactttttccttcatctgccaatgtcgtgggctaaagtttgttcatttacagggatcaaacttaacgtaggtgaggattttttggaagcctccgcacagcttccgctcgacactcttgcttgactctgcttcccccagatgacttgcatgtttgctaaatccagtggtcccttctcattcttcatcttaacgtcacctggcaacggcattagacagagttgatcgcttttcctcctccttgaaacatttcctcctcttagcttccaggataccacatcatcttggtgtcttactacctaactggtcattcctttttagcatcctttcctgggtcctcctcttcagcctgagagtgcccaaggtggaattcagtgatctctcatcactgtctgtaaatagcatctctgtgctgatacttacatctccagccagacctctctctg

SEQ ID NO: 5719 - DNA, 2105 bp, Homo sapiens
tgccccgcccccccggcgtcgccgcacccaccccgcccccgcgccggccccgcccccgcggcgcgccgcccctcccccgcccgcccgcccgcccgccgccccgcacgcccgccgaggctcggggctcgggccgggctccgcgcggagttgcagcggtggccggatgccaagtgtaagtgtaagttgctatggaaaccccgaccgaggcgagttccgaatccggagcgagacggagccccgggcgccgccggatccgcccctcgcatcccggcccccgggcgtccgccgcgctcaggccccggcccaggccgactggaggtgctcctcctgcggccccagcacccggctccggaaatgccagggatgcagggagggcagaattgttttccctgcgcgtcgcgtaaaaacgtgccaggttctgcttgctggaaccgtctaaaacaaccggaaccccggattttcacttgcagattcttgaggaagttttataataaattcggagacctggaacaagccctagtggttggtaaatatccgcggggattgtgtggcgtctgcagcagccttggggctgctgggctggaggacaaatggaagaaagagaccctaatacgctcagctcccagcccccaccccagactttcttctacctacaggaatgatctgagagaccagaagtaatgttagttggatccttttgcatcagtttggtagaactgattccgatctgatgagtaaattccttctgtagaaacgttaggacagcccagctgtacagtgttaaatgagttttataaattcagtgtttcagggtttgtgattactagatgatctccattcttgttctgtgaattatggccattatttctgtgtcttgcaggattttttatcaagcagaaatgcatcgaacaacgagaatcaagatcactgagctaaatccccacctgatgtgtgtgctttgtggagggtacttcattgatgccacaaccataatagaatgtctacattcctgtaagtaccgagctttagctctcttttgtatcatgcgtatttcacagttcgacctggaatttgaaaactgttaatgattcctgcaatctgtggaaatgttggtacaaagtggtgaaggcattttcttctcttgcatctaatgactttttgttaatatgtattgattgtattacaagcatgcaatatatgtgttctcaggatatgaattagcttatttagttggaaatgcctttcaccatcttgttttctactagttctgggtttctaacaccaatgatttatccactcatttctaaacataaaaaaacttcacatgttctacttctagtctgtaaaacgtgtattgttcgttacctggagaccagcaagtattgtcctatttgtgatgtccaagttcacaagaccagaccactactgaatataaggtaggaaactgttgaaattccttgtttgtaattattattggagttgtataatttactgaaggcaaccctctttatttcttcacagaaaatttactcttgaatacataactaatatgtgtgtgctttgtggagggtagccgtttaatttcttgccatattaatggtgaccaagtttagacaaagtttagtagtattcaagtgattttaagatttttttttcctaactgtcctttaaaaactgagttagttcaccttttttgcattgctttatggacttcatgacaggcaggaataaatatttaaaagggcttccattcctctttattccctattcatattagctagtttagtaacttgaaaggcacacttcttttgacagagcaaatgtgaagaatttattagtgaatataaaatatttttctactgatttaaaaagtgctatatacagagaacttttattctcatagtttttatcttatcaataatagttatagacagcatcacaatcaagtaaaatattatagcacaaaagaagactatagaaacttatgaacatttttagttcttgccatctgaattcatagttttctattttaattatttttcaggtcagataaaactctccaagatattgtatacaaattagttccagggcttttcaaaagtgag

SEQ ID NO: 5720 - DNA, 1025 bp, Homo sapiens
gggtcatcagcaacttcttctggttgatacctgagactgttaaggaaaaaaattttaaacccctgatttatatagatatcttcatgccattacagctttctagatgctaatacatgtgactatcgtccaatttgctttcttttgtagtgacattaaatttggctataaaagatggactacatgtgatactcctatggacgttaattgaaaagaaagattgttgttataaagaattggtttcttggaaagcaggcaagactttttctctgtgttaggaaagatgggaaatggtttctgtaaccattgtttggatttggaagtactctgcagtggacataagcattgggccatagtttgttaatctcaactaacgcctacattacattctccttgatcgttcttgttattacgctgttttgtgaacctgtagaaaacaagtgctttttatcttgaaattcaaccaacggaaagaatatgcatagaataatgcattctatgtagccatgtcactgtgaataacgatttcttgcatatttagccattttgattcctgtttgatttatacttctctgttgctacgcaaaaccgatcaaagaaaagtgaacttcagttttacaatctgtatgcctaaaagcgggtactaccgtttattttactgacttgtttaaatgattcgcttttgtaagaatcagatggcattatgcttgttgtacaatgccatattggtatatgacataacaggaaacagtattgtatgatatatttataaatgctataaagaaatattgtgtttcatgcattcagaaatgattgttaaaattctcccaactggttcgacctttgcagatacccataacctatgttgagccttgcttaccagcaaagaatatttttaatgtggatatctaattctaaagtctgttccattagaagcaattggcacatctttctatactttatatacttttctccagtaatacatgtttactttaaagattgttgcagtgaagaaaaacctttaactg

SEQ ID NO: 5721 - DNA, 1034 bp, Homo sapiens
cacactccactttggggagtgttaagtttctttgacaatctgaacaaagagtaaccttctgaaaatgcacaaatacactacattctgcatataattgcagggagttcacggactgcctgaagcccacctgtcttctgaataactcttgagctagaataagcaggatcaaatccagatagccccacttggcatcagagattcttctattttacacaagcacatggccattggttatcaatttgttcttcctcagaaactctcccttgtggtctggattgtataactttgttcgaccataattttatactcatttgctctggtttgggccttttgtctggattctggtttgggaaatgctgttttgatctattggtatccatgttcttcaaatggctagatttagaggaaatctcaaattttctaattctgttaattttcaaggtgtcaataaaataactggtttctctttctgtccttaagaaattaaaaaacctgcttcctcgtgctgtaacctagtatagcccactctgctctacatctgctaccagttttctcacaccagaccttcacctgttcccactatggtagattaaagcaacaacctgtgcatgaactaaagtaacccggccctcattggaataccaagcaagcacagcacaaaagttaacttccattgctgagcagaacctccatttcccagatctaccttaacatcattcaaccaactgcccatctgtattaaagtcgggctccttcaccatggtcttgcaggtttcctctattactgtgcaaacttccattttataattcaacttattcaactggtaatcttcctccatcccttctgacatagcctccttccttcttaaattgttttcatctttggcaactctacaaaaactgaaaaagtatgccaggtaggtcttcaaattcagtgaatgcagaggtggtttaattttcttatagcctaggagatatctggtctgaaagcttgattcttggaacctctagaaagatagatgattccacgaaga

SEQ ID NO: 5722 - DNA, 1035 bp, Homo sapiens
ttcaccatgatgcccaggctggtctcaaactcctgggctcaagtgatctacccaccttggcctcccgaaatgctgggattacaggcttgagccactgcacccggccttggctagcagtctatttccactttacagatgcagaaactgtggctcagagagttactgggaaatacgacataataaactatcctatactgcctgcactttttctcattttaggaggcatagaaaaaaaatgaatgtgttattgaaataactcccagcagcagcaatgattctgtaaagtaattaaaatacaaaatgttaagtatgccaaaggagccagggtatttatatttttatattaattatgcttttgccacttttttctagacaggctacagaagtgatattaatttactttttactggtacctactgataggagctccagtactgcacagacttaaaattttaaattctacctgcctgaaatttttcttggccatacaagtagagtcggattttaatgttacaggtattttcggagtgagaacccaagtcaccaaggggctgtggttgctacagggtgcagaaggagcctaggagtcgaatatactgtcctttattccttctgtattctagacgttggcacttcctcccttgcctctatcccagacagaaacacagcccataattatatcctacatccattgtatgtaagagacaaatatgtttttcattgtgctatttttagccacagtgtttctagctggggaaaacactctcttcattccagggttttcttaacaatttttccagtttttccatgtcagactattcagaattattcaggttccacactcctgggagaaggctcttaatgaagtattgagtaggctcatcgagggggattctagagggattttggcatctgagctgctgagcctgaactcattctatgacagatgatgtctgtggtcccatgaattaggctgcattgaggactctcattcccagcactgtttgggggcactgggaaaaggttgagttacct

SEQ ID NO: 5723 - DNA, 1032 bp, Homo sapiens
attatgtgcaaaaaaagaaattgctagcatctaaaaataagcactctacacgtgtatagttttataatcttatcagctgtgatcttcaggaccaagtacgtggcaactacaggaggatggtctctgtcgctgtcaaaagctgagtattccaactctcacttacttgataccaaccacagaaggacatgagactgtaatacactgggattttcaaaatgcaaaagaatttgatattaaaggcttgttagctgtctaggaataaaacaagaatggggagaaacatataaagtaaggaagattatctctctacagctaaaaccaggcaaaaggaccacccactatggcatattgtgaaaattttgggggctacttttgtttgtcacaataattggagcagttggttgaagggtacaatgcagcagggccatgttctgttaaggaaacagatccactgactacatttgtgtttaataattgcatgcttagtggtctgtttctcctcagtgtgacgtaagtaactaccatgagtttgcctaatggaagtagcatccacacacatccagcacatgccccttgatggacagacagggaaggtgccagttgctcagtccccatctcaatgatcataaagaaactggagtctttagactgggtgcagtgtctcatgcctgtaatcccagcactttgggaggccaaggcaggcggatcacctgaggtcaggtcaggagttcaagatcatactggccaagatggtaaaaccccatctctactaaaaatataaaaattagctgggtgtagtggcccatgcctgtaatccaagctactcaggaggctgaggcaggagaatcacttgaagctgggaggtggaggttgcagtgagctgagatcatgccactgcattccagcctgggcaacagaacaagactctgtctcaaaaaataaaaaatttaaaaatttaaagaaagaaactggagtctttaaatgactgcctgttaaaagaagcagatgtctgagtagacaatcacatcaagg

SEQ ID NO: 5724 - DNA, 1073 bp, Homo sapiens
aattctggtctaaggtgcggggtaatctctgaagtagttaaacacaagtggtgtaaccaatgtgtcaggatgggagaactgggcactgggaaagagaaagactagtgttgggaggagcagggaagcaccagcaaggaaaaagaccctgtacatgaacttggctaaggaattgtttcagtgatagaaataccagacactgtaaatggttgtgcacatgggccagagaggtctttaaattacatttgaaacatatacacctactgtgtacccataaaaattaaaaactattttaaaaaataaattccatttgagccactccttcaaaccacccagagtgggtagacgtctttcgtgcctctaagaagccccatctctattctgcgtctcaccttgcagggctgctcatctgaatcctgaagatggtggacacccatctgctaggactgaaatgaataggacagagggaggtgcagagtgaatggaccatactacctgtcatcttggcaacgtgtgattgaataaaacaacttctttagaagtttgatagagtgatttgataatgtaatttacaagtgatcatttctttttattttcattttcagttgttttttatagacaaagtctcactctactggctaccggctaggctagagtgcagtgccacactcgtagctcactacagcctcaagttcctgggctcagcaatcttcccacttcagcctcctgagtagctgggactataggcatgaaccaccatgcccagctaattaaaaaaaaaaaatgtttttgtagagatgagtcttgctatgttgcccagaatggtcttgaactcccgacctcaagtgattctgtcacctcaacctctcagtcttctttttatttgtgtacctggcttcagcccttttgtttcttcaagggcctggacttgttactcctggcccaggagtatgttgttaaacactggattaatggtgtgacctatgcatctatttaatttatacgtatgtacagagagatttttgcgtgccgtcagtggctaaccaaatcaggcaaaccacagttcatttgagtaa

SEQ ID NO: 5725 - DNA, 1047 bp, Homo sapiens
tatgtgtgagaaaacaggaattagggagaggtaagggaggggagttggtcaacaggaagcagggggtcaatgaggcatcatcatgggtgaggggtctgacaatttattgtttagatgcagtgatctggtgagtgtcagcttcttgatgctaactgggaggcctgatggtttcctgagaaaagaactcagataagtcaaatgtaaccatctcaagttttaagactggggcgatcagtttttatgtttttttttttcaaaagaaaccataaacattggctctatggaacaagtgagtcagtttaaaaacaactttattaacagagttgatgatgtattttttatttactaggaataaatgatcaattgatatattgttttcaaattttcaggactgggttctttcctcctctcctttttataaccgcaaaatatcctcacaaacaatgtaattaatataaattttatctcatactttttgagatacatttacttttctgtttatagcttgtcttagtttgattctatgcactgagctgaacaccatacctactaccattctgctggaatcccagttttattaagtgaatttgcaacacatgatatggaatcactgtccttcagcatgtgtcttcccaattttcataactgatgacataactttatagggttcgccagtagcattgttatgatttataccatatcacatttgtagtatattgcatagtataaacatatgctgtttatatacatagtatataagtagcacatagcatatactatatacatagtatataaatagtataaatatatagtatataaatagtataaatatatactatgtaattagtatataattatactggagtgtatatatatactataaatatatacatagtttatatttatacatagtacataaatggtgtatatacatagtatataaatagtgtacctagtatataaatagtataaatatatgctatttatatacatagtatataaatagtacaaatataaataagtttataaatatattttttaaacaga

SEQ ID NO: 5726 - DNA, 1033 bp, Homo sapiens
acggaatagaacatgttgtagatggttgaccccttgcagtagggactgagggatcatgacggatacatcatggatggaaatccacaaagtggaaaccgtttttgcttgcctttaaaagcaaatctaaaaatatgttttctagcagctgtgtaactgcaaggaaaaaaaaaaaaatctgctccactgcaacacaactcgctcaccagatatctgcagggttcagatcttaatgcttcagaaatttgttgcagattttactgtatatatttagaccaaggagcctattagcttgcaatctgagagaacctctgcattttcatgaaaatgagaaatgtggcactgttggcaacctcgggctataattatgttaatctgaccattttaagactgaaatatgttgttttaaaatgtttctgtatttttattattcgtaacaatgatctgaagaaatttactgaaatgctaataagtttctattcagtatcactttgagactagagcacaaaaaatgagtcagatgtggaattttgatatttttaattttggcacagaatttttatcgacagatatgtactcatatacatagagtatcttaatataaaaactacccaaatataattttatattttaaatatagatacagtgagtatatgtgcaaagctgtcttggcagatatgtgcaataacaaaacatctctacatttgcattaaattcccaatctttgctctgccaaaaattaattttgcgcattattacaagataaatgtttttctatcaagaaccatgctaaagcacccagttccctgtttttgatataaatgtaggacaggactagaatggataatgtagttgaaattctgagagcctctaaacacatatcttgagctaattagttcggcttcctcttcagcagccaaagcttgcattctggccacagacaagtaatgacacgggtgctcttttcattcacaaaagagatgttctcccaggtggtaagatgggaaggaaaagagaatgatccaatgccaagatg

SEQ ID NO: 5727 - DNA, 1022 bp, Homo sapiens
gtataaaactatttttcattacggagactagaagtgaacagagaattacacaagtgtgactatacaaattgtaaaacagatactataatatttccttttattttagtgttatttagctttattacagatttctatttttgtcaaaacttcatggttcctttcaagatcttttttgccaaaacattttgatactatagcattgtacatttgaaagtagtgttctagactataaaaccaatgaacttctacatgagccctacagacaggcatgtgtagaaggcaatttatcaaacctattgcactgccatgaaaagtgtgtataataatttgctagcccaagcaagctagttttctttgcttgcttcttttctttcttttttccttccttttttttttttttttcttttttaacatgttgagattctctagttgttttctttggcgtatctaaccccttcttttgttttctgagacctggtaacccacgctcttgcattgtggattttaaaatgtatactctgtacggttctgtaaaccgaaaaacttttgtaaatatataaatatacatagacataaaaatactgtatgtgacagcacatagagtagttttcccacaccaaagttaatttttatgcatgctttaaaagtatatatcgggaccggcagaaatggaagtatccatacatttttaaaaagcaacaagtttgcacagctagagtgtttttgtaaataaatgtatttgtataacacagtcatgtaatatacagaactataagcagagactttgcaaaactaaataaagggctgcatgcttattattttttgtaccttgtcactataactacttcctagtcaaagaacgaaatgtaactgttaccgagttaaatgtttttccgctttgagggatgtaaccacatccactcagaggacactacttttctgaaagctctggggtgactaatgatgagttcctaataaattaattgcaagtgtggtgccttggatgtggcctgttggctcgc

SEQ ID NO: 5728 - DNA, 1079 bp, Homo sapiens
ttttatattcatttctatttaatattcaccaaatatttatggactatctactatgtgtcaggcatggttttaaagtctttgaagtacatcagtgaaaaaacaggacaaacatttcaggcctcaaggggcttacattctggtagtggagaaaacaaaacataattacaggaaattatgtagagtgttaggaagtgataagtgttatcaaaatagagcagggtaagtgagacaaggagttgggaggcaagatgggatgcaggaagtaagactgggattgtaagtaagatgatcagggtgggacttattggggaggtgatggctgatgtaagacttgaaggaagtgagggtgtgaaccatgtcaatatctggagaaagagcattctaggcagagggaacacagataacccaatgggaaaccagccctgctatgttttagaatgagcatgaagccagtttggttattttattaaagaagaattaggtgcatgtttacaaaaacaagcagaataattgttgagatgaatctgaagatcctgaagatacgtttttcattgtattatgatcaacttttctatcttaaaaaaatccaaaagctcaatatataataaatctattcaaaaagatgagtattcatttcaaaaatgtagctttgctagtaccttttcagaattatggtaaatgcacatatcaaattatgttaaatatatatgttgaaaataattatttggcttacatgatcatataactaagaacttatttatatgttttaattttataggctagagaattacttttcattctttgcatgctaaagtattagggaaaatatatgaacattcatttttatgtcaaatgcaatttaccatagttattaagtaattagttgtttactagctgtgacattctatttcattcttaaagaataaacagctttgtatggaaaaagtgtagtttagcagtcaagagacttgattctagcctaattcttgaaattatttaatgtattattttgaagcagtcattttaaatggcttcattttacctatgtgttgggagttttgttcatttgctttatatgg

SEQ ID NO: 5729 - DNA, 1064 bp, Homo sapiens
agagatggagaagctgtacaatgaaaacattcattttattcatttcaatagttggaatggctattttaatataaggcaaggtaacttccagacaagcagtataatcagagacagatgacatttcataatgacaaaaagttcaattcatcaagaggagaaaacactttttagtttgtgtgtgcttaataacaaagctttaaaattatatgtgtcaaaaactaagagaaatgaaaaaagaaatagtcatatcctcaatattaaatggaaatttcaaaatcatttcctcagtaatttaaaaaacaagtagaaaattatttgaggatacataaaatttaaatattctggaccataagacaaatatcaacaagtttaaaagagtcaaaatcataaaagaatattatctgaccataatggaattaaattaaaatctataaaataaaaatataagaaaaactaacaaatacctgggaattagatcacacacctcaaaaacaaactttaggtcagagaggaaatcaaaagaaaagtgtgaaaatattttgaatggaataatggaaatgcaacatatcaaatgtgtagaatgcatttaagcagtgcctagaagggcatttgcacctccctgtaatgtatattagaaaaaaaagatttaatatcggttatatagatttttgccttaagaagttaataaaattgaagcaaattaaatccaatataacctaaatgaaagaagtaataaagataatagtagaaatcactttagtaaaaaataaacaaaaataatagaatgaaaggaagagttgtctcttaataaagtaaataaacttgatctctttagacagatccagagaaaagtaagaaaatacatattatttatattaagtatcaaatggggaaaattattattgaatttatagacattcaaatgatattaatgaaatattatgaacaactttatattgataagtttggtaatttagtgtcttgggtctttctggaaagacatgagttgtataactgatatgagaagaaatagaaaatgcaaatagtttatattaataaaagaa

SEQ ID NO: 5730 - DNA, 1050 bp, Homo sapiens
gataaagattataattatgggggttttatcatccaatgttacagtttttcaggaatattcttacaagtttcttgacatttttattttatagataccctatattaatcttgtgaagcatttaacatctgcctgtccaaatgtatgtcgtatatcacggtaagtttacagtccatactgcaactactaaaattatccatttttaaatttattgttgtttaaaaaattttttttgtagcgatggggagctcactgtgttgcccaggctggtcttgaactgctggcctcaagctatcctcccaccctcaggttcccaaagtgctgggattgcagacataagcacccggcctaaaattattaattatattgcctgtaaatttctattctaaattgtagatctctgcctattcaaaaaacaggaatataataaagtttgagctcaacccagagcacaatgaacatagtttagtttttctttgattttgtgggttctcaaggccctatttataaaagtgatctattgatctgtcatttagcaagaatagaattctgtatgtttttccaaattataatgaccttttcagattcatgattaatttctagcaaatatttgggctgaattttccgtatctgagtctactaaatatatatgtatataaaacttacttgaaaatgaagtcatgtgcatttttgcatgtcccaggtttcatcacacaaccccagacagtaaaacacacagtggtgaaaaatacaccgatcctttcaaactcggttggagagacttgaaaggtctgtatgaggacattagaaaggtgagttttttattctgctgtgatgtaatgttttagcttaccaaaacttactaaaattttattttattttttattcttataattattattattttttgagctggagtctcactctgttgcccaggcttgagtgcagcggtgcaatctaagctcactgcaacccttgcctcccaggttcatgcaattctcctgcctcagcctcctgagtagctgagattataggcatgcgccatcacacctg

SEQ ID NO: 5731 - DNA, 1024 bp, Homo sapiens
agctaatgtttgtatttttagtagagacggggtttcatcatgttggccaggctagtcttaaactcctgacctcaagtgatccgcctgtctccccctcccaaagtgctgagattaaaggcatgagccaccgcgcctgggcactcctacactttccttacccatccccaatttgaaagaactgaatgctggttagtccatagtaccctggaccctatagagaaagctctgcacagagcaacctggataagttgtagatccaggtatcatcataggggtctctctccacatatcccaagattcagaagctcttgtaatttcttcttcagtggcaagcaaataagcaatagtgtgaaccctgcatcatttatgatgcaactttgcagacatccattatatccacagctaaatctgaaaatattcaggggttgctgcttttagataccaattattttctcttgacattaaaatgctaacaaatctatgactgttaggatcaagttaaaaaaattcccactgaagagagacagactttattctgagccttacgtgtttctttaggtttagaaggtgaatgagcagtggctggggaggatggcctagaagttggagctcacaggcttcctccctgcactctgccattccttagattggaggcgcccttgatacagatccctccctacacactgggggtttacttgcaatttaagacttcacattttatattagtatgaacagggaaaatatattttgtaaaaccacatgtaaacctcgtaaaggattcactggtagggtcattatattattctatctatttttaggtatgtttgaaactcttcattattaaaaaaatttttttggccgggtgcggtggctcacgtaatctcagcactctgggaggccaaggcaggtggatcatgtgaggtcatgagtttgagaccagccttgccaacatggcaaaaccccatctctactaaaaatacaaaaattatctgggcgtggtggcacacgcctgtagtctcagcta

SEQ ID NO: 5732 - DNA, 1158 bp, Homo sapiens
ctgcatcagcctctcaagtagctgggattacagatgcacaccaccatgcccgactaatctttgtattttaagtagagttggagtttcaccctgttgtccaggctggtctcgaactcctgacctcaagtgatccgcccgcctcagccttccagagtgctgggattacaggcaggaacctgtaactgtgcctagactacagaagtggtttttatatgctaatttgtccctaccctccactgcttttgttttaatactccccccttagaagaatttgttgtgatctagacatattaagaagttgtaactgaaatattaataaagaatgaggccaggcgtggtggctcacacctgtaatcccagcactttgggaagctgaggtgggtggatcacctgaagtcaggaattcaagaccagcctggtcaacatggtgaaaccccatctctactaaaaatacaaacattagctggatgtggtggtgtgcacatgtaatccaagctacttgggaggctaaggcaggagaatggcttgaacccgggaggcagaggttgtagtgagccgagatcacaccattgcactccagcctgggcaataagagtgaaattccatctcaaaaaaaaaaaaaaaaaaggaatgagtagcactgtagacatgatttccaggctgagagcagttgaaagggtctagggtttagttctaaggctgctggtaagaggagccagcgtgacatcatattttaaaattatatgtaaagcaagatcaaaagctttcctcatgctgatttagtgtcgatagttaaattacagcaccttttatgtagttatacttcatttttcattgctttctgccgggtctgaggaattggaatgagcattaccttgtgcagatgttcagattcgatttttaaagaaaaagtcatatttcagaatccctctcccttttttcccctctaagatacaacctgatggtatttgaaaataagcatttggaataagtgcaacatttggttagtgtgtgtttaaatgaggatatgttttaggttccaaatggttatttcgccagtttgattttcttgaaatttagtttttaaaaattgccatagatgatggtggtaataatgattaaaatgaaatgggggacattccctctgaactgtaaaat

SEQ ID NO: 5733 - DNA, 1024 bp, Homo sapiens
tttgtctcattaaaaatatgcttgctcaaatgtaatgtggtcttctgaatttcaaaaaagtattcatgtcttgtccaaatacagatatttgataaataaataataaaaaataccatggaaaaataaacttagtatttctaatagaattcctttggttataaggaaagggattttcatgggtgtccaaaaaatgtatttcatgaggaatcatacgttttacttttgggcttagattacccagattcagtttaattttttaaacatttgtataattgagtgctgcatataaatgccaaagcaaacaaataaaactaataaaagaaaaaagaaacctcagagagatactgttctgccatgaaaattctgtcttttgaaatagaagttctgtaattgggtttggttcatatatgtatatattaaagcatatttctatattattagcattgggaatatgggaaacagggacttggtttgaggatgcatagatcctgggttgaaggatgagaataaagttgaacagatgagaatgaaaatgcacaggcatccatcgccatcaccacacacgtgctctacaaacaaaaagtttgtgcaggccaggcgcagtggctcatgcctgtaatcccagcactttgggaggctgaggtgggtggatcacctgaggtcaggagttcgagaccagcctggccaacaaggcaaaaccctgtcaccactaaaaaaacacaaaaattagccagcgtacacctgtaatctcagctactcaggaggcttaggcaggagaatcgcttgaacctgggagagggaggttgcagtgagccaatatcacactactgcactccagcctgggcaacagagtgagactccatttcaaaaaaaaaaaaaaaagtttgtgcaaacaactaccccaccctcacctccttttctctcatagatttatagtattcctggttcattcctatttaattctccttattaaaagaagagatatatgtatacacacacacacacacacacacacacatacata

SEQ ID NO: 5734 - DNA, 2182 bp, Homo sapiens
aagttattgaagatttggtgcgtggtacgttgattctgatttttcttctttgttattcaaccctggtgtttagccaggcaataaagccacctctcaaatgactcctttccttctttataggtgaatttcttcagctcgggtcaaaagaaaatgagaatgaaagatttgcacactaccttgagaagacattcaagaagaccgccagcctgatagccaacagttgtaaagcagtatgtacgttctgtctttcttcaagttaaagcctcatagctcttttttgggagctaattttcctagaaaatatttcggtgaagaatcttaaaatagtacccaaaaatcccaagaggttaatgaggaaaagaatgacatccccaaacaatagaggacttctgctgtgttttcatttttgccatcttcttttggtatgcaggcgttgacttttcatcttttcttcccaagaattcaatcaaaataagctttcccgcaccttccccaatctgattgccaaactgtatcattttgaacaatttatcataatttctctaatgattgatatcacacacactctttctgacacttcaccttttagaaatgaagtgctctgttctttaatataatatttactcaggaaaagatatctgttagattgtactagcattctatgaacttttttttgtttttttgttttttgtgtttttttgagacagagtcttttgctgtgtggcccaggctacaaagcagtggtgtgatcttggctcactacaacctccacctcccaggttcaggcaattctcctgcctcagcttccctagtagctgggaccacaggtgtgcgccatcacacccagctaatttttgtatttttcatagggatgggggtttgccatgttggccgggctggtctcaaactcctgccctcaagtgatccacccaccttggccctgcaaagtactgggattacaggcatgagccattgcacctggccaatacattgcacctggccaatccttctaatatttttacatgaaatataaacaagtcctatttcttcagagtacaaattgagtataagccataactgtttttccccttgctttctccctccctccgctgtgcatacacatgtatacattttttttttaatgagtaatacctttaatccgtagacaaatgtgtggtattcatcgttagtccaagaatgaaaagcagtctctccatagaattgtttatctgcccatctctaagcctgacagatacacagagacaaaacctggacaaatgacattcccatgtaattacagccacaaaataaggaagacctgtaagggtcgcatgtcaattgctgtcatgatagactcctaacataattaacaggtaaagagagcttttgctcagacctctcagatgaaaaagtctcttgctgttagtgtctctgttttgaaaagtgtcaagaaatgtataattgcaaggcagaaaagaatgaggacaatcttttcttcctaaaaagacctaatagaaactttaaggaatgtgaattatgtagaacatgctagccacagtctcgaccacttttgtctttttattaaaagggctattatgtttttatttccaagaaattatgtgggttttttttttaaagtgagatggaagaaagtatagacacgagatgctaaataagagaatagcctattttaagtgggtgctctaacacttttacagtaatcctttacatattatcatgcccttgatggcccaactctccctgaaggtcaggatccatcctcttaacacattagggtgccttaatattacttactaatatttatccttaagaggatgtgttaagtgaggctcattgataatttcacaatttgagactgcaaacttagaagcattagcatggtcaggcaaggtggctcacacctgtaatcccagcatttagggagactgaggcggaaggtttgcttgtgaccagaagttcaagaccaacctaggcaacatagcaagatccccatctctacttaaaaataatgtttaaaaaataaagtcttagaagcattagtagtagtgagactattggaattggaaacaccaagacttactgtctgcaccatgcagacatcctgcaggcacggggtggggcggcaccaaattggagctagcacagaaattcactcagtgat

SEQ ID NO: 5735 - DNA, 1202 bp, Homo sapiens
aagacagtggcttgtttcccaggaaatctggtggaaatgagacctgagaggtcagagggcctgtccagttgttgttaagccagacagtagctgagttgagacttgaacccagagctgggtatggtaatcctgccttgtttctctctctctctctctctttttttttttttttctgaatttctattttctccagggctgcttgtggcctggaattaatgggctctcttcctattacttgattttcaaagcctcagagtaccactacagaattgcatattgtgggtcacattagcagaacactctttttttttttttttaattcatttttttgagatggagtctcgctctgttgcccaggctggagcgcagtggcatgatctcagctcactgcaacctccacctcccaggttcaagtgattctcccacctcagcctcccgagtagctgggattacaggtgcacaccaccacatgccacacctggcctcttttttttttacaatattcatatctatctataggcctcattcagatcttgccagttgtgaactgttataacgaaagggaaaacatatttttctgttccagcatccagtccaggatttcacgttgcattttgctgtcatgactctgtagtctcttgtcatctagaacagtctttctttgcctctcattaccttggtatttggaagagtgcaggccagttatgttgttgagcctctcagtcgggcttctctgatacttctcaagattcgatccaggttatgaatatttggcaggaataccacaagagcggtgctgtcctcagctcctcataccaggaggcgcgtgctgtcttgtctgtcccattactggtgatgcatgcctggatcgcttgattaggatactgtcgggccgggcacagtggctcacgcctgtaatcccagcactttggaaggccgaggtgggcagattacctgaggtcaagagttcaagaccagcctggccaacatggtaaaaccccatctctactaaaattataaaaaattagctgggcatggtggcgggcacctgtaatctcagcactttgggaggccgaggcaggtagatcacctgaggtcaagagtttgacaagcgtggccaacatagtgaaaccatgtctctactaaaaatacaaaaattagccgggcgtagtggcaggcgcctataatcccagctactctgg

SEQ ID NO: 5736 - DNA, 1045 bp, Homo sapiens
cctggccaacatgacaaaaccccatctctactaaaaatacaaaaattagccgggcatggtggcacgcgcctgtagtcccagctacttgggaggctgaggcaggacaatcgcttgagcccgggaggtgaaggttgcagtgagccaagatcatgtcatgcactctagcttgggtgacagagtgagaccctgtctcaaaaaaaaagaaaaaagaaaaaaaaaactattggataaagtgagtgcctttggaagaaaggaagctgattttcatcataaaccctctgtactttcattttgttatgtctttattctttattttttaagtaagttttacttgtgttttttttacatttaaaaatgttgtataaagatactttgtacatagaacttctgagaaattctaataagtaaaaattaggggaaaacgaatgactatgtaatattgatgagctagttgctttgcatgctaatagaataaaaatttgcttcaatatgagaaaaaggcctaaaggaagttagcactatgagtcgggaaaagaacattagagatgtagtttgactgttaactgtaatcctcagctcatctgatctcaaaactatgtgttcatttattatagcaggaagttaaaacgctgattcagtcagtgacaggcatctgttctgttttgttctgtatcttatagagtgatggtgtgcaacaaacaacctacctcgcccagcagtactgccatgaagcaataagagagatcagtaaacttcgaccatccccagaaagagatgccctcattcagctttcagaaattgtactcacaagagataaatgacaactctttctgttctttctggcagctatcttaccagactgtgcctaaagaattttgtggaatacactttgtttgcttcatgtgcagataaccaaaaatcattttaaaagatatcaaacttattgatgggcaatttatttttttttattgcaaaagttttttcagaaaactttttaaatgtaattaataaaccacctgaatctgtcattctagtcctataaatt

SEQ ID NO: 5737 - DNA, 1089 bp, Homo sapiens
tacaaaaattagctgggcgtggtggcatgcgcctgtaatcccagctactaaggaggctgaggcagggagaatcacttgaacccaggagatggaggttgcagtgagctgagatcccgccattgcactccagactgggaaacaaagtgaaaatctctctcaaaaaaaaaaaagtccaactaaaaataaatataaaaaattaaaaaaaatgaaaagtctaacaaattatagagactacatttcattaacttccactgttttctttgttagtttacactaaataaaatttgttatttatcccagaataggctagaaaggtataacgggttcttttttccactgaagatgaaaaataggagtgattattcttggctattcagaggtccttgaaggtcctttgatcttcacagaggaactcacaatttctgtttttctgacttttatcccaagtgaaattgattcttaccaattaagcatcagtaaaatgaccagaataactataacatgatgaagggttaataactgaaaacatattcaaatatacacggccaccactaagaccttgatcaacaaaaggacaaagaaaatgaatacacagttaacacatatatgtatatatgggactgtgttcttttcactagtagtaattaaataaatgctaatataagaaagagtaaatgaaccatcttacactattaaatgggcaaaagaaaggaataccgatggtccagttagtaatactaccaaaaaagcacactaatatttttctgggggcattgtaaattagcatagtgctttctggaggaaatctgccaatatgtttttaaatataaaagtttttaattctctttgatctagtggcttatgctttggaatttattctaaggaaattgttcaaatgaacaaaatacacataaatgaaatcacttgtagcaacattgtttctaatagggagaaactagaaattacttaagttcatcatagaaacatggataaatgattgattatcaacttagaaacatattgtattcttggccgggtgccgtggctcatgcctgtaatcccagcactctgggaggccgaggcgggtag

SEQ ID NO: 5738 - DNA, 1522 bp, Homo sapiens
taaatttcaagccctgtgcattttgcagttcaaaacagaatcatccaggccaggtgtggtagcttacacctgtaatcccagcactttgggaggcctaggcaggtggatcacctgaggtcaggaatttgagactagcctggccaacatagtgaaaccccatctccacttaaaaaaaattatgcaaaaattagccaggtgtggtggtgtgcccctgtaatcccagctacttgggaggctgaggtgggagaattgcttgaacccaggaggcagaggctgcagtgagctgagatcgcaccactgcacttcagcctggacgacagcaagaccccatttcaaaaaaaaaaaaaacagaatcatccatatacctattgcaaaatagatatgtacgtaatgcagccttaccccaaaatgtgcctgaatatgttgcctgttaatttgtcctgtttaagtagcctgtgatatacaatcaaaataagtattatagaataatttatttaaagtttagaccgtttcattcagaataatgtatataagcttataattgcttacattgctttttaattctctgttgtttattttttccatttgaaagtggcaacaggtagcataatagtttatggggtcatttatcctaccttaacggaccatagttaaaaggtcaatgaatctcagctttatataactaaaacaaatatttttttccctcttaggaaagtgatgaagcattgggcccaacaatgatgagttggaatgcagttgaaaagttatgcgcaaaatctgcaaatgccattgagacgaaaggtttcaataaaaaggatctggagttagctctttctcccattcataacagcagtgcccttcccaccactggacgctcttgtgtaaaccttgctaaaaaatgcttctctggggaagtttcttgggaagcagtagaactggatgtaaataatataaatatggacactgacacaagtcagttaggtttccatcagtcaaatcagtgggctgtggattctggtgggatatctgaagagcaccttgggaaaagaagtttaaaaagaaattttgagttggttgactccagtccttgtaaaaaaattatacagaataaaaaaacttgtgtagagtataagcataacgaaatgacaaattgttatacaaatcaaaatacaggcttaacagttgaagtgcaggaccttaagctatcagtgcacaaaagtcaacaaaatgactgtgctaataaggagaacattgtcaattcttttactgataaacaacaaacaccagaaaaattacctataccaatgatagcaaaaaaccttatgtgtgaactcgatgaagactgtgaaaagaatagtaagagggactacttaagttctagttttctatgttctgatgatgatagagcttctaaaaatatttctatgaactctgattcatcttttcctggaatttctataatggaaagtccattagaaagtcagcccttagattcagatagaagcatcaaagaatcctcttt

SEQ ID NO: 5739 - DNA, 1024 bp, Homo sapiens
ttgccactattttagtgagacatctagctccctcagctaaacaacatgctgacaacatgctgaggcccagccatgaccttcttgatgcccctccatcttgcctctcagccgagatgagccagggagtctgtcctgagttttccgtaactttatgtgcacctttttgtttcagcttagtgtgttaaaattgtctgtattgtctcttccagagtaggctggtttctctttgggaaaagagatttttcttaatcgtctttgtatcctttatatctggcacaatacctggtgcccagttcagtgaatgatgagggaagggactctaataattttaatacagtgtacctaactactgttttcttacatgcaggatttctgacttccggtgagtgagcttctctataaagtaatgcggcaaagcacattaaactgaacagtcaaagtataactagatcacattgcataaaaaactatttttccttttagctcacttgtgaaatacaaaaatgaaccgtcttctgttttctgagcagcaagacatccagagaggtggttcttctctgtgaaaagaaatataggcctgaggcgtttttcatcaacttttaaaggtagcacagagtgaagacgcagtcttttttattataacagaaaaaatagtattgatacaaatattaaaaatggctgggcactgtggctcacgcctgtaatcccagcactttgggaggccgagtcaggcaggtcacctgaggtcaggagttcgagaccagcctgcccaacatggcgaaaccccgtctccacttaaaaaaaggataaaaattagctgggtgtggtggcttatacctgtaatcctagctactcaggaggctgaggtaggagaatcacttgtacccaggtggcagaggttgcagtgagctgagattacaccactgcactccagcctgggtgacagagcgagactccatctcaaaaaaaaaaaaaaaattgacaactacagaagggctctaattttccaaatcttttcatttta

SEQ ID NO: 5740 - DNA, 1052 bp, Homo sapiens
ccagctaatttttgtatttttagtagagatggggttttgctgtgttgcccaggctggtctcgaactcctgggctcaagccatccgcccaccttggcctccctaagtactgggattacaggcatgagccaccacgcctggcccagtttgtttactcactgatttaaccaatcctatagagtgccttctaggagctaggtgatattgcttcaggccctgggaataccctagggatgatctagactcagatccctgtcctcgtggaacttacattctagtggaaagagagacagtgaacagttacagacacaacataatgtcatgtagtggtaaatactaggaagaaaaataaagcagggtgagaggatatgaagtgatggcacgagacttctttttagacagtgtggtcaggaggacctctgtgaagaggggcatttgagcagaaacctgtgtaaagtgagggagcagacatttggaaagtcagctctagctttttcaaggcacttcagacttagattatactacttaaaacatataaacacacacacgtttcaacttctgatgctgtacattggatttggacatactgagtccttgtagtattatttcagaatagatgtgagtgtctgaatgcaacatattggtcagattgccattataaaaaacactatcacatataagaaggattttttttttttttttttttttttgagacggaatctcgttctgttgcccaggctggagtgcagtggcatgatctcggctcactgcagcctcagcctcccaggttcaagtgactctcctgcctcagcctcccaaatagctgggactgcagctgcatcccaccacacctggctaatttttgtatttttagtagagacggggtttcaccatgttggccaggctggtctcgaactcctgacctcaagtaatccgcccacctcagcctcccaaagtgctgggattacaggcatgagccattactctgcccaaaagagcatacttttattttactaggtagaaggaaataggaacaatgacaggtaatgaaatg

SEQ ID NO: 5741 - DNA, 1030 bp, Homo sapiens
tgtgtctagctaaaggtttgtaaatgcaccaatcagtgctctgtgtctagctaatctagtggggacttggagaacttttatgtctagctagaggattgtaaatgcaccaatcagcactctgtgtctagctcagggattgtaaacactaatcagcaccctgtcaaaacggaccaatcagctctctgtaaaacggaccaatcagctttctttaaaatggaccaatctgcaggatgtgggtggggccagataagggaataaaagcaggttgcctgcgctagccaccgcagcttactgtggtcgtcttcctgacggtgtgttttgttctttccgctttttgcaataacagttgttgctgctgagtctttggggctgtgctgtctttgtgagctgtaacactcactgtgaaggtttgcggcttcactcctgaaggcagtgagaccactaacccaccaggaggaacaaacaactccagacgcgcaccgtttttatgaactgtaacactcatcatgaaggtctgcagcttcgttcctgaggccagcaagaccacaaacccaccggaaggaagaaactccagacacgtctgaacatctaaaggaacaaactccagacgcaccatctttaagaactgttaacactcaccgccagggtctgcggcttcattcttcaagtcagcgaggccaagaacccagcaattctggacacacccgaccctccaaaaaactgaaaataaaggacaaatatttaggtctcatatccctacatgtttgcaggaaggttctgctttgagctgtatccgtataatgacaggtgatatcctgaggacattccacatttgcctctttggcatctggaaaagaatccagtttcaattccgaaacatcccatcatcgtaaatgctctggcactggcctctaagcacagtctccctccaccccaagatagtgcattcttccccacccacccccgcctcaatattcctactcccttgtccctcactggttttccagttgggactcttgctggtagggtg

SEQ ID NO: 5742 - DNA, 1049 bp, Homo sapiens
ctcaaagaaaaaaaaaagaatttgatgaaaatacagtaatattagatttgctgcatttgttttgtagatagatagacccaaaagatacagataaaggcatagggaattggactaacaaaatcagcaaatcttttgaataaagacctcactactttaaaagcccatggaacaattatacagaatcaatctcagacttgacaacaacaaagtaaatcctcaattgaaaagaagtagaggttttacaatacacattcttgataatttattctttcagaaaatatgtttgacctattgtgtttcttacatatgagttcatagcagcattttttaaaaaattatacattaaagttgatttttttggtatacagtttgatttttaacatatgtattaaaacaaatgtttatggtcatataattgccaccaccacagtcagcataccaaatagttccatcatccccagagctacctggtgctatccctttctgttctattctagtctggtcctcctgcctctaacctcagcagccacttacctggtctctagttttatcttttttgagaatgtcatgtaagtggagtcatatggtatgttacctttttttttttaattatactttaagttttagggtacatgtgcacctctgagactgctttcacttagcttaatgcctttgagcttcatccaagttcctgtgaattgtttgttcctttttattgctgagctatattccattgtgtggatgtaccacagttttagttggtttatctattcatcaattgtgagacatttttgttgtttccagtttttagtgattatgaatagtcctgttgtaaacattcaggtataggattttgtatgaatactaatttttatttctttagaatacatacccagtaatggaattggtgggtcatatgataaatgcatatttaactttggaaaacagtttggccatatttttataaagtggttgtatcatttttacattcccactagcttcatatgagaattcttattcttctatacccctcacctattatatatcta

SEQ ID NO: 5743 - DNA, 1069 bp, Homo sapiens
aaaaaaagaagggagaaaagaaaccacttccatattcattaattagaatgtcttgttattttcatagacagtaaaaacttcttgaaattctttttaatcttaggccacagaagcatcaatggatcatatttggtctcgtcagtgtataaagcatttacaaacctaactaaatatagaattaatgggagttacgtgcttatattccttatacataggagaagaaagaaaaggacccctttatgccagctttgagtttggcttgattttttacgacttatttagaagccctagggaatgagaaagtctcttaatggaaatactgacacagtcttaaatatagtgacatgaacaagcacttctgtgaagctgccccgggatgtgactgaccactgaagcaagtctgaaatgcattgagtatcagaaagtcaattatgatcaatttgctgataaatatcagtagaaccataatgccaaaatacagagaatgcctttgtaagatcaaaacttaacgttggtaaacttgttcttaacaggaaaatatcagaaatgtatgggatctttgctcttgcacatggaggagagagaaagtataaaatttctgtatggactttctcctattctcatatgcagctaaaaatagtcattcttaaaaagtcacaactttgacttagggttcttgtcaaccctgacagtaaaggtggcatgccgcagggtttaaatgagtgggtttagatctgtgctttatttcttaagtctcacctccaaagtagtagtatgctactaggtaaacaataaatcccattacttagtgaagtcaaatttgtaaaagctccatttgtttttatttgtctatcggctgtgctttttattctttggtggattttttttaaactctctaaatttttccatttttcatccttgcatttctctggaagtcactcctttacttgaaaatcgatttagtttcattttactctttctatgtttttcttttgactctcttaaacatttcattgttttcagcttcattgtttaatttttttttttttactttacatttttcctcttt

SEQ ID NO: 5744 - DNA, 1043 bp, Homo sapiens
aaaagatatgtgtgcttttgtttctgtaagaattgaggtctttgggtacttggataatcattctgatgtaggtggttctaggtaggtgggttcctttttgttactgcagtcattgtgtgtgaagttctaaggattatgatgaaagtggccccaattttcaggagggaaacctcataatgattgttaaccatcagatgactgcagaaaacactttctacatcttaaaggactagagagcaggtttctaacctgatggttgtgttatacagctgaatttgaaaacactgtcttctgatatgtaaaacattggatatgtcaaaaattaaactttactgaatctgtcctccaaagcatagctgattacacattgcaacagattagtacatcatgattgtcttaagatatgtgttagaataaagctaaacgattattttgagcgcattatgcttagttagaaatagtactcacattagtttattttggttagtatttttataccttaaaattgtttcccacacctgggagagtaaggaagttaggtctgaaatgctttatttgaatcaaagaattggagaaactggtgtgtgggtttttttttttttttttggtaggtttgcaaaaatatgcatgtgcttatttatacatgtgtttgtgtatatcagctgtagagcagaaattgattatagtagtactgaatttctagttttcttttgactatcaaaaaatgattctaaatattctcagccaaatttttttattttttgcagaatcagtgtgcaaggtggtttataagataatggagtgggttttttttgtgtttagtgtgatttgttatcaggagtcttattgtaacgcttaagcattaggttttttgtctgagaaactttaaagagtaaagcagaattgaaagtggaaattttaattttgtaagttcataaaatttaatgataatacaccaaagtttatgtttaaattagggagtttaaggtttcaattctttctctctttttttgggggggtgatgttttacaggcacttaagta

SEQ ID NO: 5745 - DNA, 1033 bp, Homo sapiens
caatattaaaagcttccaaggaaactcagtaaagtaccatgtgactttttgcccctattggcagctagttcttcaatacttggcttactttaaaaaaaataccttgcatcttgccccttttgtccacctaggatagaaatcagctttattcagtgtgatcatatactgagaaacattggcttcctctacataattactggtttgagaaaatacagtcagaagattgcactgggattgaataatttggatgagaagaaagtagttctctattgaatgtagttatagcttagtgctatttatgcagataaaccacatttttgtaacagtagtagcaggtgtatttgattattaaagtgttacaagttattgggttgcaaaattaagcttttagagttatcagttttgtgggtaagttttccatagtattatgtaaagcctgagatggtactctctatcaaccactcttctatagtggatttcatttctaatgttagctcttggagagcaggtactggttgtactatactgtatttattttgaaaaatttggtgattgtaacaaaataggatatggcacctcatcttcttacaaataggctcttattttagtgactatgatccagtttatccccaaatgcaagaagtcagtttttcagttataaatgctttcaatcatttccagcaaaccttgctcagccaattcttttacaggtgaagtaatcccaagaacattctgttgcttattcattcaacaaacctggggcatctactgtgtgccaacatttgtgtgatactcctgggagtcaagatgtgatcctggccttgaagctattcttaaatgctttgactcttgagagctagtggtgttttagccacttactttttctgtacccattttttcttcactttgattttttcatttttctacctgtatgaactccaggtacttgttagcttttcgtttttaaaaatttgcatctttcctgatgtttctttagcttcatttgcaagaaacttgatgtttttctgatcta

SEQ ID NO: 5746 - DNA, 1051 bp, Homo sapiens
agatttaatgattttctttactaataataacctatatgctatgatttgtaacttgcattttacaaagcaagttaaatgtggaacttgtgcgtttgtttaccttaggattaggctttactggcatcacagcatttttcagtaattactagatttcttagcatcttggatttcattgaaaaatgctcgttcagaagtaatgtatgaaaggacttgcagatacaatataaaaagtgagaaatcagggattgtgaaggtttttattcccaaaaaccttgctagttaaaataagacttgctgtaacatagcgtgtatagtttagagttagagattttatccattaggatttattaaaggaaataatgtctattgtaaatttaagataggttatgtgagagtataattaaaatatttttttgtgaaatgagttatttttatatagtctgtgatctgtctgaaaacatacaatcttgtttaaagtaaccaaaagcaaaaaccttaaggtacaatcgttagggtttgttttttggtttttttttttctggagacagagttgcccaggctggagtgcagtggtgtgatcctggctcgctgtaacctctgcctcctgagttcaagcgatccttctgccttaatgtcccaagtagctgggattacaaacatacgccatcatgcccggctaatttttgtatttttagtagaaatagggtttcaccaagttggccaggctggtctcaatctcctgctctcaagtgatccacctgcctcggcctcccaaagtgctaggattacaggcgtgagtcaccgcgcctggcccatagtgaagtttttattttgtcatttagctatatctttggaaaaatttggaaatgtattttcatctccctaactttcaaataaaagttactattaacattttgaaggaattagtagggattatttggtgataatgtctttttttaatataatttagtaacgtttgagtctttcacattgaataatagactggcagttgagcaacatggtcttaccgttgtttagatgactttgaaat

SEQ ID NO: 5747 - DNA, 1058 bp, Homo sapiens
tactatgcagaaatgtttgcattggatttccattggtcaatttagaaaacacaggaaacatactctgtttcaagagaagtggaataagattgaaggagtagcagtcttaatgtttcaactcttcattgttttttttttaattttagaaaacagtgtctgtgatgtaagcatctgtgcatgtaaattgttaaatttgaacactagtaccaagtcatttgtcttacgcttctcataatcacattttaactttttatatttttagagagatggttattatgtattgtttataatttaatggtatttctattttacaatcagtattttggaatgagttcacttagatccttagatccttaagacagtcttaattgaactgttttctagttgtgcaggaagtatttaaaatttttggtgtaacatacttggggttttggtctgtaattcacagaaaatttatatattctaatttgtgtctattaagcatctgttaccttattctgttgtgcagaattgtttggggggtagtgcatcattttgttatgatgctggaaagagtgaagatggaaataagctgggcatttgggatgctataccaggcactagatataactcattgtcaatttgataattacaaaaccaatttttgtggggttgtgtgtgtgtgtgttttgttttttttttttttttttttttttttaagacagtctcactctgtacctaggctggagtgcagtggcacgatctcgatctcacctcattgcaacctccaccccctggcaaaatcagttatttggttatttggggcttgcaaatatattctatgaacagtccttttcaggatttgtatgatgctttataattttcaaagggtttctatattgtttctcatctgactccacagtagctctttgaaataggctgatcagtattattcctgttgtactgatgaaattataaagtatttagcctactgttgttgaaactggaaaggaagtctcttcacataaaattttatctctgccttcaaattatactccaagtataactaattctcacta

SEQ ID NO: 5748 - DNA, 1030 bp, Homo sapiens
caggattgcaccactgcactccagcctgggtgacagagtgagactctgtctcaaaaaaaaaaaaaaaaaaaatggtagtgcaagtttagagtaatggttcccaaattaggctgcttattaggctcccctgagaagcttttaaagttacagcttccttgactccctccccattacccagaatcaaagcaatagttgatggagcctagaaaactgaatttttaggccgggcacagtgggtcatgcacgtaatcccagcattttgggaggccgaggagggcggatcacctaagttcgggagagaccagcctgaccaatgtggagaaaccccatctctactaaaaatacaaaattaggcatggtgcatacctgtaatcccagctacttgggaggctgaggcaggagaattgcttgaacccgtgaggcagaggttgtggtgagctgagatcacgccattacattccaccctgggcaacaagagcgaaactccgtctaaaagaagaaaaagaaaactgaattttaaaataaacactgggttaatttaagtatttataaactgcagatttagggagagtacacagaagggaagaggaactctgaagtggacattaaggaatgtgagttttatcattaacagtctgattattagagtggttatttggcaaattgtgtaatgtgttcttgttttaaagaattctctatcatctagattcacagataggatttgtaagtaattgctattaaatagctaacttaatatcctgtgcaagggcatctaatgcccagcagtagagaagtttctaattggacaggccagtgagatacattgggtagtatctggagccactggtgttactttagataatacctacttaggtactacatttccaccataacacctcgtctctagcattaagctgtcctgagacacttcagtggtaaatttcatttagcttttatctcagttggaaaaatagcctttctccaagttagtagagtatacttaggctgatcttaggtgttaacaaaagat

SEQ ID NO: 5749 - DNA, 1059 bp, Homo sapiens
tttaggcgtgagccaccaccacgcccagcccttgtatgtgtattgtaataatgtttactttttaaaaatcaatacattatttgttacttttcagttttttttcctcttagtatttattcttaggtatatgtgtggtttttgaaaagccatcttctgactttaaaaagcactaattttgtggatgctgcagtgatgtatcgttatggtttttcttctgcctaggctcagaatttatcagaatcaggtggttaaaatcaggcctgttggtcagagtggtagtttatattttggtttgttagcgctgtttcttccttatgacattagatactactcctctttctattgtaattctttcaatatcattaatgttgctgtcagtggaggaatgcaaggaagcatatagagggcttgtgttttgtgtagttttactttagaagacccttaattggttggcctttgggtttttgagaaagcatcatgttaaggaattacaccaaataaaatttaaaactgaaaattttgaatcatatagtcagaactctttgaatattgactggattctaatgtgtatgaggaatttcctttttgggtttggatattatgtatcatttaggattgtatgctggtagagagtattgttaactcgataacaagaattaaaatgagaaaaaaagagtattagaacagtcttgggatctggatgttgtcgtttttattttggtttttagtgttttgacagtgagcaaatccacttggctgctttttttttttttttttttttttgtcttcttgggtaaagaacaaggttgaatttgataatctccaaggtccttttcagaataaatgatttgagacctgtacaggagagcctttcgatttttgtactttaatttctgctttcaaatatttgttctgtgtcctgccagctcatggtaactttccctgcccgaggtagtatttatggcttcatttgtttgtgtggagacgaatggaatattttcccccaatgttcatttaatattttcatcagtatatagagaaggatggaacaggaaaata

SEQ ID NO: 5750 - DNA, 1035 bp, Homo sapiens
ctggtgcactcaagaaattcaaggaatccaaaggtggtgctgtcctgtggtaaagataagttgcaaagagtagaatataatttttgtgcactgtgggctttttacttgatacagttggctggcccttagaggtcaagtattgcttttgatgttattggaatgttggaaaatatcagaaaatcctagaatgacgaatacgggtagttcatttggtgcaaatcaacccagctcaatttgttaatataacaaatagaatgtgtaaaataaagctttggaggtgggtgtaatattttccatgagacacttaacgtagtacgtaaatatatcaggcagcctagtgtgtcaagtactgtgggtatggtagacaacagattagttaaatctctgctctcgagaaacctgatgtgtgtgtgtgtgtgtgtgtgtgtgtgtaagtctgatgttctcttgggtgcgatagtatatgagttggtgatagtgctgtcttgtagaaaaataaagctaggtaaaggaggaagtagtaagatatgcttgggaagtaggagttgcttttttatgtaacaatgaggaagctaagcctgtggctttgggagtgagggaagtgtgttctaggcagagaacagtaaatgtccaggccttatggtgagagtgtttgtttaaacaagttagctaccagtgtgtttctggtgggaaagtaatgcaagatgagttcagggaaggagtaacgagttgacctaagaaggaaacggaggcaaaattaatatagagatttcctttggaccaaggttgagcactgcagccccaaaaacactgggaggtgttctgtttagcatttgtgacaagcaagtttgtaaagacaaggaaacaaggagtgggctgatacaaggatgtttgatggcagttcccactggtttacagaaataacactgattattgttatcgttaatgataagggataagttaaggtgtccagcatatcattgttaggttaatttacggctacttggtgtcagtctagaacccacatagcaagaa

SEQ ID NO: 5751 - DNA, 1051 bp, Homo sapiens
tggctaatttttatatttttagtagagacggggtttcaccatgttagccaggctggtctcgaactctgacctcaagtaatccgcccacctcagcctcccaaagtgttgggattacaggcatcagccaccaggcccagccaattttctagtagattttctatgtgtttttttccagtttcttaagagcagtgacaatatttgaaaatttgttgcaaatataatgattgatcattttacaaccatgattttttggtctgatatagtgattgatctggtattttacaacatgatttttggtctggtatgtattgtctttgcacataggagatgctgaatgatatggtgatttagtaagtgttattaatgtttctgaatttgaatatattttcagaacatatttttatgagataagaaaggtagtaaacattaataaagctgaaaacatttaggcatttcattctgtgcttatttgaagaggttaaactaattacattatggctatactgtaaccaaatatcagatgttgtataaattgtagtgcattaatgacagtgatagaatgaaaataacaaagttagcattagggcaaaacctctagcctgtggttgtcttcccagtttgtggctttgggctttttttttctttaatgctgtttttcaaactgtgaaaaatgtattttttactaccttctgcaaagattttcttgaaaaataaataacggtgaaatctgtaacaattactagtgtgcagcgggtgatcaaaaattttattttcttttgtgttttatgtttgagtaaaactctttggagttaggtacaaagaactatattactctttcagcatgactcttttattcaattttattttttgtagagatagggtttcaccatgttggccagggtggtctcgaactcctgacctcaagtgatctgcctgccttggcctcccaaagtgctgggattacaggtgtgagtcaccgcatgtggccgagcattttagcattactcttttcaagtaatttgattcttttccttctagttgggaagattag

SEQ ID NO: 5752 - DNA, 1087 bp, Homo sapiens
accaccccacccagctctgcttaatgttctagtgacagttaaaagcagaataatcttcacttattgtcatcaattatcaaataatattattataaattgttactgtttttatctgttgtcttctcattacatttttctgtaggttattatggaaatacctgaatttttaaaaggaatttgctagatgctaatttttaaatgtaccaaattagcttttcattttgctcataaaataacacaagcagctctttctgtacaacctgcactttaattttggtcagtacatactgtataacaaatacacttcttgtttaatgtatttaaggtaatttattttgagcctgtcaaactcttgagctagtatgtttttacaggtaattttgctgccactctgtattttcgagatgtttaaaaatattagagtgtgcagaaagcaggagcacaatctagaatctgacatttataccaaagtttcatacttatagtactgccattgtgttaaaaaaaaattagagtaaaatatagtactgaaggctacttactctgccttagacgacgtaggagacttgaatcttaaaaagcacttcagttttgtttgatgcctaataaagcttggaaagtcagacaaagctccagggaagaatactttctgtcttactcttttggtgtcttataccagctttggcatataataaatgttcaataaattaaatgtttgttaagtgagtattgtgtgtgcacgtgtgtgtgtgcatatgctgggagtagggtggggcaagtgttgactgtttttataaaaaaatagaaaaagtgtgaggaatatattttgagtaaatatttactgtataatgtcagtccttggacacaaaacaaattaagttgtcaaaataagcacatggtaatcagagtggctattgatctcagacagtaagcaggtgagtttagctggatttggtgtacactgtcagtcctcaaagtacagctactccatttgtgaatgtatgttgatttttcttatgattgtctgtattctgtagtttcctctcccccagtgtattcgagaatgtcttcctattgcttttactca

SEQ ID NO: 5753 - DNA, 1024 bp, Homo sapiens
tagaaccatcctgggaatgcctattaaaaattcaggtattaagccaggcatggtggctcttgccttcagtcccagcactttgggagaccaaggcaggtggatggatcacttgaggacaagagttcgaaaatagcctggccaacaaagtgaacgtctctactaaaaatacaaaaattagtgggacatggtagcgtatatctgtagtgccagctacttgggaggctgaggcacaaggatctcttgagcccgggaggcagaggttgcagtgagtcaagatcgtgccactgcattccagcttgggtaactgagagatcctgtctcaaaacaaaacaaaacaaaaaaatttaaaaattactgtgaattagaatctctgagaaagacaactttgagatctacaatttttaatatactaaagattcagatccactactgagctttattcagtcctatttttgcttttgtctgaaagcaatatgagatggtagatgtctttgaattatttcatttagtatacagatatacctgttccttccttagtgtcttaaagagaataaagacactaagacttctaagtctgtggatctggtaataaattctggcggttgtcagggtctgaataaggacataaatgccataatattttgctcctgagtagactgaaaactgttgttccacctttttgaaagctggttgcctttcccactgccatttaatcatatagagttgtatgtcctccctctgctttccctactcctaatatcctggttcccttttgtaaatggaagggcattgtaattgcttaatgtccatttctcgctgagtcaggtatgttttgatgaattttttttggaccattttctgattattttcctaggccctcactctttgaaactataggttgtgtccttctcacccttaaattttagcttctgaagtttcagaagatgccaaatagggattattctgtcaaaaatactgaagattttgtcagggaaaatgtcattctcttgtaccgacccttgga

SEQ ID NO: 5754 - DNA, 1032 bp, Homo sapiens
taaagcggagtgaatttctggatcttaacctcatgagagaggtcaatagacctcatttgtaatataccttatgtttgtagaatacctgtcaggtctttcagcaaacttttaatgtggcactttcatttcatagatttaagcatagaacatactgttcaagaatgtgtgcaaataaatgtctgagtggggtatctaacccaggctttttaatggattactctgggatttatttcagtcagtaagattaggtttttttccattactgtcgacaaacttaaggaaattttcatggaaatcccactctgcgagtagtgcatatatattctagtagtccatattactagttctacttcttatattcagttgtaaatctgatttttaaaaaatctttggagttatatctgaaaagtagaaatttcagcatagatctcatgtttttctttaaaacttgaagtattaattttcctttgttactaagcattttgggatcctaaaaccatttgtgaggtttggtgattctctaagactctcaggactcaacatagtcattatcatgactgtgacttactacagtggacaggtgcaaagagaaaaggcacatggggcaaaatctgaaggaatccaggtgtaagcttctaagaattcttgcctaagagtcatacaggatgcacttaattcctccagcaacaaattgtgacacacttgtggaatgttgtctaccagggaagctcactagagatttagtgtgcacggcttttactggatttggtgagttatataggtactctttgccttgcatgtaccaaaatttcagactccagtaggaaagcaggtgttcagtacaaaccatattatatacccaaacagcttaggtacaatgagcgattcttttttttttttttttttttttttttttttttaagacgggttctcattatatcacccaggctggtctcgaactcctggactcaagggattcccctgcctctacctcctcagtagtcgggactagtgcaagccactgtgcctggc

SEQ ID NO: 5755 - DNA, 1025 bp, Homo sapiens
gcccatctacactttttagttgcggtggttggttgccccttcgtgttttccatagtttgtctttacttttaaaaacaaaaaacctggctgggtgcagtggctcatgcctgtaatcccagaactttgggaggccaagacgggaggatcacttgagcccaggagtttgaggccagccctggcaacatagtgagaccctgcctctacaaaaagttagctgtgagtggtagcatgcacttgtagtcctagctactaagaggctgaggtgggaggatggcttgagcctaagaggccaaagctgcagtgagccatcatggtgccactacactctagcctgagcaacagagcaagatgctatctcaaaaaaaaaaaaaaaaaaaaaaaatctaggatagataggcagctgtccacaaaggacttttgaatagtcagtatagttaataaaatacctacatttatgcatctttaattttgatggaaattttaatagtttaataaggccgtaatgtttctttcacatgtagaattaaaattgctgagctttggttatggcgttagtggtataacaattggtataattttgccattagtgagacatgttagtgttctgtttgctacgttccatctcacacaccagttaaattatgaccatgttcactccttttgttttctgtataccatttgttaggcatttggccagagctgtttagtatggaaactcatgcccttaatgtaatttttatatgtttatctttttttttatttttagagaacagagacaaaaagaagcaaacaagatggcagtcaacagcttcccaaaagatagggattacagaagagaggtgatgcaagcaacagccactagtgggtttgccagtggaagtaagtattaattttttttctttgaaatgtatgtttgacttattcgtatttatttttcaaatctgtatccattgccatctacatatgtaaattaaaataaatagaaacatacggagattcttttatgttggatttattataccctc

SEQ ID NO: 5756 - DNA, 1046 bp, Homo sapiens
ggatgaatgaatatatgtagaagtccagcttaaccatgtaaaacaacacggttcataaatgggcaaaggactcgaataaacatttctgcaaagaagatatcctggtggccagtaagcacatgaaaagatggtcagcctccttagtcattagggaaatgcaattcaaaagccataatgaaataccacttaatacccattaggatgactattataattaaaaaatggaaataggtgttttggagggtatgaaaaaattgaaacccttgtacattgttggtaggaatgtaaaatgatgcagctactctggaatacagttcggcagttcttcagaaagttaaacagaattatgtgtaggatctggcaattccatttctagatacatacccaaaagaaaggcagagactcaaaacatgcttacatgcgggtgttcctagtaattcacaacagacaaacattagatagaaacaatcaagtgttcattagcagatgaaaggatacgacgtgatacatagactaacaatacaatattcagccttcaaagggagtgaaattctgatacatgctacaacatggatgaaccttgagaatattacatgaaataagccaggagcaggacacatattttatgattccacatatactagggtacccagaatggtcaaattcatacagacagaaactggaatagtagttaccagggactgtttggtggtgtccggggtgggagtgggtgttaagtttctgtttgggaagatgaaaatgttctggagacgtatagtggtgatagttgcacagaaatgtggatgtacttaaagacactgcattatacttgtaaaatggttaaaatagtaagtttgatgctgcgtatactttaccagggtaaaaacaatgcaagagaaagattgccagtgcatgctgaaaattaagattactaggaggatatttttcactcttgagactaatgacaacaattgaatgttgggaagcacagtatgtgggagtgtgtaagtgggtcttgctagtaggggatgtcactttagcaaaat

SEQ ID NO: 5757 - DNA, 1121 bp, Homo sapiens
agtttcttaaaacaaattaattttccccattaggttcaccagcatttttgtgtattgaagggaaaaggattattctctaatcctagtataaaattgtactcagaaatttaatgttttattttgtgtatgttaatgtttatattttatgttttcttcatttctttaattacaggcatcaagattacgcgaagaagcgcataacatgggaactattcacatgtccgaaatttgtactgaattaaaaaatttaagatctttagtccgagtatgtgaaattcaagcaactttgcgagagcaaaggtaagtctttcactgaaatatatttttatgtttctcaggattatgattcttaaatcgaactaaagaatgtaaatcacattttatttatgaaatgtaaagttctcttcgatacattgatcacattctatcactgcattttcataagttaatatttctcgtgaaggataaagcctgtcgattttctcttaacccatgatgaatgcttcattagacttttctcataactccataagctgcaataatatattactgaaaaaatgaaatattgaccacaactaattataaatgtcctctcttgctgagggtgtttccattgaaatttcagattatttgtccttgcatcatcaatagatcccttgaaaagtatagaaagaatttgtctagcaagtttagtgtatctgctgtcttagtatttttcacctgaactcttgtcttgtatttcttaatctagtgtttcactcaagtagaatatctaggtcacaataataatagcataggtattattttttaatgcctattacagaattgaggacaaacttggcaatggctttatgtcctgtctgtgcaagtcacagagttacaggtcgattgaatcttgtcaagaaaccataaatatttagtaaataccaaatggagtttatagtacaacttgaaaaagtaagtttatttacagttactaaaatatctggaggtactctctgagtaacaacttgggttcttatagtcagattgctctgaaagtagttctaacaaacttcattttggcttgttacatcattcgacttttgggaaattattcattattgcatcttaggaaaaca

SEQ ID NO: 5758 - DNA, 1025 bp, Homo sapiens
tgtttccacacttgcacctgatcaagagcagtgcttctccatttgttttgcagagaaatgtttttcatttcccgtgtgtttccatttccttctgaaattctgattttatccatttttttaaggctcctctttatctcctttcttaaggcactgttgctatggcacttttctataaccttttcattcctgtgtacagtagcttaaaattgcagtgattgagcataacctacttgtttgtataaattattgaaatccatttgcaccctgttaagaatggacttaaaagtactgctggacaggcatgtgtgctcaaagtacattgattgctcaaatataaggaaatggcccaatgaacgtggttgtgggaggggaaagaggaaacagagctagtcagatgtgaattgtatctgttgtaataaacatgttaaaacaaacaaaaattgttatttttcttttccttcggtcagtgcacattagcatttgaactacctggggattctttatcagaactgttcttgttgaatatttatacttaattgaaataattccttaagggaggttttgtttaaaacgtattaacaggaaattgtgtatgagatatttaatgaaataagaaattcaacaagaatgattaagtcacttcccaagtggttgtcatttgttaaaccctggtttacctgtcttgctattatgacatttcatttggaaggatgtttgtgttgtagctaactgttcaagtctggtgctgactgctgttcttagccatcacaaaacgctaaatttgtgtaattggagcttcctgctgttatctggaaatagcaggaaagcgcagctttgtatattgtttcctaaagtatattaaaataaaaaaagaaactattgctactataaaattaccttgactttttttttcctttgctgaaatattagtcacatagccttagcttcacactgccagtaatgtatcaaatcacaagggtttccgcatgaaaaaaatcttttcttcccccacaaaaaaaccttta

SEQ ID NO: 5759 - DNA, 1076 bp, Homo sapiens
caaaggtgggtgccgggggcgcacggggcccggggtcccgtcctcgccgcggggctttggagccggctgcagaggctttgttagcggcaggcgaggctccctcctgcgccggagccgcaggtcgcgacaagttgctgtgttcttagaagtcgcggcggtggcctggcgcgtggatgcggactccgatctaagggcaggcgctgatcagagggtcctcctggctctgcctgcggggagcggcgcgtttgcagcccagcggggagcggggccggagtctcggcctcgacgccgccgcttccgcaccctgggggctcgggcggccgggaggaatcgcagatcctggcctgtagctgccgcgtgccctcagcgtgtctgtgtgagtgcctcagggtgtatttctgtgagtgtgtctctgagtctcagtatccctaaatgcatttttgtgtctctgagtgtcgttgtgtttctgaaagtgtgtctgaacctctgtatcactcagcgtatctctgtgtctctttgaatgtatctctgaatgcatttctgtgtctctttctgagtctttgtgtctctgaatgtgtgagtctctgtatctctgatcttgagtgtgtctttctgaatgcatttctgtgtctgtctctaagtgtctttgtatctctgaatgtgcatctgagtctctgtgtgagtgtgtctctgcgtacatctctctgtgtgcgagcgagtgtgtgggtctccctgagagtttaggtgtccgaggtgtgcagaagtgtgtgttgtgttgcttttcagcagccgggaggagtaggctctgtcagcgtctcactgccactcacctcatattttacaaacaggaccaaaaaaaaaaaaaaggcagcgggtcagtttcttctttcctctgcaggctttcaccttttagaaagaaataacccgaactgtctccgaatttcaaggttctcctcacctccctgctgtgaaatctacctactgttctgtgaacagataatttttttaagtaggaagcagtttagtctttgcagccccctacttctctttaattgctatgtagcaggcatgaggtt

SEQ ID NO: 5760 - DNA, 1068 bp, Homo sapiens
gatcaaatatttatactgacaaaatcaaaaagcctaacatttttatgttgtatggtcatgtaggattaaaatgaataaataatgtgttataccttatggtaggagaaattatactcattactatttccttcaaaaagcaaaagtttttttaaaatgactctaaactcctcagaaacctgctattgggattactacattgccaaaatgacgtttaactggattgaaacttacgcactggctgcaggaagggcttctccaggctctgtagactggagccctcagcttggatgatctaaaagttcatgcctttgaatttgggatttagcagttgcctaaatagttgctttatctggtctctggagcagagtttgaggtggtttctcattgttttcaggtgaaattcgatgctactgtgatgctgcccactgtgtagccactggttatatgtgtaaatctgagctcagcgcctgcttctctagacttcttgatcctcagaactcaaattccccactcacccatggctgcctggactctcttgcaagcacgacagacatctgccaagccaaacaggcccgaaaccactctggcaccaccatacccacattggaatgctgtcatgaagacatgtgcaattacagagggctgcacgatgttctctctcctcccaggggtgaggcctcaggtaggtggaagccgtttctaaccagaatgcctgcctgatctatagacttgtgacagccacgactttgtatgtctgctattgattttgttgttaatgtaattagagacaccagagggagaagcctggctggatgcaaagatgcatcttgattgagtggcttttatgtctgagcattagatgtctgtctacataataggttttgcctgttttttcaacattttgaagacattaaaaggccattacatctcagtaatgacagtctgtaaacaaatgcgtttgtaagcttcttcagatagttttgcaatgttttctaaatatcgttgatttaattgtaagcttctttttaatggaattcttggttaaaatgaattgatgattatgaatat

SEQ ID NO: 5761 - DNA, 1033 bp, Homo sapiens
ttttattttgcaatatacaacagttatttgagtacttactgtataccaggcactgttactaagaggtgggggtataatagtgaataacataaacttggtctctgtcatcatggacctaacagtaaagtacattaattgtgtatgttcagcatttgctacagtgtttgacatgtattctgatctttacatatgtattcatattagttattaaggactgttaggagcaatgatacttaaatgccttttaaagataaaatttagatggcctgaaagtggttagtcacactaacttatgaaaatatatgagaagatagagataagtattttggtgtcatgtgtttagaccatagacaacaacgtaaaggaatgaaaagaccgcttggaatagttgaaaggtagctgagctgagtcagagctagataatagtcttggctttgccttgaattaggtgtaatcttgacttactaacttcatctgtaaattgggaggttttggggagagagaatacttttttttccctgagctttaaaatttaaatcataaaattttaaatttgatgatctgatgagagtatagtaaagatgatcctagcagtattattagggaaagcaaatagtttatcttaactgcctttatttgtttacatttattgtatgtctattttttcagactcatatatctgtaaaaatagcaaaaataattcttgtatatcctactaaattactccatccaaatgttaatatttgtcacatttgctttatcattctctctatgtatacacacacagtattcttttaaaaaaatgcatttttttctggttttttaaaatgaattatttgagagtggattgcagacatgatgtctttaaaatgtctacatactttgtatatttcttaaatcaacatagatacaactctattgtctatacacagattttatcagttatcccattaatgtcctacatagcaaaagacaaataatcgttttgggttcaggatcatacattgaatttggttatttctcttcagtctct

SEQ ID NO: 5762 - DNA, 1600 bp, Homo sapiens
tttgtctttttgtgactggctcatttcactaggcataatgttttcaaggttcatccttgtagcatgtatcagacttcattcctttttatggctgaataatactgagtcctccaactctgttcgtctttttcaagattattttggtcatctgagactccttgcaattccatttgaatttaaggattggcttctctatttctggggggaaaaatggttgtcagaattttgatggggattgtgttgaatctgtagattgttttgaataggactggcattttagcaatattgagtctgccgacccaggaactaaggatctttccatttacctaggtctttttaagtttcttttaccaatgtttggtagtattcagcatgcaggtctttcacttccttggttaaatttattcctaagcattttatttgtttagcgctatttaaatggaatagccttcttaatttcctttttagattgttcattgtacatgtacagaaaaacaactaatttttgtgtgttggtcttgtatcctgaagctgtgctgaatttattaactctagtagtttccttctggattcacatgtatgtacttctagctactcgggaagctggggcagaaggatcagttgatccaaggagtttgaggccagcctggaaaacacagcaagacacctacaggtgtgtgcccccacatctggctaatttttgtatttttagtagagatggggtttcaccagtttgcccaagctggtctcgaactcctaggctcaagcactctacctgcctcagcctgccaaaatgctggaattacaggcatgaaccaccgtgcccagtctaaaactgtgatatcttgttctcattaatagctgtagaaattataacttttggctgggtgcggtggctcactcctataatcccagcacttagggaggtcgaggtgggcagatcacctgaggtcaggagttcgaaaccagcctggccaacatggtgaaaccctgtctctgctaaaaatacaaaaaaccaggtgtggtggtacacacctgtaatcccagctactcaggaggctgaggtgcgagaatcacttgaacctggcaggtggaggttgcagtgagttgagatcgcaccactgcactccagcctgagcgacagagcaagactgtctcaaaaaaaaaaaaaaaagaaaaaagaaaagaaaaaaaaattataactttttgtaaatttttattaggttggtgtcttctactatttcagttgcataaatatcatttgaggtgggcttagtctttgaaggctctttccagcaggtgtctctttcaccaggcttatttataagcctttattttttttttttttacagtaaaagaaagtctataatatatcaactgtgccaagggaagacaacagtaaacttacaagtctctttccagcaatctaaattagtaattcaacaggacaaaataaagacatttttagacaagagctttatctctctgtgctgcctcctggttaatttccttggttttatctttcagtgtattaattctttccagccgtattcagtctgctgctcagtatgaccaacgggccttagattctctgtgtgtg

SEQ ID NO: 5763 - DNA, 1574 bp, Homo sapiens
ctgtactgtccagtcaactgacttcagcaaagatgtctgggttcagcagcgagttgctgtgtgaggccaccagaatggaggtgatatcggcctcagtgctcatcctggaggtggagaagtggtcagagtcctctgtggtgaaatggccctacaccaaagtgggagacattcagaatcgaggcgaaattggcctcagtgctcctcttggaggcagagaagcagtaggagtcggtggtgaaatggccctgtgtgaatgtggaagaccagcagattggaggtggaattggcctcagtgcttgtcctggaggtggagaagcggtcagagtccttggtggtgaagtggccctgcacaaaacgttgctcccccttggccggtgaaagaataaaagaaagctggccacttgcatttccgtttcagtttatagaatacatgttttggaaatagtatcttctagatctgtctttttctcttctgatttaacttagtaaagctaagttttatctcttcatagtcttgcttttgtttcaaaagcttttatgagatttgtttactgtctgtggctatatggcagacaatttgttcaagtggcatgcctcctctttctcacattgacctcctcaggaggagtttttcaagggcaatgagtcttctctctgagataagaatagtagccagaattaagagggtaaagtgcattgtggaattaagtactgattccagtggaaactcactttatggccttagacaaatatttacccttctgatcctcagttttctgtcaaagaacttctgctcatatccaattcctataaagtgggagtactctaacctgatattaccaacattaggttagattttatcctaatgttaggtattagaatatatcctaacattactagttcttcactcttactaaagtgcatgttagatttcttcaatgatttttttaaattggcatggttgatacaaagcatccttctatccaaatactgtgctcagtcgcctaagtgatagtttagaaccatactatctctctgtggaaagaatgctggggctcctggctacacactttgagtagaagggaaaatacccctcttgtatttatgatgttttttctttctacttgattaagaagaaagtacaaaaaggtgcttattgaagcattgtcaatttgggaacaagattctcaggaatgaaatatttgtgactgttctcagcatgaaaggtagagagaagattacttgatcattatgtgcttatttgaaagtcactttcctcccatgcctcaacatctcactttttagaatgcacactgaatgcctggaatctctttgttttagaaaagacaaagttgcattgttttttttttttttttttttttttttttaattttttttttttttttattatactctaagttttagggtacatatgcacattgtgcaggttagttacatatgtatacatgtgccatgctggtgcgctgcacccactaacgtgtcatctagcattaggtatatctcccaatgctatccctcccccctcccccgaccccaccacagtccccagagtg

SEQ ID NO: 5764 - DNA, 1063 bp, Homo sapiens
atgatggtttccaatttcatccatgtccctacaaaggacatgaactcatcattttttatggctgcatagtattccatggtgtatatgtgccacattttcttaatccagtctatcattgttggacatttgggttggttccaagtctttgctattgtgaatagtgccgcaataaacatacgtgtgcatgtgtctttatagcagcatgatttatagtcctttgggtatattgaaaactggcacaagacagggatgcattgttaaaaaaataatatttctggggaaaaggctcagtgctcaacggttactctataaagagatttaaaaagaaagtcaagggaagataaggaaggtagcatggctaacaacctcgtgggttctactagcattatttcatgcaaaatgtcattaacctttatataggagagaataagtctgggaatcaactggcatctaaactccatttcttgttttgtcactgcttccctggttgactatggaaaatacatttggtcttttgataccttggtttcaacaactataacatgacttaagaacttttatgcatggactttgtaatagttatctatttctgcatacaaattacttcaaaacttaaatcgtcgtttgaaacaacaaacactatctcacagtttctgtgggtcaggagtccagacatggcttattgggtaaccgcctcaaagtcttactaggctgtaatacagttattggctagagctgctgtttcatctgaaggttcaattgagagaggatccacttctaagctcactcacatggttgctggcacaattcaattcctctcaggctattggattaagggtctcagttccctactgactgttggtcagtgaactttcctcagttctttgccatatggggatccatagaacagctcactacatggcaactggcttctatcaaagtgagcaataaggaagtaagcaagagaggtttgcaagacaaaagctactatctctttataatctaatctcagaagtagcatcatatcccttctgccatattctgttcattagaagtaaatctc

SEQ ID NO: 5765 - DNA, 1049 bp, Homo sapiens
ttggtcccagacatggtgtctttcaaagctccccagatgattctaatgtgtagccagatttgtggaccctcaggtttaatgatcttcaagaatcctctatctaaggttctaagcttgtccgaatggacttgtagagctataagcacgtgtaccaccttctcaggaaggtggccgctccaatgctctctgactctaaagaatgaaatgattattcccacccgaacatccatcttctctgggtttaccgtcccctacttacagtccgtaaaaaggtcaccctagacttgacctcagtctcattgtgacacacacagcacgccagcgttcttaacctttttggttacagagacccttttagaaacttcatgaaaattgtaagtcatctcataaggaggatcttacatgcacatcaaattgagcatacaattttcatggatccctaaactcttgatacaaagttaattctatctcactataatataaaagtcaaaaacttacataacccagaaaagcagaatttgcaacatagtagaaatagaccagagtgaaagttctaatcctggttccacaactcaccagtcaacatttaggagtcactgaatcacttgatgcctcagtttactcatatgcccaattaagaattataaaatcatgcaccacataatgtcttggtcaagtacagatcacatatgacgatggtttcataagataatactgtgtttttactgtacctttgtcactgtgtttagatacacaaatacttacattatgttactattgcctatggtattgagtatagtaacctgctgtacagatctatagcctaggagcaataggctataccatacagcataggtgtgtcacaggctctcccaccttggtttgtgtaagtacactctgtgatgtttgcacacaacgaaatcgcctgatgacacaatgctcagaatgtgtctccatcattaagagatacatgactacctaccccatcaatcttgcctattccagaaacaaagtgaaattaataatataaaattggtttgatcaattta

SEQ ID NO: 5766 - DNA, 1782 bp, Homo sapiens
ccattgtatttccctccctgcttgaatcagttttgttgctggtgcccattcttcagtagcttctttgcaaatgtcagtgaggcagaaactcttgttttatttaaatgtctggatatgtgtttaattatcttttttcttcaatggtagtttattatgtgtagaagtttaggttcagagttctttactttgggtacattgaagatatttccccatgatcctttagcattcatttttgcttatttttatgagtgctctgctacccacatgatagccatttctttacagttaatctgtcatttaaattttgaaattttgaaattttgtggatacataataggtgtatatatttatggagtacatgagatattttcatagaggcatataatgtataataattatatgagggtgaatgggttatccatcacctcaagcatttatcctttctttgtgttacaaacaatccaattatgctcttttattttaaaatgtataataaattgactgtaggcaccctgttttgctgtcaaatactagatcttatttactctacgtaactatatttttgtacccattaaccatccccattcccaccccccacccctactaccctttctagcctctggtaatcataattctaccctctatctctatgagttcaattgttttaacttttagctctcacaaatatgtgagaacgtgaagtttctctttctgtgcctggcttatttcacttaacataaaatgtcctccagttccatccatgttgttgcaaatgacaggatctcattcttttttatggccaaatagtactccattttgtatatgcactgcattttctttatccattcatctgttgatggagacttaggttaattccaagtcttggctattgtgagtagtgcttcaataaacatgcaagtgcatatatttcttcaatatatcaatttcttttcttttgtgtatatacccagcagtggaatttctgaatcatatggtaactctatttttagttttttgaggaacttccaactgctctgcatagtactaatttacattcccaccaacagtgtacaaggattcccttttctccacagccttgccagcatttcttattgcctgtcttttggatgtatgccattttaactaaggtgagatgatatatcagtgtacttttgatttacatttctctgatgattggtgatattgagaacctttttataaacctgtttgccatttgtatgtcttcttttgaggaatgtctcttgagatcttttgctgattttctaatcagattattagatttttctgattaagttgattgagctcctcatatatattcttgttattagtcccttgtaagatggatagtttgcaaatatttgctcccattttttgggttgcctcttctgtttccattgccatgcagaagctttttaacttgatgtgatcccatctgtccatttttgctttggttgcttgtgattagggggtatcactcaagaaatctttgctcagtccaatgccctggagagtttccccaaagttttcttttagtggtttcatagtttgaggtcttagatttatgtctttaatccattttgatttgatttttgaatctggcaagagatgggggtttagtttcctttttctgcatatggatatccagttttccaagcagtatttattgaagaaactgtcctttccccagtgtatgttcttggcacctttgtgaaaaatgagttcaatgtagatgtatggatttgtttccgggttctttattct

SEQ ID NO: 5767 - DNA, 1427 bp, Homo sapiens
tgttgttggcatatagaaatgctactgcttttgtatgtcgatgttgtatcctgaaactttactgaatttgtttttcagttctgatagttttttggtggagtttttaggtttttccaaatataacattatatcatctacaaagataatttgacttcctcctttccaatttggatgtcctttatttatttctcttgtctgattgctctacctaggagttccagtaatctgtcgttttttaaatgaaggctttacgatttttctctgtgttctggatactctgatgtttcactgtgacctttccatttttaatttttaactaatgtattaagttgagcctacaagttcaaggctgcagtgagctatgattgcactacttgcattccagcctggaaaacagagcaagactctgtctcttaaaaaaaagaaaaacgaaaagtagttgtctgtggttccctaaaaatagcttcaaaacgcttggagttttctgtgtgatgggaatggttttgttttactgattagatgactcactgtgggccattagatagctttaggatgggaactgccctccaaaaagaccaggaataggattagagggttagaactttcagccacttgccctctagggcgggaaagtttggagattgagttcagttatgtgaccaatgatttaatcaatcatgcctaagtaataaaactccaataaaaactctgctcatggagacttgggggagcttcctggccggagaatacatcaatgtgccgagagcgtgtcatagcctgactgtattgggagaagctcttgtcctggactctcccagactttgccctatgtgtatcctttaaaataaaactgtaataataagtatagcattttcttgagttctttgagtcattctagtaagttatcaaacctgaggagatagtgagaaccctgaatttgtagccagtttgtcagaaatgtcaggggctggggaccctacttgtaactgaattttaaaacctgtagagtttgatgctaagtctgggtggtttgtgtcagaattgaattctagttcacacctgtcttagtccattttgtgctattataaaaataccacagactgagcaatttatagtgagcacagatttattggttcatgggtctggtggctgggaagtccaagattatataccttgcacataaactgttttttcaatagtttcacattcaggatgcctaattacttttaaattatacaacatttcttgcataaattcccttttataactttttttcacgacttttacagacaattctttggcatgcctcagctttcttacttgttgcaaacatccctttctttaaacaaccagttaatttattttaggataaggatttaccatataacattcctttttacataaattctcccccccccccctttttt

SEQ ID NO: 5768 - DNA, 1119 bp, Homo sapiens
ttgtgaattactgttgacattttttaacatcagagtgaaatagatttttttttacctaaaactgaggaggttacataaaagagtttaaatggtttattcctgttgattgggatctgttattccttctttacttctctactttttccccctttttatttttaacaaagaaagtttcacaacattggaggctttattttggtctattttttatcttggtttgctaaatgtactttcttttgactattcagtagaaatacctgtcttgagtctaaaacctgttgatgtaaaaaacaaacaaacaaaccccagactgtaaaatattttaaagaggtttattctatactaatatgagtggctgtggcccagggaacagtcttgagagcttctgagaaagcgtgcctaggcagttgggttacagtttggttttatacattttagggagataggaattgcaggtaaaatactaaattaatatatggaaagtctatattcgttcagcctaaaaaggtgggatatcttgaagtgggcagtgaggtgggggtgaggtggggtgggattacaggtcctaggtggattcaaagattttctggttggcaattggttgaaaaagttaagctttgtctaaagatttgaagtcagtagaaaaaaatgcttgagttaagataaggtgacttatggagaccaaagatcttgttttgaagatgaagtctcataggtagcagccttcagagagaatgcatggtaaatgtctttttttcagatcttaaaatatatcagactcttagttaatctctcctagatccaggaaaggcttggaaagggaaggcctggctgcattcatagagattctctacagatgcaaatttcccccacaaaagacagctttgtgagcaatttcaaaatatgtcaaataaatatattttggggtaaaatactttgatttctctcgcggtctgccatgtatcatgcaatgctataccagagtcaggtgggaatttggtatcttattgccacaaagagtctgttttttcagtcttgtgatctctatttaatgttgatgctggttggttctgcctaaactccaaaatggaggggacataatcaggtatgtccaaactc

SEQ ID NO: 5769 - DNA, 1028 bp, Homo sapiens
ggaaattaggtagctattgggaaggaaaatggatatactgtcacccacagcaataacatacgtgtctttccccaaaaggaaggtagtcattgaatatgtagttgcaatcaaatcctggcatgtgcaatgtggcataagaacttttgcgagcacccatatacaacccatgaagggtaattgtggtcccactaagcttgatttccatgagcttggattgcaacttttccttgtccacacttttcctactcaaggctgctggccgagcagtgaattgcttggcatccctcctgttcgccattcaactggcagcattggcagttgtgttgtactttggcagttttctttctatcccatcttcaagcttggcttcttacaagtcatgatgattttacaagcatttattaacctagatcttaatgtcggtggccactgtgaatgtcccagagaagtaagggatgttctgcagtcacagataaatctatcagaacagaaaaaatggatccatctgttccaagtagaatccatgtcacatcaaaaggagaacaagtgagccacactagagggcaaagtgtcttccacttctcaatgaccaaaggacacacgatctgagagccaatgtctatgagatgcaccattagtaagaaagaaaaaacactgccaagctatgagacaatatttttgtattatgcaggaattttctcttatgcatattgaaaaagatgttttggtcttatttcgacataggttttataatagattgcttttacgcacatactaaaagggaaacataagaaaaattgcagacaactttggattcacaccgtgactctgctgaatcacttaaaaaatttttttttaaatttcaataggtttttggggaacaggtggtggttggttatttgaataagttctttagtggtgatttctgagattttggagcacccatcccccaagcagtgtacactgtacccagtgtatagtcttttattcctcaacccctcccaccctttcccctaagtccccaaagt

SEQ ID NO: 5770 - DNA, 1035 bp, Homo sapiens
ggattttgctgctaagccttctgtaaaatattttaatttcctttctggaatatgtctgaaggtaggatattaaaaggagtatcaggtaatgtaactgacaggggtaaaccaattgagtaaggtttggccaaagcatcaaaccttgtgtggtaacttaatgatgttagtcatccgtaaaggagtgacattagaattgcttgaattagtttttaccatttataatttcatgctttgttgcattttaaaaaatctgtctttttctttttctgctttcttctatgtggttttcttcttgttctaccttttttttttttgagagagagatgtactctactaatgaccacatgctgattaattctctttagatggaatagaaggtacatatccttctgtcatcagcaccatttccccttgctgtcattggaaaccaccagtagaggatgctaacaaaaatgattattggtgtggtagcatcataagtctctctatcgactgtgctgattgggaccttcagtataattctgagtcttattgttacttaaaactagccttggttaaattaggcataagcattttctagtttgccgaaactagaaagaagcaggactgttttaacttgaataattttataaatttgagttatttaagtctctaattgagattgctgttaattcattcttgttttagagcagttgtattactccttattttaaaaagattttgttttatgttcttaggtttggagaagaatatgtaataattgacccatatttatgttgcatatttagaatactttttaatcacccctttttaaaattcatagtaagatcccttaaaatatatattttagatgttaaaatacatctaaaatggtcaaagtttaagagtagcaaggaaaattacaattgattgataatactgtgtaattatttttatataacttatgtagacttagactatggatgggttggcagagagctactaacggaggtggtaactagcagtcacttagatgttagtgatttttagatttta

SEQ ID NO: 5771 - DNA, 2036 bp, Homo sapiens
taaaatgattttttaaactactttttaaagggtagatgttgtacatattactggctaaataatcattcaactagatatgaactaaaagtagtaagcaagtagaaatatatgtagtagagaaagttttgtagcaaccctagttaaaattaaatttgatctattatgtaggcattgccatataaactaatcattcttttgcatggggcagtgttttgagtattatgtcactaaaggaaacatctttaggacattagttttactaaataaaaatttcaatatgttatgagcatgtctggattttagccttgatggaggtgggttacgctgttaacttaaaactgggttgcttaaaaagatggcaatataatacagtacttaagtagcaaaatgctctctaataagtaaaatttgctttatgattgttttcagagaaaacaacttaatttttagaacttcattaattttgttaaagcatatttttggattatataatatggatgtagataaatggaaagattatgaaaggaaaagcaaaaaattgaattcaagtgtctatttgtattatagctgtgaaactttaagcttttttcattctctacaaagttacttttctctttcttcaaacagctccctgttgtttaatacacgttccctctatacatagggattgcatttatctgtccatatgcacatttctcctcctaatcaacattatgtatttattgagacttggtacatggaggttgaggtatgaactatgtttgtagaaaaccttacagtatggcaacctgggaaaaccttcatctcttttgcagtaacaactacatctgtgctgaaattattcataacagatgttttgtgatctcttaattccctccctctcccttcccctcccccattcagatttaaaattaaatgtgaatggaagataaatttataaattatgttaatttctttttattgttttattctatattgaaagtcctctgttttctctttttaaaatattctaattttaaatgtttaagatattttaagtactctgatttcaattatcttttaataaaatatgacaccattatttatatatctgttactattcatgctcacggcctaaaatatattctgatttcccttactcttaaggtctttgtattcatttaatccacaattctagcagagtgtttggttttgggtttttttttttttttttaagtagatagtgctgagtgtaactagtttgctgatgaaaaaaactcattttcttggaatcatatatttttaatatggaagattcatcttttccaaaataactttttatctgaaaactgacacagataagctgaaatttagggtctttaagtagaaactctagaagagactttaatgtgtgttttaagaaggggtaatgccaggcagatacagtgacatatggaataacatgtagtgaaatccttcaaggagtagattttctgaacctgggctcagggtaaccttgctctgccttgaatacttgaaaaggctgtcaaaatcactgtatctctttaacgttttctcctttctaccctaaagttaagttgctatttgctcctattgctacatcacttttctgaatctcttttgatacacttggcttttgctttatttgggagggagaaagtaaaggaaggaggaattggagtagacaaaaaataactttatatgaataaatattcattaagaaaatgaagtggaataattttggactggagagatttgggagaatcatccaaagccattttgcagtaaagcagacagtcaaagagataagatgactttgccaagtttatgttactagttagcttggactaggtcacagctttttgggttcctagttcggtattcttttcattaggtcatttgagcatatttatctaagacggtaacaagcaagaactagataccatgaattttcaaatttattatacttaaaaccaaaatgtgtagaatgcttcatcatctcaaaggcaagttctaatacatatgcatacatctgt

SEQ ID NO: 5772 - DNA, 1048 bp, Homo sapiens
atcaaaattaataagtatcagtagctcattccttttgtattgctgagtagtattccattgtatgaatgttatatcaccaaatacacaatttgtgtcgccattcacctgcagtggaactattaacttgggttgtttctggttctttgctctaatgaataaagctactgtgaacatttacataaaatttatatgcatatatatcttacatttttcttgagtcaatacttaagagtacagttatagtacaggtaactgtacttctaagtacatatagtaagtatatgtttaacttggtaagaagctgcaaaattgcaaactgcttgtaacaaacatttttacatttccaccagccatgtatgagagttctggttgttccacatccttgcaaacaattgtccatgtttttaattttaaccattctagtagatgagtggtagtatcattttggttttgattggatttcaccggtgactaatgatgtttgaagatcttttggtgtatgtattggccacttgtatattttcctttgtgaactgtctgttcaaataatttgtccatttttaattggattgtttgtctttttattattcagttgtaagagttctttgtatattctggaccaaaattttttgttggatacaagtattaaagatatttctctctttctgttggcttatcagttttcttaatggtaccattgaagtgccaaagctttaaattttgatggagtttaattcataattttattcatttaagctttgtgtcctttctgagaaatctttgcctattccagatcttcaggatttctcccatgtatttttagaagcttatagctttaccatttaggtctgtaatccatttcaggttaatgtttggtcttaactcaccagaatttggcataagaatttttatttgaaatttttaaaaatgtttctcagggcccaactaatacccaaagctcaggattatagaggaacacaagtcctacttccctggttttgaacatttttaactgagagtgagtacattgtgcctagttggggttttc

SEQ ID NO: 5773 - DNA, 2174 bp, Homo sapiens
attatgtttctttatatactcagtgttaatatgattaaaaatttaagaatatatatgcttgctttactaaaagtgaaaaaagttgtaaaacctgatgtatcctgctttcctgagtttttgcttatctattctgataatactaatagatttgcatagtaattgcttcgaaatggtgctgccactaccacttctaccaccaccataaattagtagaagacttacgctactagaagcataagcagccttacgttatagtggctggtatctgtgcaccaagtttggctgtgcatttctagtccctgcactgttagggggaattgtatatttttttttccttttctcaaatcagtaaatcagtgcaaacaaatgtgttgtggatttacaaacctatggaataaaatgtttttacttctatcaattatggctctccaaagacataaaatactcttcattcactattactagttaattttctagattatttctggcatttattaatggttctgcatagagctccaccttgtgaacatgttattgtactttgatatcagttctgtgtcatagatatttaataaataaaataaaactttatttacctgaatgtttctcattcagaatagctgtaattcaggcctggtatatgtttttatttgaatagaaacagttcactgtttttttggaggttatgctgtatactacaagatagattaaaaccagtgcctttttttagaccagctgctgaggaaatacctttatcatgtttcaacctcttaagtttaataattctcatgtaaaaattagtgcttgatttatgcatcaattttctaaacatttcacatgtgatctactttgtatattcagggacttttgtgttctatgttattatatagcgtattttttaaccaaaactttaaaaattaacctcatttcattagtatttgtttatactttactataccttgtttacatgcttaacctgcctatgtattatctgtgacagtaatgaaactgaatggttataaaatgctatataattttatcaagttaagctgacttttttggtggggaacatcatcttcctcttgctaatagataaaggagttttactgtactaatttcaaaaatggtataaagcagtaaggcagatcttcacagcctattctttgacagtatattaagcatgtggagaggaaagcaaggtgttagctattttaaggtttcacagcaacactcccatcttgttcattttcacctgagttgtatagagcctgggaattgctatatatctttaatgtaaagtcagcagtgcaagtaacagtattggatcatacttccaccattacattctctgagtttctgatcaccacattctcacagataaggaaaatagttgtagatggatggtctgaaatgtaaaaaggataaagaacacaagaagtggtaaatatgtttagtttcagacagacattatataaaacttgggaggagggtaaaattattgattagctacgggtaggcttggtaagttttaacgcatgttaaaatttctaagataaggaataaaaatctagaaggtatgtgtaccttacaaactagtagagaagggaagtagaacaagaaacaatattcaatctgaaaaaaaggtaaagaagctgaagaaagaaaacatggaaaagagaagacaagtagcacaaaagtacatagcagcaataagtgcaaatatattagtaattacagtgcatatgagttgaaaaaatcctccacttaacagaaactggttattagatgggataaaataacaaaatatatttatatgctgtttacaagcaataccttaaaaagcatattctcgcttgaaagtaaaaaggatttaaaaagatattcctgacactactaaccaatagaaatgttgtatggctatatatatcatgtaaagttgactttgaggcagaaaacctgtccgagagagtgagggtcactcaatagttataaaaggaaggtataattttaaataagtgactacctgataatacactttcaaaatacattaagcagaaactaggactgcagaagaaataggtaaatttatcattattatagcttatttaaaataatctctgttaatgtgagaacaagcagaaaaaaattaagaaaaatatagatgattttaataa

SEQ ID NO: 5774 - DNA, 1045 bp, Homo sapiens
cccgattgaaataacaggggaataattaatgaactagagaaagtaaaagtaattcaaaaaggaaacaatgcaactaaaaatagattatttgagaagagtaacaaaattagcaaaccactggcaagattaataggtggggaaagaagtcataaagcagtatctggaatgaaaatgggaatgttactacaggtgtttcatgaatgatcaactttattttaatgcagttgaaagattaagtggaccaattcctaaaaaaaaatgtagctcatgctggcccaagaagtaatagaaaatggaatacccttaaaacaaaaaggaaaaatattcttacaaagaaaaaaataccaattctagacaggtttactggcaaattctacaaaacattcaaggaacaataattccagttgtacagagagtatttcatggtttggaaaaagaaatgactgtccccaacttttttttacgaagctctaagtataaaaaatgatgattgtctttaactcagacctatgtacaaaaattcatagattagatatcatcacatggtagtacccccttatccatctgtaggtggttacctatgctcaatcacagtccgaaaatattaaatggaaaattcaagaaataaaaattcatatgttttaaattgtacgcccaggatgtggatcctccctttgtccagcatatccacactgtatatgctacctgcccattagttaccattggtagccgtcttggtcatcagataataaaaaaaaacatagtatttatagggcttccatgctatccatggtttcaggcatcctcagggggtcttgaaacgtatgccctgttgataaaggggaattactgtacttgaccaataatgtgtaagaaagtaacccatcataaccaagttgggtttactctagaatttcaaagttggttttatattagaaagtcacttaatagaatttaccacatcatctgtttaaaggaaaagaatcatgtgagcatctcaatagatccatctgtgataaaactcttagcaagtcagtaaatgaga

SEQ ID NO: 5775 - DNA, 1156 bp, Homo sapiens
gagacagggtttcaccatcttggccaggcaggtcttgaactcctgaccctcatgatccacctgccttggcctcccatagtgttgggattacaggcatgagacaccgcgcccggcctaagcataataatttctaaccctggttgtgtgatactccaaaatgtattcatttatttttaggggtataggcatttttaattcttttatatttttgtagtcactaaatttacttggcttctacctttacatattttctgtttattgaccaccttttaggaagtttgagaaaggtattaccttattatatttttttctaacttaaaatatgtgtgttactattgcacttgtggatataacatttcattttagaatatttacattttattttgtttatcaaacaatagcatttttgtatcaggcactattctcaatatcgttaaaatattaatttatttagtattcattgcaaccctatgagaaagatcctgctatctttgataggtaaagggaaactgaggcacggaaagtgttgggtaaggtcacttagctagtaagtggagcctgtgttcaaacctaggcagtctggttccacagtctgtgcacttaaccactaagctgtaagagaccatatgaagtagatctctaagaggagtatgtcatctatttcaatgttctttaataaacagggtactatttttgagcggtgccagcatattgtcagattatgatgaaataattatattattccctttgtttgatctgagaatgtaaaaagcaatactggtaaattacacactgctggacattgcttagatttactcttcaatgaattttgtgtccgtacgttcatgagatgagaaaaatagataggcaaaagtacctgttagtctgattgcagatctacccgtaatgcacaaatggtgatagtgtactttcttcttccaaaggtgggttaatggagtcatgatttaaaataagagtttaacagtagcgtgtataaatttgatatttatacatcataaatgatgtataaatcatttatgggagagtgatatttgattcagggatgttgacatgatacctttgggaaattctcatagtaaaatagagttagactgtcaacagggaaaattctaagtaatttgtgaagaaactagta

SEQ ID NO: 5776 - DNA, 1051 bp, Homo sapiens
atacattttatgaattactaacttacttttttaggacagacttgaaatcatttagagggtaaactctagcaatatagaaatctgttttttgttgaatggagtagcagctaatctttaagacccattgatagcattttagtagtagcacttaacattcagaaaagaaaaacaaatcatccagcttctgatcttcagttttatgtaactttacaatttggtacttgatgacttggtattggtatgagactgaatagtgtgatgttacaaacatgtgatgtttgcctaccatgttctaggcactgtgccaagtgctagagatggaatggtaggtaaagctgtggtctatacttagggagttcacagtcaaatgaaggatacagtcacaaaacagacacttgtataaagcatggtcactataatacagagaaatggaaagaatggccagagaaagcttacttgaaaagataatgcctgaactgaatactaaagggaggtcagtgggagagacaaggaagggtagatattgattgtgagtgcatgagcattgaaatgagagggcccaggggaataggaagagaggaatagcctaaaggagaacaggagcaaaggcacatgggtgagaaacaacatggaatgttctggacatacaagcagatctctgttggaaggagtatgagataagggtaagagagtgattggagttgagtctggagagatacgaaaccaaatcatggaagctttttaaatgccatgtttaggagcttgaacttcatctttttgtgagttggacagtcattgaagggttttaagtaggggcccaatttgattgtattcaggttgagtagagtactctgatagctgatgtgaaggataaatttgaagggaaaaagattggaggcagagaggccatttgggaagtagttagcttgataagaggtgacgagggcttaaactgacacttaatagaaatggagaagagggagtagatttcagagtctgtactttttttgttgttgataaatagtaaatttagtaggactcgatgcttgga

SEQ ID NO: 5777 - DNA, 1007 bp, Homo sapiens
gaagctttttctgttttaaagtattttgcttcccgttactgtatttataagatgatactggtatacgtagtgtcttggctatttatctattcccctttctctttaacacaatattccccaactttggtgtgatactgaattgaaatctctgggagtgtggcctaggactctacacttttactaacaatcagttgagatgcttatgaaggtggtggtagtagtgataatggtagtgatgatgatgatgattgtattagctctgctttcgaaggcttatgatgtacttactgcacttttctaggcagtttgcaactattaacctaatgttcacagcaagcctatgtggtaatacgctattatcttcattatacaaatggagaaactgtggcagatataaattaagtaacttgtcgccaaaatgactttcttataaataggtcaagaatccatgaaaaggatgaggcatatttttttggttgatagtttttaaactcactttctaaaggattgctttaagtgatgtgaatgatatgaatgtaaactggttcttatataaattgaagtatcaatatgctgactctatataggaatacttcaacaactagacctaaatatagatacttgctcttgcttttaggaagcctgtcacaattcttggtgaaaaagtaagcatgcacccaaaaacgtagaacattgaggaaaatttttaaataattacactttctaaaatacatgattttaggaagagtgctttattatatactatatatatatatatacacacacacatagacatacacacgtagatgcatatatatttactctatatggatgtgtgtctatatgtatagtcattcttcagtatcctcaggtggttggtgccaggacaccctcagataccaaaatccaaatactgtcccacagtatttgcatgtaagctatgcatatcctctcatgtactttatttatttatttatttattgagacatggtcttgctctgtcgcgc

SEQ ID NO: 5778 - DNA, 1049 bp, Homo sapiens
tttattcttatcccatcatgtccatggggtggagaggaacaactaagtaatcatgatcatgcacttcagtttatagcgttttctctagctttgggcattgtcacttaacagacaatacaattttaaaaattaaatgctcaatttcatttcactgaggttttttgttgttgcacaacattgtaagtatacagtaagttgttttttcttttaaatttttgcctctaattcaggtttacattgagcaaccaaatcagtattttcagaaaccattgaagttaattcatttatttaataattacttatgaaatatgtcatgtataatagtgctatagcctaagatgatgatggtgagaagtactcctaccttttgttactggcacgatggtggcgatactcagaacaaacaaaaacagtgtgataacacaaattattatatgactcgctgttttaatagtgtttacaaaagcagtgaatcccaggaaaataaactattggctacaatatcaaaaaagaaatgatggaagtggtagaatttaatttgggtcctgacaaataggcaggatttgaacatgtatggcaagaacactgcaggcaagggtaacatctcatgagaactgatgcagaaaaaaatacagcatatattggcagagtgagaaactggccagactgtagcagaaatcacaagctggtgtgaggagagagagaaaagcttcattaaggaagttttgaattactgaaaaattcaccagtcataaggcatggattattgtcttgctgtttagattacctataaatgtaattttactttactcaccaccatgtgataattatgtagggttttatctttttagaaacctgatgtgaaattacctgaaggaatgaagttagtgtgcttttaagttaagaatatcttcactcagtatccatggataggcttcagggaatctggatctctttgaaattaaagcaaaagtttggatgtatttctttttctggaggaaggatccattgcctttatgagtatgtaacagtccagaagaagttaataa

SEQ ID NO: 5779 - DNA, 1034 bp, Homo sapiens
ttaccctgcaattgcttgtctggcaaacagacaatttttaaagactcatatatttaggaatttttaaatgccatagaatcgatggacaaaatgattttcatttatcttaatccaaaatcacaagattgattatatacttaggttatatggaaaatcagcattagaagcattagttctacacctcatttgcatgacattattacaagatattaactgtaaaaatgaagtaaatataatatctgttcaccagatgcctaaaacatacaacattagtatagacatatagaaggatctgcaagcaactaaacaagtagcgtaaatcaaagaatatactgataaagtggtaagtgccttttgggcttcttaggtaataagcccttgtatctgccagaatagtctagcaaaaaatgcatttttttctttagcctagggaaacttttcacaggagatggagttttaggtattgtgtagatgatgggagaaattgcttttgataagcttcagtgaaaaaggaagggaatgtgtcattgcagatagagagggagagaaacactggtagttggtcgtagactggtagtggtgtagaaatagaaagcaaaacctattggacaaaggaactgaacagatttgttaaaaaggaatgagacaaacagatatgaaagataaggagtaagctgatacaggctggtgagctcactgatagcagagtccaccaagaggcatttagtggttttccttcagggcaaaaagtttgaaagagaaaaatatgatctctaaatagggctactcataaaaaatattgactattaagaatatagatacagtctgtatctttaagactgcaatttagtacaatttaattttgtttataggctaaacatttttataatttcatagcgattaacttgataaaaaagggaaaatttcttggtctttctgccaatctgtgtttctaactgaccctaaacagctctgttggtttcctgctcatgcattagagcttgtccatagccacaagcccctcttttcctgtc

SEQ ID NO: 5780 - DNA, 1046 bp, Homo sapiens
tactaactggggctttgtgttctgactggtagtagcaataggtttcaccctttgtgattgagtaggctcctaggaatttactttcatctattcaacaaaaatgtgtatacaggttgagcgtcccaaatctgaaatgctccaaaatctgaaacttgttgagtgccaatatgatgctcaaaggaaatgctcagtggaacatttttagatttcagattttcagactagggatgctgaaccagtaagtataatgtacatattcaaaaaaaaatctgatatccaaacacttcttttctcaaggattttggataaggtatgctcatcctgtattcttagtactagtaatgtttctctgagcaaaatagacacaatccctgacctcatggagtttccagtataatgccagagatggatattagaaagtaatcctgtaactataagctgtgagataaatgctgtacagaagaggtcacttacattgagagatctgtaaagaaatgacatttagatagaaacttaagtggagatctgaacaatgagctggtggtagacagtggtgtaggcagaggctgtaacatgcatgaatgccctggggggataaggtttgtggcagcagtaaagccggagagggaggtagaacccagattatggacagccaagttagggatttcgattttatcctcagtgtaatgaaaaaatcatcaaaaggttttgaatagtggaataatataagatgacttgttttattaaaatattaattatactatggctaatgtgtggagatttgctaagagaacaggtagaatgagtgagtatggggacatcagttacaggagtcatattctcatatccgccacatagtgggcactcattcaccattttgtggttagctgaatgatgactagatcactgcctctgttgtaacatctcaaattatttgcactttaaccatgagttaagttggatatttttgaggaatcatgaagtgttgctgatttgtactaatttttcctcataaaactttagatattttgaactgctgcttcatc

SEQ ID NO: 5781 - DNA, 1112 bp, Homo sapiens
agaactcataaataaagtgacatacctacaaccaactgactttcagcagattcaacaaaaataaacaatggggaaaggacatcctattcagtaagtggtgctgggaaattggccaaccacatgcagaaaaatgaaactggacctctgtgtctcatcatattaaaaaattaactcaagatggattaaagacccataaatgtaagatgtgaaacttaaaatcctgaaagaaaacctaggaaaaactattctggacattggcttaggcaaagaatttatgactaagaccccaaaagaaaataaaacaagaacaaaagtacacaggtgggacttaattaaaccaaaaagcctgttcacagcaaaagaaataacagagtaagcagacaacctacagaatgagagaaaacatttgcaagtcatacctccgacaaagaactaatatccagaatctacaatgaacccaaataactcagcaagagaaaaacaaccccattaaatattggtcaaaggacatggacagacatttcttaaaagaagacataaagttgccaacaaacattttaaaaatgcttaatatcactaatcatcagagaagtgcaaattgaagccacaatgagatattatcttataccagtcagaatggctatgattaaaagtcagaaaacaacagatgttggcatggatgcagagagaagggtattcttatacactgttggtgggaatgcaaattagtacaaccgctatggaaaacagtttggagattcctgaaaaaactaaaaatggaattaccattcaattcagcaatgccactactgggcttctacccaaaggaaaagaaatcattatataagaaagacacctttatgtatgtttatcgcagaactactcacaatagcagagtcatggaatcaacctaagtgtatatcagtggataattggataaagaaaatgtggtccatatataccatgaaatactatgcagtcataaaaacaaatgaaattatgtcctttttagaagtttctacatggatggagctggaggccattatactaagtgaaataactcagtaacagaaaagcgaatactgcacattctcacttgtaagtgggagcta

SEQ ID NO: 5782 - DNA, 1041 bp, Homo sapiens
acctaataacggcatgtctttgggcaagttatttaacttctccaagcctcaagttttttaacttataaaatatgttgttacaaagcttaaaagaagtaagttactagcacagtgcctggaacatagaaatttgtgctttagagaagaaataaaaatatataattctaccgtctataggtagagctcttttcccaaaatagtactaaaattccagtttgcttataatcctaaaatatttataattccagaatatctaaatctgtactgcttttacttctctaagatatcttcgtgagtttggtaagactgtccacttaatttctttaaacagctttacttttcaaggacacattaccatattcataaaaggaaaaaatccaaattaaatataatctgtactgaaagtttccttttcagatttcgggaagttaaaatgtttgtgacaactggatttgtttttttaatcttttattgatatataatagctgtatatatttggggagtacatgtgatattttgatacatgtatacaatgtgtaatgatcagatcagagtaattgggatatccaaaactttaaacatttgtctttcgtttgtattaggaacactatagatctattttaatttcttctttgatttcagcaggaaaggaagggcaagaaatcctggggcctgaagctcaggcagatgaagcaggatgtacaggtactctgctgcgactttctttcataccatagcctttaaaagaaggtctttgtgtcactgatttcgcatttgtgagtcctgaatttagtccgtttccttctcttttatcttaccttccttaaatgtttaagtacttaggcatatggtgcactacataaaaagaagtaaatattccttaaatacagagtaacttacagattcatattatgtagcagatttctccattctataagaatgacaagtataacctacagataatccaaaaaataagtgtttgaatgatgatttgaacttctatcaagtttttgaccaaagttagagaaatgcagatctaac

SEQ ID NO: 5783 - DNA, 1073 bp, Homo sapiens
agttcactaactttccagattttgacaactcagccctcaatggaaggcaaggattttaatatatttgaaagttaaaagaatgtactaaacagtgctatatctgcagccttataaaagtgaaaatgattatttatttgagttatctggtcattcctgagattaaaaaccacatatgaacgttactttagaggtaactcagtattttgttcaggtaagaccctttccatcttgacttaattattttgcttatgccataacagttaattcttcaagtttagaagatgttaaattgcattctattaaaatgttcagtgtaggaaaaataagtactgactatataaaccacattatactaaccaaattgacaagaaagtcaaattaaaaagtttaagtttctttgaaccagttactatttattctcagtataagctacgtggtttttttcccccgtagtaaagggagttgcctcctctaaaaatctaaagtttagatttttttattctgaagactcaatttttatatggtttattctacttctgtgtcactgtgccccagttttcagaagtataaaccaagactgttttgtaactataagttacatttaaattgctggttctatatttaggattaaagtcaaaaaagcttttatcagttgttcctcttttacaaggtcctcatagttatcagccatcaacaatgaaattaatattgccttaattctaactttaaaaattaaataaattttcagccacacagggtttgtgagggtacatgttggggttaggccacatttccagtttcttacatcaaagaatgatgtatatctacatacctgaactctgccctatggatgtacctaatatgtgtcacatatcccatagagaacaagttagaccatttgctaaggtgatggctaggccaaacaaacaacaaaaaagaattgtaacagaaaaagaatgactgagcagagtcaacctatttccttagtactttggcaacagtactcatgaaataacaagataataagaagagggtggcaatcagggagaatagaaccaagattttataggttt

SEQ ID NO: 5784 - DNA, 1027 bp, Homo sapiens
atgaaggatgacagggctgaaagtcaagcaagcagcttaggacaaaaagtaggcgagagtagtgagcaagtgtctgaagaaaagacaaatgaagcctaatcgtttttctagaaggaaaataaattctaattgataatgaatttcgttcaatattatccttgcttttcatggaaacacagtaacctgtatgctgtgattcctgttcactactgtgtaaagtaaaaactaaaaaaatacaaaatacaaaacacacacacacacacacacacacacacacacacacacacaaaataaatccgggtgtgcctgaacctcagacctagtaatttttcatgcagttttcaaagttaggaacaagtttgtaacatgcagcagattagaaaaccttaatgactcagagagcaacaatacaagaggttaaaggaagctgattaattagatatgcatctggcattgttttatcttatcagtattatcactcttatgttggtttattcttaagctgtacaattgggagaaattttataattttttattggtaaacatatgctaaatccgcttcagtattttattatgttttttaaaatgtgagaacttctgcactacaaaattcccttcacagagaagtataatgtagttccaacccgtgctaactaccttttataaattcagtctagaaggtagtaatttctaatatttagatgtcttagtagagcgtattatcatttaaagtgtattgttagccttaagaaagcagctgatagaagaactgaagtttcttactcacgtggtttaaaatggagttcaaaagattgccattgagttctgattgcagggactaacaatgttaatctgataaggacagcaaaatcatcagaatcagtgtttgtgattgtgtttgaatatgtggtaacatatgaaggatatgacatgaagctttgtatctcctttggccttaagcaagacctgtgtgctgtaagtgccatttctcagtattttcaaggctctaacccgccttcatccaatg

SEQ ID NO: 5785 - DNA, 1045 bp, Homo sapiens
caacctaacacttaagttttaagaaagtcattacatttcaaaaaattttcctctttatttaaacataaaacgcatttacaacatgcaagttaacttaaaattaaacggtgtcttcccaaaccaagtatttgtgaatgtatcttcaagcactgaaaataaaccaacatattccacaggtagactcagactctcttctgtcacctcatgtcaaatggagttaagcacaaactgagagttacgcacagtagttttcttaagttaggcaaataatttaattaatcgccatgaataaatattctctttatttcattgagtttctcttctgaaccatctatcaatgccattcagaggaacgttaatatatccagtcaaaaagacactgcaaattgaaatgtgtcaatatcctagatgatcagaaattttcatttttaagagtaagtgctgtgtttaatgacctaccatagcaaaaagcagttcactgaaaacaaatttatgaaattcttggtacactttatgaaagtctgaaattataaatagaaaagaaccatcaagatactttttaaaaacctaacattgtatattctgaaccacatgctaattaaaattcgttgttcattacacagcaccaatacccatgatacatcttacaagaacaaaactaacatatttggaaaaaagagaaaaaaaaattctgcttcatttacgaatgttgccaaaggaggcaagttttcaactgaaaacaaaacataaaggtctatgtggatgcagccaaatgtttctccatttagaaaatcatcataaaaggtggcagcactttttttgcttgttaactatattacttataactggctgcaccaacatttcatctcaatttttggagtgtttcttctgatcaatcctaaaagcaacacaatcattttagaggttgcagactacaacagcaaagatttttgactattaaaaaaataaataaataaatttatattttaaatcaaaattattacaaaagtggaaattacaatagttacggaaatagaaaaataag

SEQ ID NO: 5786 - DNA, 1061 bp, Homo sapiens
tttaaataacttattgatataaattagatattgtgataactgcattctatatttcttcgttttgtttaagttactgtgactcaaaaaagcctgaagtgtaatcatagcttccagaagttgcttaatgtactctgagcaaattgctaaagccatcagaaaaagagaaatgtagtatgtgaatttaattagagcctggtgttttctctgaatctcttattttttttcacagggaggaataagtttttttcatctgtaatttggaagccaagtcagtaacaaaatgaaaccagtaaagcatctgttgaccaccagtaacaaatcggcaaatgttccagcattaactactaaaaaaggactacataatttaccattatcacctgagctaaaggaaaaacataatgcaaaattaattcatgataaaattgaaccaatggtcctaagatctccaccaacaggagaatccattttacggtatgctttgcccattccatcgagtaagacaaagaacttactaccagaagatgaaatgatcggaaaaattatcaaacatctgaagatggtaagaggcttgttagtttctgtgttgcagggcccccatgatcaccccaggtttagtgatgtgctaggaggactcacatgactccacatatagtcataccgatggctaagatttattacagtaggcacatgaggtgaaattaggagaaaaccagatctaagcttgcaagagtcttttccctttagagtcacccaggagatgcttaatttctttagcaatgaattgtgacaacacatatgaaatgtctgccagggaaaatcattagaaactcagtgccctgggatttattgggggttgtttactattcactctgtgcttagcatgtacgaaaatttcagactctcacaaggaaaggaggttcagtataaacaatgttatacaaacagtttagggacagtgagctgcttctatcagtgaatggggagaaccctcctgaaatccaggatctcagatgccaggttaaggccaaccttgcaagcaggccttcctaagtcctgcattt

SEQ ID NO: 5787 - DNA, 1025 bp, Homo sapiens
ataaagaggaggtaactaagggaaagacaaaaaaattggccaataaacattttaagagatgctcaatctcaccgtgatcagggaagatataagacaaagccatgacttttttgtctacaaaatttagaagttttctaatatcaactattggcagagaggtagtggaatgaatactcttaccatgctaatataatagaaatttccccctttcgaggacaatttagcacagtttagtaataacaaaagtgtatgccatgttatatagcaaatctctttttatctaccctcgggaaaggagtacaatgtgctcaagaaagcatataaaaggaattttttttgcatcagtgcgatggtagcagaactagaaagaacctgtttttgttagtaggagtatggctcaataatctatggtaaatggataataagggaatactatgaataactatgtgaccacaaattagataacttagatgatatatatctctagaaaaacccaaactaaactgtatcaagaagaacaagaacatgtgactgaacttataagtagtaaaagatttaattagtaattaacatattcccaccaagaaatgcttaggccagatgacttcactttttaatcctgtcaaatatttaaagaagagttaataccaggcctgtacaaactcttctaaaaaattaaagagttcacacttctcaattcattctatgagattagtgttactctgataccaaaattagacaatcacaagaacataaatatgatatttattttaagaagataaatatatgttatgaatatgaacatgaaaatccttaccaaaatactagcaaactgaatccaacagcatataaaaaagattatctatgatgaacatgtgagatttattttaggaatgcaaggttgatttaaaatgcaggtatcaatttacataatgtgtaatattgattaaataaaggagaaaaaattacatcagttcgctagattcagtaaatgcacttgacaaaattcaacatctttttatgat

SEQ ID NO: 5788 - DNA, 1068 bp, Homo sapiens
gttcaagcaattcttgtgcctcagcctcccaagttgctgggactacaggcacctgccaccacacccggctaatttttgtatttttcgtagagatggggtttcaccatgttggccaggctggtctcaaactcctgacctcagttgatcttcctgcctcggtctcccaaagtgctgggattacatgcatgagccactgggcctggctgtcactagttttaattgcaaatcaaaactacaatgagataccactttacacccactaggatggctatattcaaatagacaacgcaatgatttgttggcaagtatgtagagagattgggaacctcataatgggaatttaaattatgtatctgctttggaaaagtttgccggttcctcaaaatgttaaatacagagtctgcatatgattcagaaattctgtgtctaggtttatacatgagataaatgaaaacacatgttcacacaaaaacttgtacataaatgttcataatagcattattcataatggcagaaaagtggaaacaaacaaaatgtccttaaagtgttggataaataaaatgtgggatatccatataatggaatgttatttggcagtaacatagataaacatagattatttgttgaaaataatctatggtctatccatactgtggaacaatgtcaccaaactgtgtcagcaaactgtggaacaatgtcaaacctaacctgaaacttatttttgtaaataaagtttaattggaatacagccatacgcattgaagaatagtgacagagaccatcaggcttgcagaatctaagatacttactatttagttctttacaactcctgctatggaataatcattagcgcttaaaaaaactgggaaagatctatgtttatggacatgaagaaatctcagacattaagttaagtgaaaaagtaagtttggaacaatatatacagtgatgtcatttatgtgaaaaagaaaactgaaatccaacccactaataaaaattacagaatggaaaagttacatgcagtattgtgtaaatgcctagaacaagtcctggaaaggtaacagtgat

SEQ ID NO: 5789 - DNA, 1027 bp, Homo sapiens
gggagcaggccatttagaggtcattatgcattgatgacagatattagagcagtttggtagccttgtggaaggatattagttatgttttccaacttattctatataaggttaatctgaacatctaagtgaaaaaaagatatggacaggcatttgaggtgtcagttgttgcaaacaagttccctcagtttggaaaatatcctgtatgacaactgtagtcacttgtgtctttggtggccagggctgtaatatagcattggaccagcaaaatcaattgagtcattatgcacctgagggtgtgtacaagatctacttagttattgaatggagaaatagtcttatagagaacttttgcttcattaagctcaacaaatgacaacagcctttctgtttcttcctaggaagctattctgggaaacaaaggtgctaggtgctgttaatctggatatttacattcttccatatgccccactaaaatgaccttaaatgcctcagtttccatcagggactgggatgaatgcaagtgggggttcacatagaaaatacatctataccaacaatacatttggtgggggaggggaataaaatggagttttgcagttgtccgaaaggatactctcatggtagtgtttgaccaagggtcattttggtggtgtcctcagatgcaaaaccagagagcattacttcttttccccagttcctggtgtcagaggttgtggggatcacagccacctgtgcaccagtatcctaatggccctagaaatgcaatttcttcccaccttccctttaaattctgaccttacgatacattctcagattaccactggtaacatggggatcttggcctaactcttaattttctttattttcgagagcatgaagtttgagcaaaagtagtggagggttctctgattgatttcaatatcactgggaggtgcaaagggaagagcacttttattagtcatggggtcatcgcattctggatttagtagggctatgtgttggtacccatggcccactacctggccag

SEQ ID NO: 5790 - DNA, 1030 bp, Homo sapiens
gatctgagaatggacagactgcttcctaaagtgggtccctgaccccccagtaggctaactgggagacatctcccagtaggggctgactaacaccacaaacagctggcagcccctttgagacaaagcttccagaggaaggatcaggcagcaacctttgctcttctgcaatattatatttgctgttctgcagcctccgctggtgatacccaggcaaacagggtctggagtggacctccagcaagctccagcagacctacagctaagggtcctgactgttagaagaaaaactaacagaaaggaatggcatcaatatcaacaaaaacaacatccacaacaaaacccatttgtaggtcaccatcatcaaagactaaaggtagataaaaccacaaagatggggagaaaccagagcagaaaagttgaaaattctaaacaccagagtgcctcttctcctccaaaggatcgcaggtccttgccagcatcagaagaaagctggacggagaatgactttgacgagttgagagaagtagacttcagaagatcggtaataataaacttctctgagctaaaggaggatgctcgaacccattgcaaggaagctaaaaaccttgaaaaaaagattagaagactggctaactagaataaacagcatagagaagaccttaaataacctggtggagctgaaaaccatggcacgagaactatgtgatgcatgcacaagcttcagtagccaattcagtcaagtggaagaaagggtatcagtgattgaagatcaaatgaatgaaatgaagtgagaagagaagtttagagaaaaaagagtaaaaagaaatgaacaaatcctccaagaaatatgggactatgtgaaaagaccaaatctgcatttgattggtgtacctgaaagtgacagggagaatggaaccaagttggaaaacactattcaggatattatgaaggagaacttccccaacctagcaaggcaggccaacattcaaattcaggaaacacagagaacgccacaaagttactcctcgag

SEQ ID NO: 5791 - DNA, 1049 bp, Homo sapiens
tctaatccgttgatagttccttttgctgtgcaaaatatttttagtttaactagatcccatttgtcaatttctgtttttattgcaattgcttttgaagagatagccatacattctttgccaaggctgatattgagaagggtatttactaggctttcttctaggattgttatagtgtgaagtcttacatttaaatctttaatccttcttgactaaatttttgtatatgataaaaagcaggggtccaatttcattcttctgcatatggcttgccagctatcccagcatcatttattgagtaaggagtccctattgcttattttttctgggattctcaaagatcatatgattgtaggtatgtggctttatttctgggttctctactctgttcagttggtctatgtgtctgtttttgtaccagtacaatgctgttttggttactgtagccctgtaatatagtttcaagtcaggtagtatgatgccttcaactttgttctttttgcttaggattgctttggctattaggcttctttttggattaatatgaattttagaatagcttctcctaattctgttaaaaatgacattggtagtttgataggactccactgaacctgtaaattgctttgggcagtatggccatttaatgacatagattctctcaatccgttagcatggactgttttttcatttatttgtgccatttctgatttcttttgcagtgtttttgcagttctcgttgtagagatctttcaccttcttggttacatgcattgctaggtgtttcacaaaatgttagttttttaaatcaactactttgacaatctgttattcttacagttaaaaatgaagcagcctcagaacttccagatacagcagaaaatcttccagcaatgtacccgtcaattagcgacctaataattcaatttgatttaaacaaagtggtcggtaagtatagatttatgtttggatacagtagaacacaatctaagaattaaaatatttcaactgtatagttctgttaaaaaacaggaaattcaaagaaggagtag

SEQ ID NO: 5792 - DNA, 1030 bp, Homo sapiens
tgccagtttcctccttcttctcagctgtcggacccctgggaggcgcggggtgggaagtgggcaccgaagggctgggagttaaatgcctaagttgagcggaaggagcactgtcgaagccatgggcagccctgcgcccgggcaggcgggcaggcgggaggcgaggcgggggcgccgaccgcgcccagcgcagaccccgggggagtgagcgccgcagaggcagcctgggctctcggctactacccgcgcgcggtcgccgcctccccaggtgcagccccgccagtcccagcccccggctgcgccgggcgagcggcatcatcagatttagggtgacccggagcgacctcggtccaggctcggagggagaggcgcctctcaggacctggcaggttgacagggaaggggaaccgggagggagcggcggccggggcggcctggagtctcggaggcccgcctgcgtcctggggggacccgacctccgcgctcgctccggagcgcccgtttggatagctctgagcctcggcggggtgagcgagggggcacacgagggagacttgagctgtgttgtttttagaaaactgccgccaatctctcttcccctttccctgctgagtgtgcattttccagcctagacccgccaggccagcaaataaagccaccggatcgtgcactccggagcgactgcccccaccccgaccttgtctttcccgaagggaatggctcctccggcgcctcaacgcacagaaaacgcctgcctccagctgagcgcttttgccagctttctccaaccagtgaataagggatgcactatggactcagaaggaaatgtcatatttaagttctgcctctgatttctctgctcttagctgatctaaggtttttctagactccttagtttccactcacagtgctgggtaatggagccctaccgcactgattgagaattgccggccagtgggttggtacagagcaaattgtccttgctaacaacctttttcctttgctgttggattccactaagtggtgagagggg

SEQ ID NO: 5793 - DNA, 1032 bp, Homo sapiens
tcctggagagctgtctcctgcagtgccccagtgtctagtatgagggggtggcatctaatgggttatacagttgttaaggagcataagatgtccctacgtaaaatgctagtgtagcatacaatgaggtttgatgtcagaatggcatcagttctgctttttgttcctcttgtgaggagcctgttcaaatgccctactgtctcttgtccctatgctgggggcacatggtagcagtagtaaccatcgccttagtgcccttagtgaggtttgataaacctgcctgctgcctacagttccaaatttgaccaggattatatgacatcatttagaagaacccttaggagggaactctgaaagcaatgtgtctgtctaagcactgctgttgctggcagaggtatctagaggttacttagggatgagcacgattgttttctccagctctaaaagaaattaaggactctcagttttttttttttttttttttgggactctgtctcaaaagagtttaggtctgtgaatggtcttgctctgtcacctaggctggagtacagaggtgcaaacatggcccattgcagcctcaactttccgcgctcaagtgattctcccacctcagcctcctgagtagctgggagtccaggcctgtgccaccatacctggtcagttttcttgtagagacaaggtctcactgtgttgccaaggcttgtctcaaactcctggattcaagcaaacctgctacctcagcctcccgcagtgctgggattacaggtgtgagccaccatgtctggctcaaatgttcttttgtctttttctttgccagttttacttctttccacatgtcaaatatatatttttaaagatattagtaaaaaataaagagagtttaattgctacagtgtctaaactaggttttttaatggattgaaggctatcagaaggacgttttgaataaacttattttgtttggagtttaattttttaacaaaaacccaagttggaatttaaggtaaatgaaaacttttttgcattggagtgaaa

SEQ ID NO: 5794 - DNA, 1035 bp, Homo sapiens
cacttaatacgttcatggtaagatcaaattcttaacctccctgagtctccttttccttatttctaaaagaagaactaattattttttattttttgagacagtctcactctgttgcccaggctggaagaactgatgatagtgatcttatagagttgttaatcaaaactaccaggcacttaccacatggtaaactctcaataaatgatggttatagttatgagaattagaagtttggattttatcctgtagtcaataggaagctactgaagagttttaagcaaagaagtattttaagcagaaatacatgttttagaaacataactattggcatggattggagccaggagttagagtggtggctgtggaaaggtagagaaggagacttaattgttctttagaaggtagaatcatcatacctggtgatgatgctgtgtggaatgacagagagggagtttcaggggtttctggcttgaacaactcgttggatgatggggtcccatttcctgagatagggaactcgggtagaaagtttgtggaggaagaagaggagtttagttctggacccactgattttgaggttcctgcaggacatgtgtttggagatgttaaacagggatttgcatattggattttggaattgagaagagacgtctggcctagagtcatgggtttaaatctggcacttgaatccagagaaacagaccatatgaagtagggagagatttgagagtgaggcaagaaagctaagcagagtcccgaagacatgccatgttgaagattaacattgaggaagagaaggaattgtcaggggagcttgtggaggaattgtcagcgaatcagatgagaagaggaaaatgtagtatcagaacgctgagacagtgttcaagaaggaagatgttgtcaacggtttgaatgctgctgagggatcaaacaaaaggtaggacttaaaatgtacgttggatttagtgacagagattagttaccatttctagagacgttttagaggtagaaacctctctaaacttgggggtatct

SEQ ID NO: 5795 - DNA, 1048 bp, Homo sapiens
gctcactgcatcctccacctcccgggttccaatgattattatgcctcagcctcccgagtagctgggattacaggcatgtgccaccacgcccaactgatttttgtgtttttagtagagagggttatgccatgttggccaggctggttttgaactcctgacctcaagcagtccacctgctttgatctcctgaagtgctgggattactggtgtgagccactgcacctggcctgtttgaagtatttgatcaaactgaaactatggtttttatctttcacatgctagaaatatagagattaagaagtaatctgtatgccgacttatggattattttagttaactaagaattatcctccatgccatgcatggatcatgattttttgaagaattagaagacaattcttagcagtcagaattttctgaacataattactcattaaagttcttgtgacaccagcagctgttcgtttatgagtattgttactatcatacaatagtatatgtcttacaaggagtaggaaatcaagctgaactctattaaccctatgatgtatgccaaaagtgactgactcttctgaatttctgatggcttcatatttacttgccacttgtctcatttttcttcagacttgaggattgtaaatttccatatgttttagatttaaacttagttgtgaataaagaggaatttctgacactcaccttccttgtttatatgatcagattatcagtaaacagtgtgggaacaaaaggcgtaagcagaacgttcagtgggtttgattctttgcatctaaggtcatttgatactggttgttttgattgtcctggcctttccagagcttctgctaatcaagaatatactatgaaaatcatcagagacctagcaactgttgagcttggttttggctgtcaggcccctgttctgctgatggattgaggtgaggtgcaggtacaccaggggacactggagttttgcttttctgttttataactttgtagtaataaatggagcctttctcttctgtttgaaaacaaaatcacggtggtggta

SEQ ID NO: 5796 - DNA, 1073 bp, Homo sapiens
gtaggcctccaaagggtatagaggagaaaagctaattttttatagttttataagcaaagttccggtatgtcaggagcttgcttaaaattatatgttttatgcttcttaatttaggtactttagatttctcctagatattttaaaacattgctggccactttgggcataaaaatctaaaatataatctgtaactatttcagatttcatggtaagaccaaactgcattataatttttgtaaggagctaaactcttagactttactatttatgtactctgaccattggactggaactgaaaacaacttaaagatgcaatttggcctggctgtgttaaattagtctgctttgcattgctataaaggaatacctggctggggcagtggcccatgcctgtaatcccagcactttgggagcctgagttgggtggattatttgagctcaggagttcgagacgagcctggccaacatggtgaaaccctgtctctacaaaaaaatacaaaaatcagctgggcatggtggcaggcgcctgtaatcccagctacgccggaggctgaggcaggagaatcacttgaaacttgaacccggaaggcagaagttgcagtaagccagattgcaccactgctctccagcctgggccacagagcgaggctccatctcaaaaaaaaaaaaaaaaaaaaaagaaaaggaaaaagaaatacttgaggctggataatatataaagaaaagaagtttgttttggctcacggttctgcaggctgcacaagaagcatggcaccagtatctgcttctagggaagcctccagaagcttcaaatcatggcagcaggagaagggggagccagggtatcacatggagagagagggagcaagagagaggggaagtgccacactcttcaacaaccagctctcagaactaccagagcgagaactcatgaccattcatgagggatcccccatgacccaaacacctcccacaaggccccacctccaacattgaggattatatttcaacatgagattgggagcggataagcatccaaactgtatcacgttttgtcaaaatgattctgattt

SEQ ID NO: 5797 - DNA, 1024 bp, Homo sapiens
gtttatcacagtagaatgataagagtggcgacaagatacctgatgtgacaaattcacatacattaaaagcttgattatctttgtggcatgggtattttctcctgtgtttcccagaagtgtaagaataattctcatcattatctttttttcctgtgatggcccctgattccaagagtttctaattctttctgacactaattataaaacaagaaagtctttccaacctcttctttgttttatgacttttattgaggtccacatatttctacttagttttaacctggctggtattggaagaaagtattgtctattattattatttattatttaatagagacagaattctcagtatgttacccaggtttgtgttgaggccctggcctcaagtgatcctcttgcctcagtctttcaaagtgctgggattacagatgtgagccacagcacccggctgaaagaaagtattctgttatattcagtagactttgtttggattttgttaagtgaacgatttaattgtccttgtagaaagaggtgccagtggatcttgtcctagaatacttacgtgttggatcatggtcaagccacttaatctctgtgcatgaactttaattttcacctttctaaaataggtaaattaatagcctacctcacctaagggagttgttatgattctatgacagatgtgtgacagcccggtgtaaaatgataaatatttaatatttggtggtgatatatgattatctgaggcaacaacatttttctcagtcctgttgattgggtgtgtgtgcttatgtgtggggcgttcatgagcaaaaacacgagtcatatgtggaggtgaatatacacctccgtgtacttcgggaagtatatattcttgcttgcattgttgatattttaataagctcttttgattttgtccaaatcaatttcccatgtaattataatatgaagtgagttttgtaaactctgctaccctaggccctcaaagtattaataattgactgaatatatcaaaatcagtcat

SEQ ID NO: 5798 - DNA, 1050 bp, Homo sapiens
catgacctcatcacctctcagaggttccacctccaaatactattgcattggaggtgaggatttcaacagaggaaattgggtggggatacaaacattcagtctatagcatccactcaaaagcatccatcaatgtctgtgacctgttagacaaagctccaaatctttcatgtggcccaaatctttgcttgatccaagccttgcattctttaatagctgcctacctctccacttctccctcttttgtaatacagctctttctttcatttcctgggataggccatgccctctctccctccagggccttcttcacacataccgattgcctgataagaatacgttccccgaggaagccttgcccatcctccacatctggcttaggcaaccttctgtgagttcctactgtacttccttaggcacatatcatgttgtgttgtggctctctgtcttgctagatggtaagttctatttggacaaatacctagcacagaccctggcatgtgataaatgttcagtaagcatttaccaaatgaaagtgaactgttcttcctctgaaaatgtgatttgttctgtgtgctgattgacttgagattaactggtccagggaatacattaaaactactaagagcagtaatcaactaagcaacccatttcccttctttctttccttccttgccttttttttcacaccaatatttattgagcatctatgtgccaatttaaagaaatgctgacataaaaatcaatttcttattgattttctgaaatttgaaataaaatttactaatagcattcttggacccaaaccctcaggtgtgactgggacagcaaagagtccctgctggagccccagattgaggttgatgtctaggtgaccatccagggttccttactcagccaagatatcttcagctgaattgaaaccctaaccccattgtcaggtatcctggagaattactagaaacatggacactccctgaaactttacctcctgagcatctgaggtgtaaagtccttacctttactggaagatgattaaattaaatacagcta

SEQ ID NO: 5799 - DNA, 1029 bp, Homo sapiens
acagaaaattgggagctggtttgcggagcatccagctgctgctttccctgtaccactggaattctttcccttatctgtcactcccagtaagtagggcatgtcattgttggctttctttaaaaatatttattcttccttcagagtcggagctctgaatttcttttttctttttttcttttaagacagagtcttggtttgtcactcaggctggagtgcagtggcgtgatctcaactcaccacaacctccgcctcccgggttcaaacaattcttctgcctcagcctcccgagtagctgagattacaggcgtacaccactacacccagctgatttttctatttttagtagagatgaggtttcaccatgttggccaggctaggctcgaactcctggcctcaagtaatccacctgccttggcctcccaaagtgctgggattacaggtgcgagccaccgcacccggcctaaatttcttttatctcaatttttgtcttctcttctacagagaagatgaggaaagaagtcaaggaagaaaaaggaaaggaaaactccaggtttcaggtgcaggacagtaggaccttgcattcactcatctgcccagtcagttgctgtgcgccagtggtgtggctggggtgggtggacacacagaggggacacgaggatcagcaggcaagatgtacaaagttggagacgatgcacgctacatgttagaattctagaaagatgcagctgggggttaaacaggagactttatgtgggaagtggattttgaactgggccttgaagtgattgacagtgctggggcgtggggtgggtacttcgggaatacagagcacacacactgctccaaggagcttgggtctggaggacagagggaggccaagtgagttctcacccaagagctagtttcatttaaaaatcaggggaagacagaagcaatgtgtgcgcatgcctgtgtgtactctagtctgcaaaataggttatattattttagaggaaagggactatccaattacttgggaccaccagcaac

SEQ ID NO: 5800 - DNA, 1048 bp, Homo sapiens
tgagaggtagcagatagggtgaagtactgaaaatgaaacttaaaggttttaaagcttaaaaagaaaaaaagcatacccaggctgaaaggaaacctggctaatgggaatctgtttaataatgtggtatgtttagtcttttttccttgtttctttcaacgaatgactttagctgtggccttacatccttaaggatcaaattgagactcaaatgctcaattaaccaaaaaatactagatgaacatctgcaattatgaacatagtcacttatgttgattttcttgtctgaaacatgaagtgtctaatgggatataggtacatggtgttttggctgtctacagccagagaagctagaagcctcagggactcatcccaagcagcggagggataactggcaaaactgcttgccgttagaagagtggggacacagggcaatttgaaatctaagtgcctgtaggatgagcttgcatattgctcttggcttccttgagtctctacaatctatttaacatcacctctgcagcactctttcttgaatcttggtcccacattaacattaccagccctggtgggcagaacataccgtggactttctttccaggctaagacttatcagccctgctgtctgcaaggtatgtggagacaccccgaccaagcatgtgacttcatattagttagcagtgtggagaagtgcagtttaaagatttgtcaagagagccattctccatagcactgaccatgggtccatgacctgtctctgcttacttttcatgtttctctttcacttagaatcagggagtcgtttgcttccacacacccattttacaggtgggaagactgaatctcagagaggtgtagtttcttgcccaggtcatgcagatcatggatgatggtagtagaatttactttgttaattttcggccaacaaccgtgctaattacttgacctgtattgtttttcttagtcttcttatcattctccccattttctaggtgaagaaattgagccttaaaggttaaggcatttgcggaaggttcctcagtttgttagt

SEQ ID NO: 5801 - DNA, 2005 bp, Homo sapiens
caattgcagggagctcaggagataccccacccaccttttctttcttgctgttggctctgtgtgttgctggtagctgttgctaggctctctgtctccctttactttttctaggggcttcctttgctatttgccagcttggaaagaagggtgtgctaaagctaaaattgagcatgtcagcctggcaagtcacattggtggatcccacacatcagcaagattttgcctgtaaagtctcttgatgactctggcagaagaggtcatttcaggggttggccaactccagactgccactttgttgccttgccaggaaggttgcttttcaaatagataagtggaaaacctgtaaatctgtttttttcacctttgtcagaagatggacattctatacattaggttttactgtttttttgagatgggttttgttctgttgcccaggctggagtgcagtggcgttagctcactgcaaacctccgcctcctgggcttaagtgatcctcccacctcagcctcctgagtagctgggactatagtcgtgtgccaccatgcccagctaatttttgtattttttgtagagacagggttacgccttgttgcccgggctggtctcgaactcctgggctcaagccatctgcccgcctcggccttccaaagtgctgggattataggtgtgagccaccatgggttgccccattagtttgtaaagaaacttttttgttattgttttgttttgttttgttttttagtatggtttaaaaactgatctgagaggcagtttcataaaagaaattgtaaaatgttttgggccatggtaacaactctgggctgagtctagtctcccatggttatactacttgcattaaaaagtacttcactgcagacacattatcccttattggggatgtgtagtggggcttcagacacattgtcccgtactggggatgtatagtggggcttcactgggtatggtgtatttgagtggcttgctcagcagagatgtgtgagcagcttagacatgtcagctggctcctggtactgagagaaatacagctgggcacagtaaggagaattgttagcaactacaatcacatccgtgccagtttgctttgtgagctttgcagaaatcccagttgggtggtgaaatgcaagtcacttctattttggatgcctctgattatagaccttctgactgttgaaggctgactaggaaatactctgcatgggagttctatgtaatatagctatatgtttcaaaactgtgagtgcagtgcttacaacattttataagcaagttctttattttgggtggatgcttctgttcttggtggtcaataaggaaaaagagcagttattaaggatattttgtttatatttggtaagctccttgtctcacactgcagatttaacatgaatcagaggaattagtgtatgggtgggtaggatgagttctgttttttgcttctcaagaaaagatttcactccaaatttagaattctgtctattaatgattatatgatcttaggattttaattgactttcaggattttattggatacatttattccagttagtgcaatgataataatcctttaaattatttctggttcttacagtaggtttgtaaaatttgtgtagttgtttaaaagtccaggttttacagctcctcgtctgtgtatcctgtcaaagtcccggaggagaaagaagtcatggtgctgtgtttaatccagtttcaaaaatttcagacgcacatatttatcaaggattcctttcatttacagtgagtgttaacttttgtcagtttagggataatcttatttttccacagccttttttccctcaagctgtgaaccgttattgcaccatgtagtgcttgttgctcttttgcttgcaaagtgatgataagcagtttatatagcattagagattgtgttctatattctgaaagccaaagctgatgttattgaagagttacaagttgtttattcactctaatgttagcaaatattcga

SEQ ID NO: 5802 - DNA, 1033 bp, Homo sapiens
ttttttagcagcttatgtaacttgaaatgaaattaccattttttgttctaaaactgcccatttagtgtgttgatagggttttgcttttggcttcagttgatttcaatagatgacaaagatgcagaaaaggtttttattttcatttttgcatgcttgttcacttccatggcactttaaaatgatgcacactctggcttagctgcaagaaagcttgtattacaaagatagaaaccaaaagccttttctggaggtgtttttctttttgctttgtagataagtcagaagaatcctgtgaaacctaaagacagtctaccacttgcatagttgggtagttttcatttttgttcttggagttggatctgagcagtacagcagtagcagcaattaaagcatgttagtgtatggtaaacacttatgcttgtacatcttaagatgttgctttgttggtcaaaatccgattttaaaagttgagactggtgcagtggttttgggaattaacacatggtaaacagctctgttcccagcccccaattctccatgactccgcgtgggggtagctggtgttgtagcgcatgtttgaggacgtggatgtggcaacgggaagcgtgcttcacatggggtgggtccacagagcctagcatggttggctgggtggtgcttcttcagaaaaatctgcgcccactccttaacctcttcatgttttactcatactctgctattgtgggtttaggtttggcaataatgctgctacttacattgagaacctaatagggaaaaaagactgggctttgtagttgcaacgattgctgggaagatgcaacaagtttttctagcttcttattatggtttactgtgatccattctcttaaaactattctttcttataatcctctctctctctccttaacagatgaggagttgatcatgccactgccctgctcacaatccctgagtggcttctgttgtggttagagtaaatacatactcctccccgtggctcagagtcattggtgtctgtcccctgcctgccatg

SEQ ID NO: 5803 - DNA, 1517 bp, Homo sapiens
cccgcaagaagtatggatgtcatacttccctttacagaacaccaccataacatctgtactcattcatgatacctacaaatgtgaccttaagcaagtcttttttttttttttttttaaactcatgatttttcttgctgtttctgtgaaatctaagaggagcagcttgtctgcttgtagctcagggacagaatagcattgtgtgaggtggtccacatatttattgaatactgccagtgcataaagcattctacctggagctggagagaatcacacaagagagtagaagagagttatgtatctgctctcaaggatggcaggattcagtggagaaagaccagactgtactgcatataggaacaaatgaagttgaaaagattaattttcacaactaacagtcttccttatcctgctcatgggtaaagattaccatttaatttgtagcagtagtgagtcggtgccatttatgaccacttcttgtcaagctcacacttgagacaagtcaagggccaaaaaggcctgacctgtagatacaacaagccacttgtagatttaggtggttaattacttatagagacagagaaaagaagaagaaggcaaagatgccagcttcctgtagttcttgtctagcataccaagaagggtgacactgaaactcacagctgatgaccgtgagccacaggattccggctcctgaggagctagatccagatggcagctaagtgggtttatgttctggacccttatttgaggccaggtgaagggatgcccagaaagccccatgcttcaccagaacccaggaggcaatgaggacctgtctcccgtcggctgccagggaagtagggaggtgagtgggcgctgacatagcatccctctcttttgtgttcctggagggtcataaggtgttcttccaagacagacaaagcatctgtgcttcaggccttgcctacatggcttattaggtaagtgcggactgccagggatttgtggcagagctgttcccctgtacttctttggacttgtagtgtgactgatgtctccacataacagataatcacatcacctctcagtgttactccccagctgttttgcctccccctgtcctgtcccctctgtgggtcgacagatgctgttgtgtgaatcaggctgttcttggggcctgttttctgtctgcctcctctttatatctgacatgtaaacatggctgtcattggtttgagaatcctggttcaggctctccctgtacatatttggagccactggactgtggcagatactgcctcattatttgtagatggctgtgttttttgtttatttgtttaaaaaacaaatttgtggtataatataacatcaaatttaccattttaactctttatttattattattattattattatttttttttgtagaggcagggttttggtatgctgcccaggctgatcttaaacttctgagctgaagcgatctgcgcgccttggccttccaaagtgctgggattacagttgtgatccaccacacc

SEQ ID NO: 5804 - DNA, 1760 bp, Homo sapiens
ccaccatgcactagctgggagccttgggcctggtgcctatcttccttctctgtaaaatgggacagtaaaaatgtctaccttgtagaattattttgggtgtaaaatgaaataagataaagtgcttggtacaaagtaaatgtgctcaatagatattagttattattaataatattgttaggtaaaggtcatttcttgtgagataacatgggtctacatctcatggattttatagaataaaacagacactttaaaagttgggacaggttaaacctctctggaatgcagatctgaaagcagctgacttcccagggtggcttccgccatagaagtcactttgtgagagcacaccttcctgctgctgcctggagcagtgtctttgggagctgggtagggttgtcagcgtgcgcccatgtcagtgcctcttccccttagagactattgcaggtctgcagttaaacaaaagtaattttcctaaacctgaaaaaggcatgtctgaattactggatgtgaaatatttcgtttaacaaaactgactctcatgggacctctaattttgcctatactcctaatgaggcacaagaagtagtcacatacatactgcccctctcccacacctctttaaaaactttggagtgtaaatgctggcttaaggtgtttggctcatacttggaagtctgttagaaacgagttaaaattctctgaagaatgacttaggtgcatatgctaggaaacttttgaaagattggatagagtctgcaattgattacaattgaggctgtggagtctttctgcctggaggttgttagaacaacgagaactgcttatttgggaaatcagctttgtagtggaaaaacacctgcccagaaatctggagacctggcataatgtgtgcttagtctttagctgcatgaccttcggtgagtcttgttcagttttctgggcttcaagttccatcctcagctttagtattaatttatggactgtgtcgcagtgtttttcatttgcagaaactgctttgcactaaaatggaatgatcataatctttttctaatttgcagagggaaaaaagcattttcagctgaactggtaggcttttattagtttttctaatgtaaaattaaacttttttgccattctttatctgctaccaagtgctcatgttattattctcatgtatgtggtacatggcggttgtcattttatactctgttcagatgtcacaggcacacctctgctagtgaaagcattcccaggttggactgttcgcatccacatttcgtggtgtttttggagtgctctccagagacacagtgactcctcctgggggtgtcagcgcctgggtgactccctccggcattgactgctctatagcccggccccaggcgtcagggcaggccgctgtggggtgggcggtgtggcataggagtgcccttccaacttgggaataaggtagaagctttctgatgtggagagtcctaaatcagagatagatcctcaaaggggctgcagagttccttttccttggcttttcttaaccggtgctcggaggtaccagaggaagtgaggctgggagggtggggctgggcctagtgagcagggtctctgtacttccactgctcacttctgagatcttatcactatttggcttcagaagttgttcagtttctccacttttctggtgtacaggaaggagcagcagtaacctgcctattactctgaggaacttcctggtgatttacatcgtggagatctgtcctgct

SEQ ID NO: 5805 - DNA, 1028 bp, Homo sapiens
tgaactgataaatattcaggccgaaatgaccttgcagtagactgtggacagcattcattaagagtgtgtgaggtgctggtgactgtgcctgtcctgatttccactcctgtgtgagcatcagcgggacaggaacagagcaggatggtgaggcttgaggtcccacttgtgaccttggaccgtatttcctcctgccagaggcatctgccaaactattaagggcatgaacattgtttggtttcagtgatggattcgttactacatttgcaaagctccacacggtttagggaagttgtggccttaggaaagacttaaacagctgtttttgtaatccctgagaacttggattcttgctttcagaagacacagaagaaattccagtcaactttttatgggtaagagtcatgagaatataaattaagagaatacattcttggcttaatatatcctttttgagaaaactactctattgaggctcttccctatttaagtttatcttgcctgagattatcataggatttttattagtgtgctgagccggccacttaagtgagctgaagatacatacaaatttgcaatggaaaagtttctgagattaagcctactaatatgctgcttaatgtttcttgttctgcacattatctcaatttgtgtgaatattttgtaaattggacctcataaattttaatttctaatcaatatttttattagaggtgaccaaataccttaataaagtgtatttgaatgaagactcgtttaactccaaattttgtaaaccacttttaagaacatttaaaaaggtgacctgtttattctctgcattagaattaattacctggatgactatttaaatattcagggatcagatgggaggacatgcattttttagtaagccttaaagtttgagaatcactgctttagttcatacaggcttcacagtaaccccagagtttcatggtgagggtatgagcttgagagtaccctcaagcatatacatatgcatatacatgtacagtaaattgtttgttaca

SEQ ID NO: 5806 - DNA, 1122 bp, Homo sapiens
ttgcagttgcaggtgggatatggtttcctcattgagcccgttaaaagtattccattgaatggcgatgcaactgtggtctttgtgaactgtttcttggtttgtcaggtgtgtccatgtttatgaatatatctctgaatcattttgtatttatagcatactagagattctaatatacgtgtctctgaaaagtagctacatatgttaaagatagtgggaaaaaaaggggatggaaaatgaactaattgtccatggaagaaattttggattgttaaaatgaggatgcagagaagacagaggcaaattgtcaacacttgtcactaagtgatactatgcagcttctcggatgcttgtcatttgatggaaaaaagggttctcagactgtaagaaaggaagttgacaatctcaagggaaaagagtgtggccaggtcagggcctctatcttatgaaatgagttggggtatgagactagggagggggtgattctttaaagtacatttttttttttaaagaaggacttatactgtgttaattttctattgatgccataacaaattaccacagagttggtggcgtaaacaacacacatttattattgtatagtgctgtaggttggaggtctgacacaggactcagtgggcagaaatcaggctttcagtaggctgtgtttcctgttgtgggctctaggggagaatctattttcttgccttttccttgcttctagaagttgctcacattccttggcttcaggcccttcctccatctttaaagccagcagtggtagatggagttctcacatcttctctctctggctctcctgcctccctttttaggatccttgtgattatgttgggtccacctggaaaatctgggctcatctctctaccttgaagccagcagattagcagctttaattccatctgcagccttaattcccatttgctatatgaggtaatatattcacaggttatggggaaatgttctaagtattgagtcatcttgtttgaattttgtggggtactgaagttcaggaaaactgttctctccagaagtcaccagaggcttgctttcagtatagggaagtcttagtttttgctgcctcacagatgtaataaatattgcaaa

SEQ ID NO: 5807 - DNA, 1050 bp, Homo sapiens
ccctaaacacatggggattcagctgcttgcattcatttccagagtaacttcttaagactttagaattgttcagaaagcttgcttaggacagtcttgtgtatttaactctgtagtattacgtatatctgtttttaaacagtagatttgaaataaatgatagtgttactgatgactataattgtcactctgtttgatcacttggagtttttgtccaagagtccttaaaaattacaacagtgaaacagaatgcaaaccatgaggtgtaatatttttgcttggtaagtgcaaaaataatatctgtaaaattaaaacttatcacatttaagacagttgttttaaaactaaagaacaaatcaagaaaataatagttactgatttttacataactattactgaaaataatttttttcatacatggagggtgtgttaaaaaatattccttcctgggtgtctaatgtgttagatatgccgttgtaggcgaaggctttttctgtgattcgtttttaagtgaggagattgagaatctttcatatgtgcaactggaaccgttaggataggaagaaagttacacagggcattacttgtactgaaggattactctgtgtctgaaattgctggcacttggtacagctttgtctcactttgatatttgtcaagcttcaggcctgtctgcagtgctgacagactgtgtgtgcgacagaggcaagagctcctgccggctcctttgcttggagcatgcaaagggggcttgatgccttctcttgggagggggccgtggcgcctttgcagtggtaagacctcagccagaaccctggcttcttgactctcatctccagcatcacttagaacagtgcttctccattgattttgcccccagggcacatttggcaaggtctggagacattttagttatcaccactggatgggggctgctattggcatcttgtgggtaaagacatgactcctgctaactgtcctgtggtacacaggacagcccctctacccctccagtaaagaattaccgggcccagttgtccagtagtgctgagc

SEQ ID NO: 5808 - DNA, 1014 bp, Homo sapiens
ttttttttttaagatggtgttttgctctgttgcccaggctggagtgcagtggcacaatctcggctcactgcaacctttgcctcccaggttcaagcagttctcctgccccagcctcccgagtagctgggattacaggcatccgccaccacgctcagctaatttttgtattttcagtagagacagagtttcaccatattggccaggctggtctcaaactcctgaccgcaggtgatctgcccaccttggcctcccaaagtgttgggattacaggcatgagccctcgtgcctggcctgaaacattttcaaaagaagaaagtatttctggccaaatgttagcttatcaatattttctcaactgttctgattgtgtcacctcatgtgcctgttaagctacctgacccctcccttaaagtttttgataaagggatcggggaatcttgttttaacataatagtcctagatgatttttaagatcaagctagattggggacagtacttttaggtagaaaaaagatttatcaactaagattgggaaaaacctggcttagagtaaagcaggtttctttcctgcactactctaagcactttatatggtcaatggtaaattgtattatgcattgtggggaatgagagtaagaatatatatatatatatattaagtaacatttcctaaacttaactatgaaatgttctgttaaacacattttctgatgatgtttcacagacagcacactgggaaacaattacaactccctcaccataaattctgattaaaggagggtttccttccccttcatattttagcagaatagctatataaacccaaaagtatttgagacaggtcgcaatcagtttagaagtttattttgctaagattaaggacaatgacggggattaaaaaaaacatggcatcacacaagcagtttatagtctgtgcttttctccaaagatgattttgagggcattagtattcaaaggggaaaagcaggctgaaggggaaagagggtagggtat

SEQ ID NO: 5809 - DNA, 1046 bp, Homo sapiens
tttaccataagcatgtgtgagctctgaatgtcactacatatctgtcctaatgcgtctcatgttttaagtgtcttgctcctttgtctttctgttttttttttccccagcaatctgattgaaatgggaaacagagggataggaatagcgtgcgcttttggacctctggatatgtaattctgctagatttagccaaaaatttgtgtcacgttcctatagaagagagctactgacctggggatgcttaacttggggccggcttgttgagaagtcatacattacattctgtgaatttatcttttttaaatcttcgtatcgtgtcagagtctctggaaccttttttgtccttagctccctttaacctttgtgctagagaaaaggcaggtccagaatggaaagggatttcccggtaaagcatggcagcttttctcatcctgcaggtctctcttaagagagctatgcatcctggttcttagaagatggcaggtgaggaaggggcctctgatatccaaagttagacttgattgttctttagtagtgactgagtctaagggagtatttgttgtttggagctttaaagtttattgtatataagcagtatcccattatgtcagtttccattataaaaatactatactttattattggcttttacaatatgagaatgcaggtttccctaaactgatgacttaaatggactcgggagtccacatggtggtgacttgtgtgagctcatcttgcagtgtacggccttccaatattgaccgagttgaaggaaacttggaggttttctgggaactaatcttcaaatgaggcatttacagtatattgttacttttgtaggattgattatgtgtggaaaatgcattcttagatatgtcaagattccttcattgatttttaataatgaaggtctttagtaaaacctgtttttttgtttgttgtttggtttttatggaggggtgggggatggtgcaattctctgaaagcgttgggagtgaaaagctggcagtggcccaaatgcagtgctgcctttgtgcacgttcaca

SEQ ID NO: 5810 - DNA, 1035 bp, Homo sapiens
atagtccttttcctcctcaggatgctgagttccttccccatgtagcttgctgaggggttgcgggagctcccataagaatgcctggtgatgatggtggttctgaggcttcagggttctgccccttctggatagaaatgcagaggaggctgctctacagctggacagtagtgagctctgggccgccatgagactgcctgctccatgttgtatgtggggcagatgtgggagaaggatggtgggaagaatggcttccaaactgtcgattgatcagataaacaagggaggatgccaggggataatgccaagaagaggtgggtaaagaaaggaaaggaatccacaaaagggaggaggggagtgcaggtgtgcatgtgttctgaaaagtgctcatgcacatacagtttgcttattatttaaaaacttactgtgtggagttttctaagtgtattttataaagcaagataaatgtttgggttttgtgtaaatacatttagtagttaatgtatagcatgtagaattaagcatcttcttcctgagtgaactcactgccaagatccacgtaagaatatttaaagtcacagatctttggtggattctgaacacagctgtaggattccatactgaagcacagctttcctgaaaatagccaaattaggtatggcccttcccctctggccttagttcttctgcctttgtgcacgttcacttacttgagatgacttagttgagtcatctcaagtaagtgaacaaatgctgggccagtgtccaggaggaagcagcccctttgtgtgttttcatgttcctttagcatttcagaatgtggcctgacaggtaactgtggggctatatttgactcctggagagcaattctagagaaggagatgctctggccccaggccaggggtgggctgtcttctgcagcctttcctggtatcacatttaaatgttgtgctccatttgtatttggagagtgtatttgtagagtatataggtaggctatatttgtagagtgttggctgacaaaggctgaaacaaaat

SEQ ID NO: 5811 - DNA, 1050 bp, Homo sapiens
tattttattgctgctactactactactgctactactactgtagtctactacattttacagacttctcaaggtcaggcactgttcgtttcatctttgaatcctggcattaccacagcccctggtgtacatatatggtgcttagtaagtgtttgctgagctaaagggaactctttcaactccctgattttacttatgaacaaactaagaaatagaaaactgtgctttttttttttttttttttgagacggagtctagctctgttgccaggctggagtgcagtggtatgatctcggcttgctgcaacctctgcctcccgggttcaagcagttcttttgcctcagcctcccaagtagctgggattacaggcgcctgccaccatgcccagctaatttttgtatttttagtagagatgggttttactgtgtcggcaaggctggtcttgaacccctgaccttgtgatccgcccaccttggcctcccaaggtgctgggattacaagcatgagccatcacacccggctgagaattgtgactcttaaagtagtgagaactcaaaaacccttttatgttgacttccataaaactgtgaaatgccaagttcaattcttcatgcttggaagaaaacttgggtatgcaataagaatgtgttattgttgccttctctcataaaggcatcgtctgatattggtcatgagcatagaacaaaatgaacaaagtgaattatttcctatctatctgaagactgctctctgctaaacagagtatcacttagtcataaatcagctcagtgtttagtaaatggaaaatgaggaagatctcctaccaggcattcattggctcgcttttaaggattatactttcaaaatgtgagaactatcagattatgtttgtacaaaatatggcatacaaattaaataagcacagtagcataatttgatcttgctttatcccatgcacttgtggctgaatatagataaattcttgtcaattagttttgaccttgtctaaatgccttgcaatgattaattagtaggaagcaaacctaggatggc

SEQ ID NO: 5812 - DNA, 1415 bp, Homo sapiens
ctttttgactaggcctttttcttgggtcctgtcttcaggctgcatagctctgctaagtcagtttagctacaacctcccacccttgagctctcctcccccggcctacgttcagcaagaatccccctccccttgctgtctcctgtgagttattttccatccactgaccctgctccctctgcgcattggtgctaagtccccagctgccctgtgttttctgagttgagctccgtctccttcccctattaggatagtcttagcatctgtcacagtagtcctgggaaagtcttcctcaccattttaataagcgtcagagtaattttttcttttacacagatctagtaaagagatgctcctataagtatatgatgaattgaattgacttgaggaaagatgaggcaatcaaataacagtgttttctcaaaccttgctgtccgggctttttgttgtcattgtcctgagtggtgtcctgtgttttttattgactcagaaatcgtggcctggttactatttgggaaggcatgtctgtgaaccagtgcaaattggtggcgtttagtacccctgcatttcctttttaaattcaccttccgctttcccttccaccctgttgtagggacacctgccttgctcacaggttgttcctggagactttgcgtgaaggctggtgttgacctgaagccctcctgcagctcgttttgcctcccttgtgtttttccttacatcttttcccttctctggcttccatccattctctgtgaagaggcagctcactaggtgagctgtggctttagagcttctttgcattcagtagatttccaggccattttctccaggcttttagtgcatggcgaaggcatcattggatgagtatcatcaggagggaaagggcagatggctgtgtgtggactgttaaagcagtgtgtgggcacggtggcacgcacctgtagttctagccactccagaggattgcttggagccaggagttcgagatcagcctggcaacatagcgagaccctgtctctaaaaaaacaaaaaagtttacaaatctaggcttttaatctgtatataaaaaaagaaatgaaacaacagcaaaaaagaatgcagtttgtccagagacagggatgtgactggacagcaggagtgagttgagcctttctttgccagtgtttggttcagtggacccgttcttcactctccagtgctccgtgcaacttatgtttcccctcctgtaacgactgctgggaaacagcattctccaagagacgtggagctgtggctagaaatggccttgtggctatggtaatgcccaagtcttcctcatagagaccatttggctgttttctgatttctccactcctaattaaagctttagttaattgcctgcactttgagaagcctggtagagataacttataagg

SEQ ID NO: 5813 - DNA, 1043 bp, Homo sapiens
ctcagacgacaaaaaggtgtgtttctcaaatctgaaacacaaaaagattctagctaataatgttgaatggttgagggtttaagtgatcttggtatgttagatttagcagcgataggccgggtgcggtggctcacgcatgtaatcccagcactttgggaggccgaggcaggaggataacctgaggtcaggagtttgagaccagcctggccaacatggtgaaaccccgtctctactaaaaatacaaaaattagccaggcatagtggcgcgtgcctgtgatctcggctacttggggattctcctgaggaagaattgcttgaactcaggaggtggaggtttgcagtgagctaaaatcaagccactgcactccagcctgggtgacagagcaagactctgtcaaaaaaaaaaaaaaaaaaaaaaagatttagcagtgatacatgtaaaatggctgcagttagttacaggaggctctacaatacaataccttctgggataaaggcataggaatttgggttgacctcagtattgtttgagacaaggttaaggtggactatatctcttccatctgacaacctgtttctcacccctacctgggaaagaatgcagaaacccaagacaagttttatgttctactaagagatttcttccatggtcaggccatatctattgtatttagtgcagttctagcaccacatttgaagattttggcaaaatttgatagcatcttgaagaaagagaccaaggtgtttaaatctggaatggatttgctatgataacaacaccactgtctcactggcttttcctaacaagccttaatttcttgctcatatcatgggaaggttgcaggtgaactgtggctctgcagggctgtgcttggttccaagtgtcttccttcaggactcagaccaaaggagcagctcctgtgtgggtctgagacatgctgttctcatgggaaagggctggagtgcaaggtggggaagatgccatgtttgcctccatctaattggctgagggtgccaaggtcagggaggtggagaagtgacct

SEQ ID NO: 5814 - DNA, 1245 bp, Homo sapiens
aaaaaaaaaaaaaaaaaaaaaaaaaagaatttgcgcggcgggcaagaggatgtggatcacgctttgggttggggatggcataattgcagctggaggctggaaatagtggactgcttcctgggggccatgttttgcttgctgctgtatctccagtgtccagaacagtgtctggtgaatgaatggtgagtttagtcttttggtattgtgttggagagataagaaggaaggaaccaaaaaaggaagacaccaagaggtaattttaatgccattttcatgggacacttgggagctagattagaagaagccaagactagaatcggggagatgagttgcagagggaagtggtgaaggtctgaaggaaggtaggaaaaggtcggacacattccagacatatttaggggtggaggtggttggatatggggagtttaaaggggaaggaatgtggggtgaactgggtggtgagtcagtggatattggtgactgaaatcaccactgctaggaatacagtagacagagagcaaaaatagtgaaagggaagatgatgtattttgttgttatgtttagagtttgaggtgactgtgagacactgaggtgaggatatgcagtgagtcattggatatatgtgattctgccctaaaaatgtatatttgagctttatcattagaatgggtgaaattgcagagtcagactgtaaaacttggaagtgtctgggacagaagctctgggacatacagtgtaggaatggccaggggaggaagatttttgaagatttagaggggatattcttacagcgagagcacaaccagggaaggtgatgtactgtgtggaggagagcgttcagcaggagagagtggccgtcactaactgcagggcaggcaagctcagggcccagcaccatggctatgggaatatcgggagttgaggaagaaaaaggctccagtggcactgaagcgggaaatgcggtagagatttggaggctcaacttttcagaacttgactgagaagtgagggagagagagaggagttctgacatgcatcgggcacgtcgcttttgccccacttcacaaagggaggagaagcagagccactgaggctgacctggacttcactggttcccctctgcagttgagctgctgtcaaaatgtagatttgcaaataaagatatgttttttaacccagggtttttctaggctaaaaaataggcctattttttcctgtgttagtttccttgctgtgtaacaagtt

SEQ ID NO: 5815 - DNA, 1028 bp, Homo sapiens
aaactggcatttttggcaggttatgacactggtacccgtggggtgctgttcagtgccatgttacctgatctggaaacttgtggcacccgtgtgtgtgtgtgtgtgtgtgtgtgtgtgtgtgtccttgtagggtgctacttctctccttgcctacctaccgtgtactttgatgatgctgacattggtggatttctgtagatgtgctgtttagccaggtatgcagcactctttatttaaagtggagggccattaatggtggctcatgcctgtaatctcagcactttgggaggttgaaacgggaggattctttgcgtctaggagtttgagaccagcctgggcaacatagtgggacaccgtcttctaaaaataataaaataaaatggggaatccttttgattggggagaaattagaatctaattttggaaaggggcataaaataattcatgagtttggggaagcaccatgacgtataattacctagttatctcttaaatttcaaaattggacttaattgagcaaatggtggtgaagataccatagaacaaaagatttcctgttgctttctgtgcttttttattatatgaaatgatgtggcatgatttatttggttgttactgtctggttgtgaacgtgagcaacctttaacagatggctgaaatggggcccagttggaaggagggccgcggaccacctgcttttgtggccctgttgccctggagatcactccagctgtgactgttgatggcctgtgggggcaaaatcaactcttcagacaggtggcagcgggactacactctagactagaggaaaccagggaagagaaagcccagcctgagtgtagcaggaaagaaactgaagtctagggtcattaatactagccttcataacccatcaaacagtgaaagtgtatttcttgcttaaacaaaaccatgcagattaaccctcctccatcctgtggccaccttcttcagcagtaacacagagtcgagagaggcatacttactgccttactgtggaaatgaaacac

SEQ ID NO: 5816 - DNA, 1053 bp, Homo sapiens
accttctcttccacatgagctcccgtctctgtgctgcaggaagttcagaggcacggtttatcatgggtgcttggcaccactctctctctaactatgtggatcctaactccagtctcctgatggtcagcttgacgcgggttcactggatcagtgccttccagtcctgggcaggtgctctgtttctgttattctagaacccccgacccagggaacacagagcttgctggtctgccttcattttctcacctccaatttaagaccaagtaattttattttgccttcatttggtatttagaagcgtcgggtggcttttgtcagggacagtttcatgcctctctggcttttgtccgtgttgcctggtgctcttctagctggccctgctgactggagtctgtgatggactcccattttcttgagctgagtcacttgttttcctccaggatgccgttccctacagctcatcctgcttgttttcacttactttcctgttttctgcccttgctcttatatccaggcctgttagatctgaatctagtcattctgctttctcttcagaggtttctcttgacagtaaatataaatacagtaatttctgtgggccagatatggttctcagtgttgggtgaattttaattcagtctccgtaacaatcttaggtggatactcatctccattttgcagaggggaaactgaagcacagagaaagtcactgccccacagtcatcagggtgccaagtggaggagtcagggttgaagtcagaaaagctggctcctgagcctgcactcttaaatgctattctatattctttttaaaacatttttttgacttattttgtattctataaatatttttgactcatttttccatctaattttacacctttctattcttttaaaatttttttaaaatttaaatttaaaacctacagtcgtcaataaaacattattctatattcttgctggctcgtggcacctcagctgtctggaatcttctatgtggcctccttgatcccgggatgagttagctttttcatatgatattcagctacaatt

SEQ ID NO: 5817 - DNA, 2415 bp, Homo sapiens
gagagacggaggttgcagtgagccgggattgtgccactgcactccaggctggtgacagaatgagactccatctcaaaaaaaaaaaaaaattaatacttacattaatctttggtcataaacctttctggtgaatatgtttataaactaagcctgctaatttcagagaagcataatttaaattactccattactgttctttaaatgttttccacccatgcttgatcttggaagtgaaattgctcacacttggaagcatccttcactcctcccctcctcctctcctcccatcttcccctcctccccccacatcttccccccctccccctccccctcccccttcccctcccctcccctcccctcctctctctctctctctctctctctctctctctctctctctctctctctctctctctcacactcactcatccccctcctcacaccactctgtgtgtggtggtgggggagagagagagaaacatttcttgaggttgtagcacagtctgtcattgctctaacctttgaattctgtctgatctgtccgtcaaatgctttggaaatgaatgctgtatttttaacttcgttttcattgactgaactgtcattctttagagttttgatacgtgttcttcctgcagaatccagtaaagccatgctcgttttgttggggaaaaagaagcaccctaagcatcgggtcccaggctcaggcttggagcctcataggctacgttagacctcggttccaccactcacagggtgtggccttcttaggttggttacttagcctcctagttttttgttgtttttttctcctagcctctaaaccaccagagattagcctcctattgtgatcctctgtttttacatctgtaaaataaagacatcatggatttgttggtatggaagtttataaggtattcagttctgtgtctgagaaaaattatggttcattttctcttgtcaaggagtggcaccagcaaagataaggaggtcatattatggagcgaatgtcagtgcgagaatcatcttgcatatcagtaacttaaatagttgattcatgtggcgtatttttattagtataagctaacccagattgtctaagtgtaggggaaggatcattagatttgaattgtaagtgctgtgttggaatcttggctccgtgacttgctgttctgctttgggaaggtgttttaatttctctccacttcagtgtcttgatttgtaaaatgagaataatgatagctacctcttaatgtggttaagatgactgttgagatgattaaatgagattataccaaagaacctaagagtgctgatactcagtaagcactaataaatggggattctctagattttgtaagtaaatgaccaatatttctgtcaaactgcttacctttgactgaaactttgaactttagtgagaccttcatataattttcatgacacttgacttaataactgaacatactgtgctatgctttgggtataagagtatgatacttttgtgtattttgtaatatttaagtacttcttcctaataagctgttgggtagagcatatatatctgtccaccagccatcttattgagagagacaatctgttccttccactgaaagcttaggatcacaagctgaaatttccttaatatgaaaacaaaaacaagttcacattttgggtttcataaatttaattatggttaactttggaaattaaaatgttttctgaaaagtaacttttctgttctccctaggaaaaatccattattagaatgtaagagacaaaacaaatcttttaattatacagcaaaggtgccccagggctcagtgtgttcctttgctgtcttttttgccagcatcttatttgatccttaatgtgtctggaatgtggttaagaatactaaaaaatattttgaactagactaacgtgccattagcattaccaccttggttttaccagctgagtgagcattcagattcttgatgtgcatatgaggttaacatctctttaagatactgcctgtaggctgggcacggtggctcatacctgtaatcccagcactttgggaggctgaggtgggaagatcccttgaacccaggagttaaagaccagcctgggcaacatagtgagatccctgtctctacaaaaaataataaaaaagatactacctgtaaactaaggtggggtttttcattgattatctccctcctcctattgtaaaacgttttgaatgaaataaaatacatttttcctttgtactctcttctcagcttttaaatttacttttttcaagtcctagaatgtttttcagccttatttttatttatctaataaaacctctattttggggtttcttttcataccttcagtaccataagaagatttcagggtagttatttgacaggttcttgtcaaata

SEQ ID NO: 5818 - DNA, 1035 bp, Homo sapiens
actatttcagtcacagaccttgcgagctgttggtacaatcagaagcttttgtgttgaggactcagtggacatgtgctcagaggctctcattaaatctctctgggcctcaggttcttcctctctgctgtgggaaccaaatgctaggtattggtgagaattaaatgggagaacatctggcacagataatggctaagatgtttaagttcctcctcctaattatgatggtagtagtgacgatggatagtgcctcctgtagttcggaaggaggaagttaattctgggtgggaggtggtcagcagaagttccagaaaggaaggaagttcggttatgaaagagggatgaaatttggatagtggacaagagacagtttcaggtggagagagaagcccagacatgggagctggagagttgggcaggggtggggcagcagcagcagccaggccatggggaagtgtgacatggggactgggcaaggccaggagggaagcccaggagtgacttgtgggaccctgagtgccaagcagggatttggacatcgccttttggaaaggcagggctttagaaaggtgtgtgcggtggtgggatgcagtgttcacaatttcctggtgagctgatccttatgggtcccccacccctcagcaggtatctagaaagattatcttgggcataaagtgacctctgccctccctgtttgtcagaagctcttgctcctggctcttggggttaggttttctgctgctgctggctttaccctgcagttggttgaagggtttccagttagtctttggaggctgacagtgtaggacctggtttcacctgagcttggggccctgctccagggagagagctgttgtgggggtcatgatgtttctggggttgtggatctctgacttgtggcagagcttcgtggaaggacactggaggcacagcacttgctcttacccacatgttgctcttttcctccatgactttgagatccttaaatacgttacctttttagaactggtggtggctttgacttctgtacgttggatg

SEQ ID NO: 5819 - DNA, 1677 bp, Homo sapiens
aaggtgtttgaggctgtgctttgccgttcatggtgtagctcctcattcgttttcagctatcagaaaggccacttgttctggtgctccttggctcagctggcaccaggtcactgtctcatcctccagccagtgaaggagaccgccttcactgtgggaaccagcggctcgcattttaattgtgatctggtgacttctgtacagcagcagattgatgacagctttggaggggaacaggtggctcagtgtgattgaatcgttctttaactcattcaacaagtaatggccaagtacctgctctctgttggacaccatctggggccccagggcagtcacgaacaaagcagaccggagagaaaacaaagcaggaagttaagggtggggacatgggtagggccggtgtagcagaaattctggagccaggctgcctgagttggaatgcgaattcccattacttgccgtgtgactttggcaagccctttaatttctctatgtctctttcctcataggtaacatgagggtaatattattattatatgagttgtactaaataaattggcatgtgtaaaattcttaaaatggtgcctgccatgtaactactatgtgttaggtattaggacagtgcttatataaagggatgttatggtgttactgttaggtaaggtgacatccttcagatacctgaaggatatgagagctgaaccatgtgactccttggggaaggagccttcccagcagagtgggcatgcgcctggtgggtttgaggggcagagggagtgtgggggatggaggggagtggtcagagaggcagcaggggcagggcatgtccagtcctgtagccactgtgagtactttgcactctagaatgggggccaatgtggagtttgagcagacgtgctcctaatgcagttttggcaggattcctgtggcaactatggagagaatggacaatggagtatccccagggggtgcagtgtgggttagaccctgaggcatgtcaaggggcaaggtcaggggatttgctggttggctgcattgggtgggaatagcgagggtggaggatgagtgcaggccttgaagggtggagttgctccttagtgactgatgtagactggaaggaacaggtcttgagcctgttgattttgatttacatgttagtcaacaggggagctgaacgggcagcatgggagttcagtggagtcagtgctggagataatagcatgggaaccattggcatactgagggtattcattacagtcttgtggctgaggtcaccacgcagcgaggagggaagggacaaggaagcagcagaggtgtgtgtgagaaggagctgaggaggggcagagataggggcagggaggggggtgaagagagagagatggtcccggcagtcagcgagggagacattttgaggagaaagtgggcatctctagtaagataaggactgagatgtggccattgaattagcagtggccttggtaagagctggagagttgggggtgggagcaatggccctactgggcagggttccagagagaacagggaggaggaactggagcacgcaggagcctggctgaacaggaagcaaagaaatagagggaaggctgcagagggggaggctggttgagagctgtagttcggtttttggaatgagagtaattactacgcgtgcctgtgctg

SEQ ID NO: 5820 - DNA, 1078 bp, Homo sapiens
gtctctactaaaaatacaaaaaattagctgggtgtggtggcgggcacctgtattcccagccactcaggaggctgaggcaggagaatggcgtgaatccgggaggtggagcttgcagtgagccgagattgtgccactgcactctggcctgggcgacagagcgagactccgtctcaaaaaaaaaaaaaaacaaaaaaaaaaaacacgtagatttggtaactttaatgaattctttagtgacatgataatcagagaattggctacttggtgaattggcttttggcaaattggtcctaagaaatcctgcccttctgaaagctcctcagacatcttcataaacttctatttgtccctctaatgtagtatttcccagggtctcttgtttaccctcttatctttttggtttgcacacagttcctcatggcatttatgtcaactgtcgtgtctaaccatatttttctctgtactgttcaaaacccacgtattcagctgcctgctggacatctttacaatgaaggctgtaggttcccctgactcagtatgtcccagacagaacttaagaattccagttaactttctgcattttctaccctgcccaggtccctaagccaaggagggctttggattttcgtagactctcctcttctcacaggtgggcagcggtgctggagatacatttcttcccagctccaggttcagtgacatcatattggcggcttgaaatagccataatcagagtatttacaccatggaaattggtaaatgctgcaaatcagagcattttttaaacagatgactgttaaacatttactagtacaccattgcatccaggcattccaaggtgtactcagtttcacctcttacccagccttgaacctgaccactatttcctattgcagttgctgccaccttagttcagactcacagttccccacttgtgttactgcagcagcctctagactggactccctgcccttgaccttatccctctctagtccctggtctgtgctgccgctagctgacaggacttcccgtgaatcagatacgattgtgccactggcttccttaacctttctcaagg

SEQ ID NO: 5821 - DNA, 1052 bp, Homo sapiens
tccttttccttctggatatccaagagatttaggctggacgtggaacttttttcttgttccaagcaggagactaggaactccaacaaaactggttaagtagcctgctcatcagacccctccagaggctgaaggtaagggtattttatccaaagccagagtgactgctttctttcttcacacaaagaggatgacattgcagactttgtacaggagccactcagcagagaagggaccaagagttcctcatgggggtagagaagtttgccaggccagagagaagttaggttgcgagacctgccatggtttttcatgctactatcattacttgtggggaagaattgtagttcctcatgtcctttccttttctgtacttattttagttcatcattttcaaagatgtgagagcttaatattcttaaataatatgagaaagcagccaagccacatctttttccttttaattagtgtgatttttagagatttattgtcttaacaaagaatttggaggaaaaaaccctaagtttgcggaatctgtgtttctcaggagtcccttgaaataattaaaggaataaaaactatccatcccttgagtggcttgagccaaagtagaaacattaaaattcagaaataaaaatatgattcttagttttagttgcacaaccttttagaaatactgaaattgaaaaaatattctgtggctgtcctcattggggtcgtgttttggttaccgggcagtgttgaacttttgcgtggtgaaacaaccaccctttttgtcctcctcttatctagcatttaggagcaactttccactgccctgtcgggattgctttcctccgagcgctgccatggccttgctgtcctcacctcacttgcattcccagctgtctttggctcgttcgtgtgtgcaggtgtgcaggtgctggggtgcccctttctccagctgccctcagttgctcggtgtgtctccttcagggcatgtcaagtgccatagggaagacctaagcttacaccagtgattttcatgctttgttcctttgcttacatactatgga

SEQ ID NO: 5822 - DNA, 1043 bp, Homo sapiens
aagtgacggggccactgagctgttgttatgatttagcctggtaactcatggtgtgttctccatggaagttcctatgttggaagccctgatcttttgtatatagtgttaggatatcatcccttaattagccagcacaaattcttgaccacagctgcctggttttcacattgctctgacactgctacatgtggggaaggagctgttctcattttagtcagtcactgactcttggttccattgctgccattcccagagttaggggaagcacaaccactcctgctagctgggcaggcactgagggcctcttcactgtgcattctacttgtcacttcattgctctcctaacctcctcagttttcaactccatcaccttgctcagggacttctggagtagagagaagaaaggaatgaagtgaagccttgaaggagcattctacttgaagcaggaactttgtcagaaaagccctttaagaagcagactttgtatcccttagccttgtgttataatctgttctttgactttatatatacatatatatgtgtgtgtatatatatgtgtgtgtacatatatatgttttaacttttatttcaaacttacagaatgattttaatagtagtaatacagaaaactctcatctaccctttagccagattcatcagttttaaaccaatattctctcacattctgcacatccttggtcattgtcttttattattttttctgaattgtttggaagtaggttgtctgcattctgccttttctccctaatactccactgtgtatttcctaagaccaaggctattctctgtgtaaccacaatattatcaaaataaagaatttaacattgatatgtttcttctaattaactgatcatattccagcaatgttaagtggctccgtaatgtccgctacagcgtgtttttctgtggtatgggtttcactccagcctgacacatggcatttagttggcatgcacgctctatgtcctttaatctggagcagattctcagcctttctcagtctttcaggacattgacactgt

SEQ ID NO: 5823 - DNA, 1030 bp, Homo sapiens
aggaacatcttctttctcaaagacattaaactaatcacatgaaatattcctttgaaatgtaacattagattagaagaacagtcatcacagcatgactagtaaacgaatgaaactaattcctccctttcccagaggctacatggtcaaaacagaagggcacacagccttatacaagccagaaatcctggcagctaccgtctgaacctgagtttttcccatttataaaatagaatcaataacatctattttttcttgcaggactgttaacatacgtgaaaacactttgaaaaccttactattttttataaattctgaagctcttttataccccagttacaatttcttcatcagcttcaatgcttttcaagatgttaggagaaaaaggatgtattagcacttatttgctcatgagtactttcaactaggctgaagtcatttgaatgaagagctctggaaagagagaggtttggaagaatataagagagtgagattagctactgtcatgttaagtcacaggaaaacatctgagtgctttggaatccaaggtgcgtgctcatgtctctaagccggtgtggctgagtaagcggaaatgttcgggccgagtcggtaccctgagaggatcagaacaccgtctgttgcagccagttacctatgttcttagaggcttaaaaataatttttttggcctcctcaatacattttaatgtaaaacacaaatagtggaagtatctagacagtttttgaaagaggaaattttaaaaaattgtccagaacatgaataaccctgccaacctgataggagtttaaagaaactcagatagaaaaaggaaaacttttttgtttgcttgtttttttacctgtccagttggagaccacttggtcaaaacattcgggtcagtgtcagtgagtgtgagttgaaacagatgctggtgggaagtccactggtgtagactttccgcaaagatgtttggcaatatgtgttgagagcctcaccattgttaatgacttgaggtcaagtgattccaattata

SEQ ID NO: 5824 - DNA, 1027 bp, Homo sapiens
tatttccttatatcagtactacactatcttgattaccatagatttgaagttgaaattggaaagtatgagtctccagctttttctctgtcagtgttgttttggccatgccatccatgatccttgcatttccctatgaacattagaattagcttgtcaatttctgtcagcacccaccacctcaaaaattttgggattttagtaggaattgcattgactatgtagatcagtttgggaagtattgcagtcttagcaatattaagcattcaaatctcttctaacatggaatatctttctatttatttagattttctttcattttgtcaacgtttttctatagttttcagtatacaaatctgacacttcttttgttaaatttattcctaggggcagggtgcagtggctcacgcctgtaatcccagcagtttgggaggctgaggagggtgggtcacgaggtcaagagatcgagaccatcctggccaatatggtgaaaccccatctctactaaaaacacaaaaattagctgggtgtggtgacatgcatctgtagtcccagctactcgggaggctgaggcaggagaatcgcttgaacccgggaggcagaggttgcagtgagccaagattgcgccactgcactccagcctggtgacagagtgagactttgtctcaaataaaaaagaaaaggaaatttattcctaagtatttaactcttttgcatgctgttataaattgaattgttttcttaatttcatttttggtggtttattgctagactatagaaatacaatttatttttatagattgatcttgtaccctgccacattgctgaattcatttattctaataattttttcagtagattctttagaatgttacatgggaagatcacctgcaaatagagatagttttacttcttccttttcattatggatgccttttatttggttttcttgcctagttgccacagttagtacctctagtaaagtgttgaatagaagtatcacgagtgcacatccttgtcttgttattga

SEQ ID NO: 5825 - DNA, 1036 bp, Homo sapiens
tctgtattttatttatgtgtaaacattttcctttccacatgtacctttttgcgttttgtaatatttaagactttatggacattatatactgtgaataattataacattaatgggttttatctgcaagttcttaaaaatagcatggatggtgtctgtttaattttgtttttttttctgttacattttcactttgcaaatgcatttgataaaaactgtagtagtaatttcatagttcagagaagtgtaagacgtactatcaataataaacagagttctactatgggaaactaaaaaagacattcttacctcgtggcccaacttaatgggctttgtagatatttctgatgtctgtcttcaacctaaactctgtcagtttagaaatcctgtattacttggttttattttccaatcattttaatgatttaaaaataggtatataaaatcctaatcgcagtgatatacgacttcacacacattaggatgactattaccaaaacaaaacagaaaataagaaatgttagggaggatgtggagaaattggaatccttgtgcattgctgaaatgtgaaatggtgcatacggtggaaaatgatatggcagctcctcaaaaattgaacataggattaccctatgatccagcaattccacctctgggtatgtacccaaaagaattaaaagcacggattcaaacagatacttgtacaccagtgttcatagctgcattgttcacaatagccacacagggggaacagctcaaatgttcattgacagaagaatggataaacatgatggtgtatatgcatacagctgaatattattcagccttaaaaaggaagttctgacccatgccacaacatgggtgaaccttgaggtcattatgcgaagtgataataagccagacagaaaaggacgaatattttattattctaccaatatgatgtgccaagagtagtcagattcatagagaatggtggttgcccggagctgcggagagggaggaagtggggaattattatttaacgggtatagagtttcag

SEQ ID NO: 5826 - DNA, 1025 bp, Homo sapiens
agtgaccacaatagtggaggtctttatacattttggcctgtttatccctagaagtagtttggaaaattttatatcctcactacattttttttttttttttaagacagagtttcattgttgttgcccaggctggagtccaatggcgtgatcttggctcactgcaacttcgcttcccgggttcaagcaattctcctgcctcagcctcctgagtagctgggattacaggcgcccgccattagtcctgactaatttttggtatttttagtacagatggggtttcaccatgttggccaggctggtctcaaactcctgaccttaggtgatctgcccacctcggccttaatttgaaaatttttatcccaagttttagttgttgtaaaggatgttatttgcaatatattttatatagtagggttttaaagttaaaagtattcattagagactgaatataccagagtaatatgaaactcacagttacccattttcttagaggtgaaaattttacattgctgctttttctccttgaactcattattttctttctagtttcctcacacattagcctcttcttcaaaattctccatatcaaaaatgtacatttaagtcaaaattgcagtagtgttttctggatgataatgttctaatttattaaaaacactttcaggtctgagttgtcattagtacacagttgatcaaaatatagacatactaaagctgggtgcagtggctcacacctgtaatcccaacactttgggaggccgaggtgggtggatcacttgaggtcaggagttcaagccagcctggccaacatggtgaaatgccatctctactaaaaatacaaaaattagctggtactggtggcgctcacctgtagtcccagctactcaggaggctgaggcaggagaatcgcttgagcccaggaggcggaggttgcaatgagccgagatcgtgccaccgcactccagccttagcaacagagcaagactccattttatatttaaaaaaaagtcagtataaattattaa

SEQ ID NO: 5827 - DNA, 1393 bp, Homo sapiens
gccctggagatcccagctcgctctccccactgtcagcaacagcacttccttcgtggaggaagtggactcgaatcctggaggaggaaataaagggaaagggaagtcgtggagaggcagggaaaatggttaagcagcccggccctctggagtccccatgggggcggtagctgaagttggcgagcgcagcggtggatgcagagctggctgcacccagggctgggccagtgtgtcctgtaagacttcttgcattccttctgctgcttttttgggatgggggtatttttgttcatttgtttttgccctgttttgattttggtcccacagagcaggggatgtagtttgtacccaccatggcgcagacttccaaataaatagtactggtcatttctctctgcactatttctgcgcgctgtcttctgagctttcttcctcaccagtgggctgtgcttgttccatttctgtacacccttattttataccgtttttcttcaacaatggcgaaattgactgtagtgctgaaccaaaagtatccctttccctccttattcctcaccccaagaacattctagatcacatgggtgcttgtgccttccgattttcttgcatttgtttttttcctgacctgaagttgttgttacaaaatcagtcagactttgtgggctgaaggacacggtgcagcagagggtgtccctgtgagagttctgcagagtgctgggcatgtgcctggaactaccgagtaggagccatttctttgtacccctgcctaatccattcctctccttccaagtccattgttgcaagcaatattcttctcaatttttatatgtttactttaaatcaaagttagtctatttgtataaaatttttaaaaaatctaaaagaaaaagaaaaaaaacaagggtgggttgggtattccagtgggaagatcattgaagggaaaaatgttactatttactgaggtatttttcacagaatgattgaattaaaaaaaactcaacttgcattttcattgtgggtgcttagagaagttctacaaaattcaaactgtgaaggtttatgcttcattaattatgaccatactttttcattttctgacgatccctgatttccttatggactcaataagaatcttttatatcaagtaaaatgaaagttgatgatagaatatcaaatagtgaatttgatatgaaatctaagagtgtgagtcacttgcatatgtaatgctttgggtttttgcatattttcttaggtcacagtgacaggtttctgagttgtttcccttttcaagtctctgggaggccagtggcagcagcaggtctgtgtttcaccttcttcccatgtgagcttggaaaactttggcatcttaattagtcttgaatcatacacctgatcc

SEQ ID NO: 5828 - DNA, 1040 bp, Homo sapiens
aatataaaattcttatcactggctgggctcagtggcttacgtttgtcttagtgctttgggaggccaaggtggaaggatcgcttgaggccaggagttggagagcagtctgagcaacatagtaagacccgagtctaccaaaaaaaaaaaaaccaaaaacaaaacaacaacaacaacaaaaaaaacaacaaaaaaacaaggccaggcacggtggttgttcacgcctgtaatcctagcactttgggaagccgaggtcagaggatcactagaggtcaggagttcgagaccagcctggctaacatggggaatccttgtctctgccaaaaatacaaaaattagctggacatggtggtgggtgcctgtaatcccagctacttgggagactcaggcaagagaattgcttgaacctgggaggcagaggttgcagtgagctgagattttgccactgcactccaacctgggcaacacagtaagagtctgtctaaaacaaaaaaaaaaattagtcgggcctgtagcacgcacctgtggtcccagctacttgaggcgctgaggtgggaggatcgcttgagtccatgagtttgaggctgtagtgagccgtgatcatgcctgtactccaggttaggtaatagaaagagaccctgtctcaaaaaaaaaaaaaaaaaaaaaaaaaagacaaaacccacaacaacaataacaaaacctctaatggtaatattggggcatcttggtgttttaaaaatctgcctttcaaagggttatgtcttgagtctctcagtccataaatggaaggggaggtagaggtgaactggcctcatcaatctctgctagctttaaacaggtgagattatttttatattcttccttattaacatgaaactcaattgaagtgctgctgcttctgttctctccactgccaggaaagagatcctgttggaaggaagtactctttgctgtgtctgctgtcaccaggccaaggtgcacatggatggagataacaggcccacctgtgccactggctggcaggcccatgctcactttacatg

SEQ ID NO: 5829 - DNA, 1180 bp, Homo sapiens
gaggaaatattccaaaatattagtggatcttctctctgggtagtgagattatgaatgatttttatttttaaaatattataaatattatcctacattgtccaaatgttctaaatgagtttgtatttttcttcattactatttaacaaaattgtatttaaaacaatacaaaatattcaacactgacaatggaaaagttcgccagggcaggctggtgagagactgaaattgtgagctggcggcagaagctggtcagcagcagcatggattagtgtttttatttataaagctgcaatttctccaagcaagacaggcacatccacctgctgatttataccccttgtcaagggaagccaaagaacggtaattctctgatggtaagccttcctttgggatgatgttcagtcacttcactccccaaatgcttgatcaattatatactacctgttgatactctaggaaacatttaaaataactgtctttcatgcaggagaaccccgcaaatccagtgatagatacactttctttccaggttcaaaaacactcttaactgcacatgagccttgactttttggctttgagtcaaaacacttcccgggggaaccatacagctgaaagcgatagactgagtccctgcatgttgtctcgacccatgtgattacggcaggacacaaaacctcgcttggcctaaaattgtccatttgtaaaatggaaataagggattacattgtacaacaatttattatttgacccatatgtgatattaattgtgaaaacattttgtaaattttaattattactcaaatagtctacttgctgaggaagagattatcttctcatttttttttcaatctggctctaatcctaactaatccatacagtccctgaaagcaaaacatcagtcttttatatcttaagtgcctaacacagtgtctgatgcatgaatagtgttcataaagttctcattaaattgattctggattgccgtcaaccattcaatggcataaacaccaagtaattatttaattcttattataaaccagtcactgtacaaattccaaggtaaataaaagtagattctgccctcacagcctatagaccatcaaatcaattgatattgaacaaatgtatacaaatgcgatatgggttacatgaagacttgcatgggcatttaccttagatt

SEQ ID NO: 5830 - DNA, 1127 bp, Homo sapiens
gttcttcagtgaatggtcattatcatggctatcttttcccaagcatctattatgagacaaacactgtgcttgatattttcatgcattatattttttaatcctcttcacaataccatgaattaagttgctgcagcccaggaagctggagatctgaaaatgtgcccatcttgcctgtgtgtagcgagccaatttcttggaaaaggaagaggtttcttggaattgcacaggatgcttcttggcattctcacatctcaagggctttcaggaggggttttaaacacaaatacttacaggggccatgtgcgttgcataactgagtgatttctatcaggtacatgctctacctaaagggctcagacagtgctctacaccatccggttgctatctgtggaaataggagctcagaagttccagaacagatgtttcaaaaaaggttacaaacccagtcttttccatggaaacataattttttaaatgataactcatggttttggatttcaatttttttgtaaacactgtgctgaccacaaaatacttaaaatcaggttttgcacaaaatctgctgctttgagacatctgatacagatattacaaactttaggataatctgtttatgtgtagatactcatttatttacttaatgttggagggtgtgggtgtgatgattctttctgagtatgtgggggatttatctgtgttcctagtatgtggagttaactcaatcaccatacctcaggaattaatttatatctcagcattgtttacactattcccaatggaatcgataaattgatttcttctgttttctcactcttatcaatcttatcaatgctgtcatccatcattgtgagttttctctgtggacgctgttgctaccatgtagtttttctgggtcaattttggtaagtctaaattttacctgtgcatttttagcaaatgtcaaatttcctttgtgtgaattatttctcctagtaatattatttatgttaattaatttattaatcgaatcagtcctgctcatttgtatttatgaatgagcaaaccccaaaaagcatggtgattgtctctcctaggataatccagggttgtttcatattctaggaattaaatatctctggtaactttgc

SEQ ID NO: 5831 - DNA, 1070 bp, Homo sapiens
gggggcagaagtcagcttgggttcagtggagggaggtggtaccatggcattacacctggatgtcccctctgtaaagtgaaatagcataaagagtgtggtgggaggaatcactcaaaaaggcctgggttcaaattcagatttggctacttagaactgttccttaactattatgagcttccacagactcatccatagaatggatggtaatatccatcacacaggggtctttgtgaagctattgtgatggctgtagtaagatattgcacatagggcattatgcctagcaccacataagtgtccttggtggacagtgttgacacatttaatctctcaataatagtttgaggtattaatacttccattttatagacgtggaaactgagacaatgaggtgtattcacttaagactacacaaaggaggaagtggaagaataggttttgaacctaactatgaaagatggctggcaaactctcattttgtcaagggtagtagctcctaacatcttagactttgagatttccttttagcaaagtgaagctggttgtttttctcatttggactataaatattcatgatgctaaaacggaagcattggtaggatatataggaatacactgaagttgaaagaagagagaaaaaacagagggagaaagggagggaggagggaaatgaaaaaaggaaggagggaaggcagggaggggaggggaggggagaggaaggacgggaggggacctcatagagaaataggatccagtgtgaattggcaacgcacttgttaattcttttaatccactagtatgttgatgtcagctcctgggaaggatccatagcctttgatgatgataattttcacctaggcatgtttttttcccttcagggaatgtctagtttgcttaagggactctcattcctggctgctgttacaaggagaaatatagctgtgggtaatatgtatgtctatgtgtataagtgtggacatacacatacactcactcttacacaaacacacacacatgaatgctgtgaagcttatacaggaaagtaagagtgctctggcttcactgctgtc

SEQ ID NO: 5832 - DNA, 1050 bp, Homo sapiens
aggtgatcttggttaaccttaacctcttttattattattatgatttttttttttaatttttgagatgaaatctcgctctgttgcccaggctggagtgcagtggcatgatcttggctcactgcaacctccgcctcccaggtttaagcgattctcctgtgtcaacctcctgagtagctgggattacaggcacacaccaccacacctagctaagttttatatttttagtagagatggggtttcaccatattggtcaggctggtctcaaactcctgaccttatgatccgcccacctcggcctcgaggtgtggagggaggggcgctagcgggaaccggggctgcgcgcgattcttgcgggccagcgggagttccaggtgggcgtgggctcggtggagctcctgcattgatttaataaaaaaggtttcttaatatagacacccaagactaattgtattgtctaggcacattggataaggatttaatttcacacatcacaaacgatcaacatcaaattgtcagagtcgtattttataccttctttatagagctctttaatcttcttagcccactttcacagcccactatcctgaaacaagtttcagttagagcttaataggtaaaaaagaaaggtagaatgacaaaagagaaagtattaaatggtcactccatcactgatttcaggaaatcatacatgtcctgaaaagttgctgtaactttagagccagattcaggcagtgtcccaggaagccacctgtgagtgtgtgcagcttctagcatctgctccaattttatctacaaagggcttaaatgcaggctacaaagcagagttaaacccaatcacctggatccacaggaactcctgtattttctccttttcagagaccaacatcctctagaagttcaggggctaaatccttccatcaaaatcacacagtgggtttctaaaaagcagttggagtaagagacttatcagttctgcaatatgccacttttatgctgggtgcttctgcactgcaaccaaaagcaacaattgcactactgtctaatatttct

SEQ ID NO: 5833 - DNA, 1030 bp, Homo sapiens
caagtagctgaaattacaggcacgcgccatcacacctggctaattttgtattttagtagagacagggttttacttggccaggctggtctcaaactcctggcctcaagtgatccgcctgccttggcctcccaaagcactgggattacaggtgtgagccaccgtgcctggccaaatatttaatgtctgattttttacagaagaagtttaccaatccctagattagtttattacgtttatttgttgctggtgtgtactagtctagatgacttttcctacttcaaggttatgaagatactcttgttaccttttaaaatatttcttgttttggcattcacatttacatctctttcattggaatgagtgtctacttctgtatgaggtagatgtcagattccttttttcatgtggttaatgtagaattatttttgaaaacaccatcctttccccactgttttacattgtgatatttgtcatcaattatgtgtacatatatgtctgtgtgttttttgggctatgttctgttggttggttgtgccagtaccacacttggtgaaacatcttagcgtctagtagctggtttaacacattttttcttcagcaagatcctggctcttcctagttccttgcatttccatacaaatattgttagtattaataaaataacttgctgagactttctttggggttgaattgaacctatatataaatttgggaagaattacttacctttttttttgagacagagtcgcccaggctggagtgcagtggtacgatctcagcttatgcaacctccacctcccgggttcaagtgattctcctgcctcagcctcccgaggaattggaattacaggcacctgccaccacacctggctaatgtttttgtatttttagtagagacacggttttgccatgttggccaggctggtcttgaactcctgacctcaagtgagccacctgccttgacctcccaaagtactaggattatagatgtgagccactgtgcctggcctccaattccattcttgattat

SEQ ID NO: 5834 - DNA, 1052 bp, Homo sapiens
tgtgagccaccatgccaagcctatgcttcaaatttaatataattaggatgtttcttactagaatactgtgtccaacctatatagccctaactttcctggtttacattgtggccctagtatctgggcagctgtgcatggagatagccagaggaaacattttttttcttaatgaattggtgaccacattttgttgttcttgcctcctattatccgtgccctatttgcatcctggtttcttctacagtagtttatgtaaatgttgttttgtcctttgtcgttctcagtagaattggttctgtaaacgaaacctggtcctgtaatttcagtatatgctcatatctcatctttggctctcccattttcacagcagtgatccctaaaagatgtgccctagaggatatccagaacaatccaattggatgtcttctccgctgtactccacagaggtttcaaatataatggttccaaaatctttccattttctacacatccttattattgtctctgaattaaaggattagaacccagaatatgtattgcgatgaagaaaatgtcaggctctttttctacatttttaaatccaaatgagagttaaattagaattcataatgaatgtactgacaatttatttctgtgatttgtaaatataaatctgtagttctcagtaatattcttgaaaatggtaaatgatcaaatactttggagaccattggtctaaaattactctataacccatttccttggctttttttctcaagacagcaccaggccatctcctgtgctgtctgccattttgttgatgtctgcagtgtgttggaggccctcacctttgcttgtatcatggccctatgcttatgaagaacgtaatagagtgtttttcataattcaaccaacagctgtacttcctcagttaagctcaaaacagagccaactttgctcctaatgttagtctactgtgtttgtactttcaccttagtacttgtaacatattaccacacatattttcttaccactctgtgtgttctttgaacacaggaagatttttattaatc

SEQ ID NO: 5835 - DNA, 2022 bp, Homo sapiens
aagcacatttttaattgtatttggaaaattcatcacttcactgttagcaattggtagaattactagccatgaggtcaggaattcaagagtagcctggataacatggtgaaaccctgtctctactaaaaatacaaaaattagccaggcatggtggcgcatgcctgtagtcccagctacttaagaagctgaggtaggagaatcgcttgaactgggaggcgaaggttgcagtgagccaagattgtgttacaaagcttgggttacagaataagactctgtctcaaaaaagaaaagaaaaaaaaagagtagtgcccaacaacagcaaaataaaatttttttctcaagtgtccatggaatattcagaaagatagaccatattctgggccataaataagccttggcagatttaaaagaattgaaatcattctgagtatgtatgttttctggccataatgaaaccaaactacaaatcagtaatagagtgacaataggaaaatatctaatcatttagaaattaaacatcagacttctaaataaagtctggagtgaagaaggggcctcaaattcaatagtagaaatgcatagacttaatgaaaatgagaccataccgtatcaatatatgtgggaggtagctaaagcagtgctgatagagaaatttatggcactaaatgctgacagtagacaagacgataggttgcaaacccataattgactttctaccttaagaaactagaaaagagcaaaataaaacctctgttaagtagaaggacgaaaataacactggaagcagaaatcagtaaaattgaaaataggaaaaagtagagaaaactaatgaaacatagggttctttgggaaaaaatcaataaaattgataaacgtctagcaatattgatttaaaatatagaatgagatgacaaatcatcaatatctggaatgaaacagggaatatcactccaccatccatttaacagtataataagggaatcttgtcaacaactttatgtttataaatatgacaacataggccaggtgtggtggctcatgcctgttattccaacactttgggaggccaaggtgggtgtatcacctgaggtcaagagttcgtgaccaccctggccaacatggtgaaactccgtctctactaaaaatacaaaaattagtctggtgtggtggtgcacgcctgtagtcccagctactcaggaggctgaggtaggagaatggcttgaacccagggagtgggaggtttcagtgagctgatactgctccattgtactctagcctgggcaacagagcaaaactctgtctcaaaaaaaaaaaaaaaaaaaaatgacaacatggaagaaatgtaccagttcttcagaaaccacaaactattacaactcagtcagggtgatatagataatttgaatgacccataggttttcataaaggttgacataatttgaatcaaataatttaaattttaaaaacctccaaaaaaccaatttccaagtacaagagagttgtagtcctcactagagaattctaccaaacatttacacaagaattaatgatgattttacacaatgtcctcagaaaatagaagtgggaatatttattttatttatttaattagatggagtcttgctcagtcacccaggctggagtgcagtggtgtaatctcggctcaccgcaacctctgcctcccgggttcagatgattctcctgcgtcagcctcccaagtagctgggactgcaggcacatgccaccacactcggctaatttctgtatttttagtagagacggggtttcaccatattggccaggctgttctccaactcctgacctcatgatctgtccacgttggtctcccaaagtgctgggattacaggtgtgagccaccgcacccggccaagagggaacatttcttaacacatttaaaaaattattttgatgccaaaatcatacagacagtacaaaaataatacaactacagacatatacctctcataaatttagtagcaaaaatctttaacaaaatactag

SEQ ID NO: 5836 - DNA, 1086 bp, Homo sapiens
gccagctgtggttcaaaaatattaaataggaaacttcagaaataaataattcctcagttttaagttgcacactgttgtgagtagcatgatgaaattttgcactgtcctgtcccaggacatgaatcaaccctatgtctagcatacccaggctgtatatgctacccatgagttaattacttagtaactgtcttgattatttattgtcacaatatgtgttcaggtaacccttattttacttaataatggccctgaagtgccagagtagtgatgatagcatattgttataacttttctattttatgatcttgttaatctttccctgtccctaatttataaattaaactttatcataggtttgtatatttaggaaaaaacatagtatttatagggctcaatactatctgaggtttcaggcttccgctgggtgtcttggaatgtacttcccttggataaggagtgactactgtatgtatatattaatagctataataatcaagaggacaggatgttggtagaatatacacattggtagaacatacatatagaatgatggaaaagaatggaaaacctcaacattgattatgctgttatatagactatatgttcatgtctccccagaattcatatgttggagccctcaccccaagtgtggtggtgtttggagatatgcagcccttggcaggtaattagggttagattaagtcatgagagtggggccctcaagatgaggttagtgccttacaggaagaggaagtgagagcttgctcactcaccatgtgcatagaggaaaggcgatgtgaatatgcagtggccttctgcaagctaggaagaggccctcaccaggccctggccatgctggcgtcctgatctcagacttccagcatttggaaccgtgaggaaataaacttctgttgtttaagccacacagtctgtggtattttgttatggcagccgaagctaagacatttgacaaactgttgacaaaaatgcaaaagaaattcagccaggtattcagcaaatgatgctggagcattttaacgtatcttgttttgtgtgtggtaaaatatatgtatcatgaaatttgcc

SEQ ID NO: 5837 - DNA, 1033 bp, Homo sapiens
ttcataccattctttgtaattatttttatttctgtaagagtactagtaatacatctttaatccctacttttagtaatttgaaccttctctctcttttttttctttttcaatgtcagtctagctagaggtttgtatattttgttgatcttttccaggaatcagctattgtttttctgttctctagttcattaatttttactctataatctttctgctttcctgccttctgcttgatttggttttgtattgctgctcctgtccaagtgttttaaggtggaaaattagtttactgatttgagatctttttaaatatggttattacagctacaaatctctaaggattgctttatctgtgttccataagtttgagtatgtcttcatttttatctcaaagcattttttctaattttccttcttattgcttctttaacttttttttttaacttcggaatatgttatataatttgtgcatgtttgtgcattctaaaaattcctttgtcttactgatttgtaatttcgactgtggtcagagaatcattttaaatttattctggggaatgtttcatgtgtacttttgaagcatacctgctccactgttcgagtggaatgttctgtctatatctcttagatctggttgctttagagtgtcatctatatcttctgtttccatgtttatattgtgcccagttgtcctaaccattattgaaaatggggtattacagtttgcaataagtattgtagacttgtatatttttttcttttaattctgtcagtttttgctacacatactttgaggctctgttagtagtacataggcttagaattgttatgtctcctttattgattgacccttttattgttatattaataaaattcccctctttatccttagtaaaatttttgtattaaagtgtattttgtgtgatattaggatagctactccagccttataggtgccatgtgccggatatatctttttctgtcttcaaattttcaacctgtttgtatctatctcttatagacagcacatgtt

SEQ ID NO: 5838 - DNA, 1028 bp, Homo sapiens
gttttgttgttaacatgacttatagattcaaaataatataattccatgtagtaattagcaggatttcttgtagtaattgagtacgtaattctaaactttatgtggaagtagacaggaaacttgtctactttagttactctacttctagagtaactaaaactttgaaaaataaaagctgagttgtatggataggattacctgatttcaagactcaaagtaaaagtttgctgagacttggtctttttgtccagagtactttttcttcaattttcacatctagtagttttattaagctatgttttggagaaaactgttgctgaacatttttcccaggttcatgatggttcctttgaatatgtggatcaggtcttttatttttggacagttttcttagattatactttttaatattagatttattctgttgttttttcttctttaaggactgcaataacatatatactatattataattttatttatttatttaattgtagaccatctttatccagaactttctttctgatccaattttcttttttcttactcttttaaaattattgcttcttctttttcttgtttcattctcctttgcaatgctgtttattcaagtttcagtcaagtgtagtttcccctttggctctgtattagttgactcaggctgctgtaacaaaattcaacagactgggtagcttaaataaattttctcacaattgtggaggctggaagtctaaagtcaaggtgccagcagggttggtttctggttaggtctcactccttggcttgcagatggcattttcttctggtgtcctcacacagccttttctctgtgcatatgaccagtggttgggggtggtgggttgggggagaaagagagctcatgcatgtgctttccagtatcctcttcttcttataaggacaccaatgccattgtatttgtgtcttacccttatgacctcatttaaccttagttaatctccttaaagtccccatcttcaaatacagtcacactggaggttggggtttta

SEQ ID NO: 5839 - DNA, 1028 bp, Homo sapiens
ggccctggaaaggcccacacatacagcccagggctgcccagggctgttggactgtcatttcaaggctcattgtccccagacagggatctgggccctcagacttttgagaatatgaagaggagggttgaggctggagcagaaccagaatcaagctggtgtggggcttttattgatagtgtgaagattgtacactatattacatgatcagatcatacaaataatctaagattatacagtctagtgatcctagattacacaagtaatctaagcttccactttaggaaactagaaaaagaagagcaaattaaatccaaagtaacctgaaaaaacattagagtaaaaatcattgaaattgaaaagagaaaatcgataaaacccaaaactggttccttgaaaaggtcagtaaaattgataaacctctagctagcttaagaacaaacagaagacaaatattgctaataccaaaaatgaaagaggccatcacagctaatcctatggtcaccaaaaggattagaaagaaacatggacaactctgtccataaatttgataacttagctaaaatggaccaattccttgcaagacgcattctctcaaagctcacacaagatagacctcaataggcatatgtatctattaaataaaccaaagcagtaattaataaccttccaaggccaggtacagtggttcatgcctgtaatcccagcacttcactttgggaggctgaggcgggtggatcacaaggtcaggagttcgagaccagcctggtcaacatggtgaaaccccctatctactaaaaatacaaaaaattagctgggcatggtggcatgcgtgtgtagtcgaagctactcaggaggctgaggcagaagaatcacttgaacctgggaggtggatgttgcagtgagctgagattgtgccactgtactgcagcctgggtgacagaatgagactgcatctcaaaaaataataatgaaactttccaaaacaaagtgccaggaccagctgggttcactgatgtgtttttgagata

SEQ ID NO: 5840 - DNA, 1047 bp, Homo sapiens
gttggattttctcttccctgaggtgaaggatgcccggaggcctccgcaggacggcgcagaaacgggccttctgcccaatagatgcgcgcttctctcattctttcccctcagaatctcgctgtcctcacaaccacctgtggtcggcgtcgccgcggtgtcactgcgatgccgaggcgaatggggtggggggaagcgcccgcggggcggggagggaccctgcaggcgcggactccacacccagcctctggccagcgtcactcggcttgctgtgtcctcgcaggtcgcagcttcattgcctgatgtcttcgggaagtattttgaagtcatcgtggctgtggattggggaatttcttgtttccactgacctgtgaggccgcgcacgcggagggaggcaccccaggccctccggcactgtccagcctcgcctgtgtccccattagcaccagtgggcattttcagagggtccagctcatggctcaagtgacaggaagatgtaggagctttctgtcttgaatgaggattcgaaccaaagggcttaggcccagctgtcttggagcaaagcagctgttgtggggtaagaagggaagggtggggggcgagggcccaggggccctcctaggaggacacccaacccgttgggctgacacctcactagagatctagagcacgggtgggaggagcagaggctcgatttgtgtcctttccagacccccacaggctgggagctttgtgcccattcagatgtgggggcagaagagggcaaggccgaaggagcagacagcaccgcttcttggggagttgtgaaggcatcatgcggagggaagagcttagcagccaagtggaggacagcaccctccatgcctggattcgttactcgctcgttctagatgctgagctgctggcgcactgcagcacaactagagatgtacggatgcccccatcttgatcttacagaatcagaggtacagccgcgagaaaggtctgtaagttatctatttacgctttatttaaaagatgggatggggtggggtggacaggaaacgagct

SEQ ID NO: 5841 - DNA, 1050 bp, Homo sapiens
cctaatgtagaatttttgttatttttttttcttttggtactttaaaggtgccattatcttactgcctctggccttcatggtttctaatgaaagactggctgttaatcttatttcagatcctttgtacatggttagtcccttgtctcttgctactttcaagactctttgtcttctgacaatttattatttctctcagtttgaagttctttgatgttatcataattatagtttctttagagtcttggacatagagattcatgtctttcatcaatttggaaggtcttcagacattgtttcttcagatattttttggttcccttttctcctcttcgttagtaactcttgttattaacttgtgggtatgtttgatgttgtctcttggatctcttaggcactgtctatttttcaccattctttttctctgctccacagaatgagtaatccccatcagtgtcttcaattttgctgattctttgttctctttgagctccaatctgtcactgattttcactgattttaaaaaattttagttgttgtacttgtcagctccagacagtcctaattacatttttataattttctactctacattaatattttatatttggcacagcatcattctcctggtttctgttagttctttgtctgctttcatttagctctttgagcacatttagaacagatgatttaaattctttatctagtaagaccagtatcaaaggtgtctttgagtacaggttttatttcttttttctgtgtgtctgtgggtcatattatcttctttgcatgcctcataattttttattgaaaactgaacattttgaatattaaaatgtgctaattctagaaatcagattcttttcctcagaatttgttgttgctgtttattttgtattatttgcttattttgtgacttttataaactatttttgtaaagtcagtgttctttgttgtacatggtcactgaaacctctgttctattagtttagtggtcgtctgtgatttgacagagatttctttaaatgcctagagccaaaacaaaacaaaaaa

SEQ ID NO: 5842 - DNA, 1083 bp, Homo sapiens
aaacttggcgtataatcttatagcagttcccttgtttgttttgaatcacatttcaacccaaaggattccctttagcattccttgcagagtagatctagtaaaaacatactcccttagctggtgttcatctgggaatgtcctcattattgacaggcatgtttgccaggcgtagaattctcagctacagctttttctttcagcactttgaatatatcagtccagtgccttctaacctccaaggtttctgctgatgatcttttttttttttttgagacggagtctcactttgccacccaggctagagtgcagtggcgcgatctcggcccactgcaagctccgcctcccgggtttttgcagtctctattttaatttctagtcatgtgtggtcactgaattctctctctttagcttgtgttcaggtactgttttaacaggcatttttcctggaaggccaggattcaaacaacaaccaccaaaaaaaaaaaaactaaaaaaaaacccaacaaaacccctttcctattatttgcaaattggctctgtcctggggcactttttaagcacttagcctggtccatttagaacttcatcttagtcttcactgcttgcttgcactgagcacagagattagccagaagtaaaaccttcgggtcttttgaggtctttgccaagcttctcctgtcctaggtatgtgcttggctttctgaattccctaacccatgtatgcctagtgttccattagtggaatgctaagcatgtgggagttatttatatcctactgctcagggtcatttcaaggtctgattgcaaaaattaaaaaaaatttgtgcaacctcagacataaacgggctataatgtacacagtgctcttgattgccctcatttccctccaaaaaagtctctccttagcttttttttttttctttcggaattcattttagaatggtatttatctcctggatttatctatattttacaagctattcttttattatctatttttccagtttttattttgttataatttgtgcaattttatatatttagatttgtacaattctgtattttacatccattttcttttct

SEQ ID NO: 5843 - DNA, 1065 bp, Homo sapiens
agtggcagcatctggaccctgctcagaggaccctgtacagggatgtgatgctggagaactacagccaccttgtctcagtaggtaggtaggaattgtttcccatgtagaaggccagaatgcatgtcctttcttatcaatagaaacttgtggaacttttgtaaaatataataatatttaggtttgagattcagaggtcaaggacaatttatcccttttggataccagaaagaatgttttcctctgcccccatgacaggattaaatgaagtgtgtgtgtgtgtgtgtgtgtgtgtgtgtgtgtgtgtgtgtgtgtgtgtactgtttggggtatactgtcttcctccttcaggaaaacccacccagtttgtcccaagtaatacaattctcattcacagggtattgcattcctaaaccagaagtgattctcaagttggagaaaggcgaggagccatggatattagaggaaaaatttccaagccagagtcatctgggtgagttagtatgtgccagatggaatttaaaggaaggtagatcacaaagggtaagtttggataataagaccattgaaatgttctttaggaatcatgttttagaggctccagacctttggaagtaacatgttgacgtgacccaaatatgcagtgactctgaatcacccagcatctcccagtatcactttcatacacacatcttgttgttttttttaaattgtgatataaactatatagtttagccagagattaataaaattttatatatatatgtaacactcatgtacccatcattgagatgaatatataaagtgatttttcaacacccccagaaagctccctgttgtactcttcccagtaaagagcatccctccttttgtaaaattaaatatatttttctatacatgcttttttgagttgctcattcattagctttttaccatatttaccattttttacagaattgttttaaaatagcctgggcccagtggttcatgcctgtaatcctaggtctttgggaggctgaggtgggaggatcacttcagcccaggaatttgagaccagcctgggcaaaa

SEQ ID NO: 5844 - DNA, 1835 bp, Homo sapiens
tggtcccatgcctggctaatttttgtgatctcagctactggggagctgaggtgacagtcttgctttagcctgggaagaggctgcagttaactgtgtttgtgccattgcactgcagcctgggtgacagagcaagattctgtctctaaaaaataaaaagcaattaaaattaaaattacacattcaaccagtaacgatttcagcgtgaagcctgaaaaaatttgtgtttgaaaaagctctccggataatactgataaacattatttgttaagtaccattgatttaaatatctatatagggcactgagagaaaatcataggtaaagtaatggctgccaggaacatagttgttgaacaaaaacagaactgcatgaaatattttaaaattcagtgtttaacaaagaatattgttatagcaatccagctgatgtttgtgcttaaatgaattataaaaacagtcctttcatgttttttagtaaatgaacctgggaaatttgggaaggaaactttttaaaaacactgttagactgcaaactgacaatggaaaaacaatcagtatgagattatgatgggaatgagcaatttatgagggacaaacagctgaacttacctagagcgaaatatattcactctagacttgtaaaagaatggcttggttctaatctgaatctaaatgtaaagatatgtttacttcagtgataccttgtttaaaaaaaaagtgtttgttcttgggacattggactcagtatagtataggacagttgatgaaataaagggcaaatcccacagctggaatagaaccataaacctgatcctgtggcaaggatggcttgttcactcactgatttcactcttattgttgcatacttttatttctagtgaatcagagctagaaaaacaattgagccaggtgcagtggctcatgcctgtaatcccagcactttggaaggccagtgtggatgaattgtttgaggctaggagttcaagaccagcctggctaacatggcaaaatcctgtctctactaaaaacataaaaactagccaagcatggttgcgtatgcctgtagtcccagctacttgggaggttgaggcatgggaatcacttgaacccaggaagcggagattgcagtgagccgagatcacgtcactacactccagcctggatgacagagcaagactctgtctcaaaaacaccaccaccaccaccaccaacaacaaccaagaacaacaaaaccacacagaattggagcctggattataggactatgaattagaacttttagaaatttaatttgttgctgctgtgttgacttgaaaagaggtataagactggaagtgtgcacattgtcataacataggtatgaggagataatggcctaaactgagccatgccttcaaatataatgctaagtttatttctcttacatatcctcgtcaactaacctttcttttcactctgtatttcagaattaattaataccagtagaaactattcaataatgaagttcaatgagtttaacaaaggtggaaaatgtttctgtgatgaaaagcatgaaataattcattctgaagaggaaccttctgaatataataaaaatgggaacagcttctggctgaatgaagacctcatttggcatcagaaaattaaaaattgggaacaatcttttgaatacaatgaatgtgggaaagctttccctgagaattcactcttccttgtacataagagaggttacacaggacagaaaacctgcaaatatactgaacatgggaaaacctgtgatatgtcatttttcatcactcatcagcaaacacatccaagagaaaaccactatggtaatg

SEQ ID NO: 5845 - DNA, 1047 bp, Homo sapiens
caccttccaccaagacccacctttaacgctgagcattacctctcaaagtgagatttgggcagggactaatatccaaactgtatcaacatctgacaaggtgttcacaaccagaatatataaggagctataacaattctatagaaaaaaaaatctgatttaaaactgggcaaaaatctgaatagacgtttctcaaaagaagacatacaaatggcaaacaggcatatgaaaaggtactcaacatcattgatccattagagaaatgcaaatcaaaactacaataagatatcatctcaccccagttaaaatgtcttctctccaaaagacagataataacaaatgctgaagaggatgtggagaaaagggaaacctcgtgcactgtggaaatgttattagtacaaccactatggacaacaatttggaggtacctcaaaaactaaaaatagagctatcatacaatcccacaattccactggtagttatataccccaaagacaggaaatcagtatattgaagatatatctgcaccgtgtttactgtagcactactcacaatagccaagatttggaagcaacctaagtgtctaacagcagatgaatggataaataaaatatggtacataaacacaatggagtactattcagccataaaaaagaatgagatcctgtcatttgcaacattgtagatggaactagagatcattaagtgaaataagccaggcacagcaagacagacatcatgttctgacgtatttgttggagctaaagatgaaaacaactgaacttatagagggtagaaggatgtttaccagaggcgggaaaggcagtgagggcatggtgagggggaagtggggaatgttaacgggcacaaaatgtagaatgactaagacctagtatttgatagcacaaggttactacagtcaataataattgtgcattttaaaggtataattgaattgtaacacaaaggataaatgcttgaggttatggataccccatttaccctgatgtgattattagacattgcatgcctatatcaaaatatatcatg

SEQ ID NO: 5846 - DNA, 1035 bp, Homo sapiens
tttttaggtgctattgtaaatggagtcacttcctaattttctttttggatttttcgtcaatggtatagcaaacaaaattgctcatcttgtacccataatcttgctgaatttgtttattagctctggtggttttctttggattctttggaatattctacatataggttcatgtcatctgcaaatagagatatttttacctctttctttctattttggatgtttttatttttcctatctaatagctctggctagaacctcctgttaaatagcagcataaaaaggagtatccttgccttgttcttagtgggaaatctttttagtttttcaccactgattatggtgttagccatgggtctttcataaatacccttggtcatgtagaggaattattcctttattcctagttttctgaaagtctatcatgaaatagtgttggaatttttcaaatgccttttctgtatcaactgaaacgatcatgtataggtttttccccctttcttctattaataatatgtattgcattagttgatatatttgtattgaaccacccttgcattgctgggataaatgctattcactcataatgaataattcttttaacggactattgaattcaatttactagtattttgtttaaaatttttgcatctataattgtaagaattttgagtttcagtacaatatttaataaataaagtaagatagtcaacactttattataaaataggctttgtggtagatgatcttgccctgctgtaggttaatgtaagtgttctgaccatgtttatatgggccagataagccatgatgttttgtagatcaggtatatcaaactcattttcaacttgtattttcaactttctttatggagatgtaaccccatggtaactcaatgtgcatctgtagttggtttactgtattgttcaagtcttttttttttttaacttttcatctatatgattgatctatttgtgactttaagtagagcactgaagtcaccagctattatcatagaattgtttatttctcccttcc

SEQ ID NO: 5847 - DNA, 1118 bp, Homo sapiens
ttcgctcttgttgcccaggctggagtacagtggcacaatctcagcgcaccacatcagcctcccaaagtgctgggattacaggtgtgaccaccatgcccaacccacaacaggcgttttaatagtttatgaggccattgataaacagctagattggacttagggataaattaattaagccctcatattttattggtgaaaagacagatcccgagagacaatgacaaagatacttgatttctactgttgggttgatcctggaacaatctgggcctgaactgtgcaggtctactttcaggggatttttaaaaataaatgcagtagatccatataggcagtttccacatttgaaaccaaatgtggcaagaaaatacagtattggccaggttccaggcctacatgcacagagggtcaacttttcctacccacaggctccacaaggctgacttcaggacctgggcctgcatggatttgtgccgagaccagctcggtcgtggagactccaaccgagcggcactagaggaatgaagacaaagacaaagacacagaaataaagtgcaaagtgggaatcggggataacagccttcagagatgagagccacaaacagagtttgacccacatgtttattgacagcaagccagtgataagcattgtttctataggttatagattagctaaaagcattccttacgggaaacaaagcatttttagcgaggagcagagaaacagtctctggctgattatctgcagcaaaaacatgttgttaaggcacaggctgctcatgctatttgtggtttgagcagttttccgctctgggaaggccaggtgttccttgccctgctccagtaaaccaacaacttcttgcagtgtgtgtcatagccatcacgagcatgtcacattgctgcagaaatcctctttatggccagtttctttaaggcctgtttatgacaggcttagggcctgttcccagcaaatttgggtgtccaaagtgggtcctggaactaatcctctggataccaagggacgactgtgtttaaaccatcgtttgggtttggagagattaatgacaacagtggctaagcatgggaagggtttctatggtgggactgcattggaccac

SEQ ID NO: 5848 - DNA, 1055 bp, Homo sapiens
attcagattgtagcccacccctcagcagtccctatccgcttttcttcattttgttccataacttttgacaccttccaacattctacagttgtgctttttttttttttttttttttgagagagagtctagctctgtcgcccaggccagagagcagtggcatgatcttggctcactgcaagctccgcctcctgggttcacaccattctcctgcctcagcctcccgagtaaatgggactacaggtgcatgctacgacacctggctagtttttttgtatttttagtagcgacggggtttcaccatgttagccaggatgatctcaatctcctgacctcgtgatccgcccgccttggtctcccaaagtgctgggattacaggcgtgagccaccgcacatgcccggttttgctaatttctttagtgaactatttgctcttctgcacaaaattgtaagttccacggggatagaattttttttatggctttattctttgcgttatgtccagtgcctagaaaagtacctggtaagtgttgtgaagtatttcctgaatagaggttgaatgttgtgataagtttcactgtgactcctcatcttgtacctgcacttgcaagtttcttcttgtctgcctggggcgttgcgctcagcaccttcagcccccaccactcaaggttcctgtctgcatgagtgtaatcaccatcgagtgtcaacagcaccatccctttccccactctcattcagaagctcctcatctgctctgggatgggacaaactcactcttgtgtcatcattctgccaagtttattaaaactcaaaatgtgagtgtctgctcttttctttctctttgtccttttgttaaaacttcccctttgaaagaggagatgccaaggtttagactaaatgggagagaaatagtgggcaactggagaacaagggaggaaaaccacattggttaatctatcaaatcattacatttctatatgattaagcataaaataaaatgtctttgaagaagttatgcagtccaaggggtctctaactaatgagcaggtcctgaagga

SEQ ID NO: 5849 - DNA, 1034 bp, Homo sapiens
aaataaatgagatgataaatttttataaatgatcacatcttttttcttctctccctctatagatttacctttggagtccaacccttctgaccatccagaggcaagcacaatattcctgagaaaatctcaaatagatggtgagacaacattgttttttctgccaagaaaaaaaataaaagtcttgttctttgatcagctgtattatagaaagtatttagaaactcatattggtttaattttttcaacttttcacatatttacttgtcttattttaatatgtgatatactttttttaagttgttactgtgttagtgaaatcatgtaaactttttgtttatacattttgccatctttttatcaatgcaatttgtcatgtgatggaggagtcatagatttatctttatttataattctttgccccttttcccttgctccaaagagtacattttaaagatagaacttaggcttcagcttggtttccagttaaacaaataaaagaaaacatagttgttcatcagcagagattgaatctgtgattttggactcctcttgcacagtcccctgatcacatgtgtttatcacatccaagtttatgcttcttgaaacttttaagttattaaccttttcatctaatgtagtataaatttaaacatgccccactcttgcttattttccttaatgttatgttaaatcctcacttgtttgctaaaaagccatacacagccaagttttccagttgatttaagcagcaagaatacaagtgaggatctataataatatgggaagtaatgcagcacagtaaaatatgggagtttgtaacctttctttttgtagtttgagtagactttgcctgtcttgagtcaggtatttctggttagaatttgtgttcagttttgcattactataaagaggtacctaaggctgggtaatttacaacaaaaagaaatttaattggctcataaatcttcaggctgtacaagcatggcttcaacatctgcttctggtgagagcttcagcaaacttacaatcatgat

SEQ ID NO: 5850 - DNA, 1088 bp, Homo sapiens
ttcctacattgatgtgaagcatttttaaagacactttagagattagtcctttattggttcatttctattgtaggttgttgtttcctactctggtctttgttgtttaatttcagttttaatttcttgcttggtttagttcatgtaacaatatttttcttagaatatttgtatctgtgtttgtgaaacagaacatctattatttctgggttttttattgtctgatcagattgtgtattaatgtaatgctggcttctcgaaacaaattgaaaaaccatccctttcgtctttctctttgagagagagtgagcagtgtcaatatttttttcttccttaaatatttggaacattttcaaagtctgatcctggtgttttccttgtggagcattattgttgatttgttggatttttaaaattagttagttaattttgtttaatatatataggagtgttcttattttatgctatttttgtgccagttttagtaagttgggttcagcatctgttgcgatctctgttgtcagacttttgatcatatgtatttcacaaaattctctgattatcttgttataatactgttatgtagagttgttgttttgattctgatactggtcacttgtgttctttcatcttttttccttaatcagttttgcctgcactctccctggatgctggaggctggaggcagtgacgcagcaacagcgcgaggcgactttggagcggcctcatatagcgacctcgccttccgctgcgcgtcctcccagagcccaagaagcccggaacctgtggcatccatctctgaaaggagaagacggcaacccagccgagggtgagtccgggagtctggggtgccggcagcggaggaaggacaagcaggagtctcggcctcccggggagaatttcacaaaattctctgattatcttgttataatactgttacgtaggctgttgttttgattctgatactggtctcttgtgttctttaatcttttttccttaatcagttttgctagtggtttattaactatgttgtttataaaaacaacttttagccttggtttatttgtgttatgtttttttttccatttcat

SEQ ID NO: 5851 - DNA, 1023 bp, Homo sapiens
agagaaacaggtatttatcaatcttcttgattctggtgctcatcacaaggctgcaagttactcagttccaccgtcttttgcatctgtggttgtggttgaaaggaatggcctgaatcatgcacctcataactcacagagtggccccatgccttccagttttctttttttttcactgaggttctgaattacccatgtagtttaaggagttttgttgttcttcacaattctgtctgtggctaatcttatgtccatgggattcatttgagtctggaacatgtcccagatggcaagatgcagcatgccatgatattttcaaaatccatgaacatggttgtttggcagttccacagtaaatatgtatttggagccttaagctatttctttcatgatatatgctcaggtactgatagcgacactgttgaattctacttgagccctgaggcactgggaaactgtgatggttaaagaaatccccaccttgtgttcctgccttaccgcaaagaattccccttccccgttgacttagctaagactcacggatccccctcaaaggatgtcccacctatgacaaggtcagacacagacccccccaaatgctgtccttgtttcatgaaagtttagctgaactgcttgtccccacagattcatcaggatataatgctaattaactcagctttgatatgggctttaccatgtccttcaggacctgcttattagttagagaccccttggactgcataacttcttcaaagacattttattttatgcttaatcatatagaaatataatgatttgatagattaaccaatgtggttttcctcccttgttctccagtttcccactatttctctcccatttagtctaaaccttggcatctcctctttcaaaggggaagttttaacaaaaggacaaagagaaagaaaagagtagacactcacattttgaattttaataaacttggaagaatgatgacacaagagtgagtttgtcccatcccagagcagatgaggagcttctgaatga

SEQ ID NO: 5852 - DNA, 1071 bp, Homo sapiens
tactttaatcattatgggattgattgctgtcacagctactgccacggtagctggagttgctttaccaacacagtacaaacagcagattatgtaaataattggcagaaaaattctactttgctgtggaattcccaaactaatatacaccagaaattaaccaatcagattaatgatctccgacaaactatcgtatggttgggagatcatgtagttagtttaaaatatagaatgcagttaacaatgtgattgaaatacttctgatttttgcattactcctcacctgtataatgaaacagagcatgagtgggaaagagttaagagacatttaaaggatcatactggaaatttatctttggatattgcaaaactgaaggaacacatatttcaagcctctcaggcacatctgacattaatgacaggaactaaagtgcttgaaggagctgcagatggattagcagctattcacccatacaagtggatcaagacacttggagactttgtgatttcaatgatgattgtgcctttaatctgtattgtttgtctttgtgtagtctgcagatgtggatcccgaatcctgcgagaagtagcccaccatgacgaagctgcctttgcttttatcgctttgcaaaaacagaaaaggggacatgctgggaacaggccctaagcctgtcataaacaggccttaaactgaccatgaacaggatttctgcacgaatgtgacgtgctcctgatggctatgacgcccactgctagaagttgttagtttactggagcagggtagggaacacctggcccacccggagcggaaaactgctcaaaccacaaacaacagcatgagtggcctgagccttaacaacatgtttttgctgcagataatcggccagagactgtttctctactcctctctaagtatgctttgtttttcgtaaggaatgcttttagctaatctgtaacctatagaaacaatgcttatcactggcttgctgtcaataaacatgtgggtcaaactctgtttgtggctctcagctctcaaggctgttttccccctgattcccactttgcactttattt

SEQ ID NO: 5853 - DNA, 1044 bp, Homo sapiens
tagctataagtgtaccaaaaaagtctacttataaggttgataccttttactctattttgaaaatgagtttactatttatttatttgtttattttttaatgaataggactcaggatttgaagacaaaaaagcatcatattccagtggttgatcgaactccactagagcccccaccaatagtggtagtggtgatgggacctccaaaagttggaaagagcactttgatacaatgcctcattcggaactttacccggcagaagttgactgagatcagaggccctgtgacgattgtgtcaggtaggagatgccaccacagacacagagttggcgtggctgttgtcatctgagggacatgcatgcgtttgttgttttcttgagtggaacatgttaaatattgtcatatcatgggacttctcttatacttagtattactaagttggctatagcttcagaaaagggtaagttcccagagataaggatgtgataatgttcacatttcctcccagcactctgggaggttccaaggcaggaagatactcgaacccagcactcgggctggaaaatcaagctttgctgctcgattgcgacaccagccacagtcctcttcctccgtgtagaaggatgtgtggtccagcctcttaaggtgatgctttccttttcttcctggtttcctcctccattttttgtatgagaaatgataatgttcactatgtcttatcctgactgctctttggctttgccaaacatgttccttggaagggcctagcaggcctagtcaccgtgaacacatcatttaacagatagcacgcacctcctatgtgccaggtgcatatgcttgccttatgaagccacattctggtggaagtgcgagttttctctttttcctgtgagaattgtctgctttgggagatggtgacctttccgagtttgagggaaaatgaaacaaacttccagtggtagaatggcaatgtacactctgaaatctcttgttattgcaataatatagttggattgaggcttttctttatctttggagcatccatat

SEQ ID NO: 5854 - DNA, 1054 bp, Homo sapiens
agtagctggtattacaggcgcccaccactaggcccagctaatttttttgcatttttagtagagatggggtttcaccacgttggtcaggctggtctcgaactcctgacctcctgagccacgtgcctcggcctcccaaagtgctgggattacaggtgtgagccactgcacccagcccatgcttgattttttaatcagtttgtggagtgattctccaaaggatacttgtttgtaagtttcactgtgatgtcatggatataaatgtagttgatgtgccttgtgctcctgcacctgttatcccttattgaagctcctctttatcccacctgtggcctgtaagagtctgtgcacaccagctcctgagtccttatgttacaatcatagtcattctttatcaattcttgctctatgatatgagagagcgcttggaatcacccataagaaatcctgatttcttttagtaggaaatggtatttcaacgtgacagcctaggcataggaatgctactgccatgagttggtcattacttctaggccttctcagtgacctgaaccaggagagctcatatagatatttccagttcacatacaggactacatcttactcattcttccactggagaattattccttggttgaatcagcagatgatgaaattagagaatcacataattactcatttgctttatcccatattacacacaaaatagtgtcagaataatatgactactgaaaacagttaaagatttttttcccttatatactgtctcatttctcttttcaaaagtgactgtgccattttacttacccactggcactgtaggtgggttccagtttcaccagttcttcaccagcacttgctattatctgtctttgtgattatagccatcctagagggggtgaagttgtatctcattgtagcattgacttgcattccctgatagataatgatgttgaacatcttttcatgtgcttattggctatttgtacatattcttcatattgtttgcccatttcaaaaattggattacttagttgtatgcgttgtttatatattc

SEQ ID NO: 5855 - DNA, 1075 bp, Homo sapiens
ttattgctaaggccaacgtcaagaggctttctccctatgttttcttctaggagttttatggtttcaggtcttatttgggtcttgggtcttgtatctattttgagttgatttttgtgtatggtgtatgatcagggtccaattttattcttttgcatgtgaaaatccagttttcccagcactattattgaagagactgtcttttttaccattgtgttgtcttgtttgcccttatcaaaaattagttgacagtatatgtttggatttatttcaaaggtctctgttctgttccattggtctatttttttgtttttatgccagcaccatactgttttgattactatagctttgtaatacaattttaaatcaagaggtgcgatgcctccaactttttctttcacagtaatctcttggctgtttggggttttttgtggttccatatgagtttcaggattgttttttcttttattttctttttttttgaggcaaagtctcactctgtcgcccaagctgtagtgcagtggcataatctcggctcactgaaacctctgcctcctggattcaagcaattctcctgcctcagcctcccaagtagctgggactacaggcacgtgccactatgcccagccaatttttgtggttttagtagagacagggtttcactatgtttgctgggctggtctccaactcctgaccttgtgatctgcccgctgtggtctctcaaagtgctggaattacaggcatgagccactgcgcctggccaggattgttttattctgttctgtgaagaatgccaacagaactttgatgaggattgtgttaaatctgtatatttgctttgggtagcgtgaacattttaacaatattaattcttctgatccataaacataggatgtctttccatttgttcatgtctaaatttctttcatcaatgttttatggttttcaagtgtacacatctctcaccttcttggttaagtttattcctaagtttttgtttttctttgctgctattgtaaattagattattttcttgatttgtcacctaggttatttgcatacagaaatgcaactgatt

SEQ ID NO: 5856 - DNA, 1033 bp, Homo sapiens
ttagtgcttaggatgcgagtgtgtggtgtctgagagcattctgatactcaccggcttttgtccttgtcagatccttgcactgctggatgctctgagtacggtgcatagtcagaagatgaagaaggccaaggagcagcggcacctgcacaataaagagcacttcagagccaagcagaaggaggaggaggagaagctgaagcggcagaaggacctcaggaagaagctcttcagaattcaggggcagaaggaaagaagaaaccagaagtccagtttgaagggggctgagggccaattgcagtgagcctttggactggagggactgtccctggatctgcggaggtagacagtttcaaacatcacagtttgaatgcctgtgaatgacaagtcagtgggaaagagctcaagagatgtctctactcaaactgtgcctgcaggaggaggaacagagaagcctgggctgctgggactgggttcattctcatgacttggggctgtcgagatttaaagtgatgtaagctgtggttatgtggattctcttactttcctctgcctgcctcagtttaattattttgtcctacagaaatatcattaaaatatttttttgttacttttggcttagtagttttcattagggatgaatgcctgacaattctttgtggataattatttatactaccaccttcatgaggagtcttccagaagagaaagaaatattcacttgaactctgagctcccatggaagattttagagaatagtgtgtagtgtttttgttttgttttttgtttgagtgacacacaaacctagatggtacagcctactgtgcacccaggatctatgggctcctttgatcactggcccttgtggacattttctatcttatttcatatgttctgcacattagtatagtgacaaggtaacagtaagtacttttttaaagctttagacttaggagattattgtctcaggtgcagagaccaaggaaatcgtatgtatcagtgagataggcttcccgtattatgctcatgcgttata

SEQ ID NO: 5857 - DNA, 1038 bp, Homo sapiens
tcatttcgtttactaaaataataaatgactaaggagagttaagaccattatttgtggtatattggccataagaagttttcttctgtcctatgttttatacagacatgttaccaaaaaaaaaaaaatacgcattgcagcatttgccacagaaagcatccaggtttttctactcattaaaaaagtggctaggactgataacctgtagtgatcttccaggttttgctgcagtgagaaaaccattactgttaaaaacctgctgtcatatcacattatccttctcaacaagcactttgttacaatggaagttctctttgcagtggagtcctccttgcctcccttgtcctaagttaaacctctatttttagagttaagaatcattaaagacatggaagagttcgcacaactggttgtggcatgaacgatagcatgtaattttataaatgtataaatggtttttgaatttttttctctgctgataaggatgattaaattcttcatgttttttctttatatagactccaaacctttctagacttgtaggaaatctgttgatgcataatacagtggaaagaattatgtgatctaatgtgcaaataatctactggaggacattggatataaaaatgttttcttaatgtgtttttcagatgtctgtgagcttttgaagttgttctttcccccacttaattttaagtctcctagattggctgagctgagcagtagaaattaatgaggtagaatgcttgagttgaataaactgggagaaaatctctctctccagtaaaccgttattactgtaacagaaacagtttctataaactcagttcccaaatggtcataagctttagttgggaaatggtgcggtaattgaaatactatgttaataaagagttataggcaatataattttcaaataattagagaacagtagaatatatgtaatacagactatgctgacgtaattttaatgtttctttgattcaagttatagctgtgtagacataatagttaaaagtattatacatagtttattgtttt

SEQ ID NO: 5858 - DNA, 1027 bp, Homo sapiens
tagacaaatgctagtattgtattgtagacaaatgttagtaatataagtcagtcattatccacagtattaaaacactgaaagtttttgcacttcattgcaccaagaattttaagtggccttctggaaaaaggtatgagatcataataaaaatggagaataaggactagggaaatagaataaaacagctcttgttgcatgtgtatgatttatattcctcacttacctgatcttggtgttcttttttatgtttttaaaaaatgtgtaaactaaaactcaaaacttgaaaaccatttgataaaggaaagaaaaaattagtagactcttagctatttttcgtattggaggaaggagaagctcatgtctgaacaaggggttatacatagtttaaaaagcacatttggcatttggaaaagtaaggaaatacctgttttcctaatacatatttcagaaagggtatggaatttttatgtatcaagatgggatgtgactcagaggttgaagaacactgctataaaatttaagatattgattgatattaacagtaataattctagatccctacccatctcctttacactcactgctagacatttaattgctgacttaaaccattttaaaaataaatgtttcttgaaagttctctttgcttgattctataaactgtgttatcacagtggtccccagcctttttggcaccagggactggtttcatgggtgacaatttttccatgggatggtgaggatggttttgggatgaaactgttccacctcagatcatctggcattagttagattctcataaagagcgtgcagtgtagattccttgcatgtgcagttcacaacagagtttgctctactttgagaatccagtgcagccactgatccgacaggaggcggagctcagacggtaatgcttgccaggctcccatcactcacctcttgctgtgccgcctagttcccaacaaacaggccacggaccagtagcggtctgtggcctgggggttagggacccctcgtatagcacatg

SEQ ID NO: 5859 - DNA, 1089 bp, Homo sapiens
ccactgcactgtgaaagcacccatagacaatttgtaaacagatcaacacaactacgttccactaaaattatttactaaagcaggcagcaggccagatttagccagaggccatcgtttgctgaccctgccctacgaccaaatgtcctttctagtgagtctcttagaagaacgaaggagctttgttttccaaagttcccaacaaccaccctggtttacctacttggcctgatttttttttaaatacctattagtgagccagtaagtaagtgagccactatggtaagtggggtgagactgtctcactagtatagagactcatggcccactccgaatctactggtgacagcagcttccctgaattcatgggctgcccagggccaggtaattaccagaacaaaactgtaccaatcaggaagggggttgggggaatggatactgggtaggcaccagataaagtctactgtgtaaggttgatcctgtgtgttacaatttgtttatgcaactgttgtcctagaatgtaagccccttgaagtcaggcaccacaatgataattagtaacctcagcttgcaccttgtacaggctttgagttctatttttatttgttttgtaaggatttaataacataagtgcatgtgatccttaatcagtcacataaatgacaggaaaaaagtatacattagaaaataatttgtttcatcgttgattaaaacttctgcttcttatggaattaaattgttttctgtttttttttttttaactaaggttcacaaaaaggattctggcttttggcgagattttggctttggaatgacttgtcagtatcgttcagatttcctgaccattggtaagtatactttacatttaaggataggactttatttactccagacttaatggtattttgctaaaaggtctcagatttgagtgttttcctactaaagtatgagtgtctaaggttagctaaaaagagaaactggatatacaaaaggcaaaataagtttataattaatgttttgaataggaaaaaaatggtcataaaaataaagtataatatttacttgttcctttaaaatcaaaacacctgtttt

SEQ ID NO: 5860 - DNA, 1073 bp, Homo sapiens
tttttaagcaaatgggtaatagtagaaaataggttagaatctatggcttgattaaaaatatgttattacattatcatgttcaggattaggattagtagtcagttgctgtaaactattttgaacaaacagaaaagaacacggaaacatttttaacagagcatttaattatgttggaatacaggatcctagctctgtctgggaacattagtttatttgagccagctctatcagggtcttcccatggtggttcagaatagatgagcatagcatggttttgtttgtttttgctttcaattttctaatttggcatggatccatatgtatttactatcctttttctaatatattaatatatgctacatttgtatttgcattactataatactttgagttgaaaaagagtttcattgtggagagaaaaagcaaatggtatgccacaagatcactctgatttgagaaaagggaggaggggaagatagtctgaatggaaatctgaaatacggaatgttttagagaaatatgtcacttgcatatagaatgttttaattgaggtataaattaatgagacaaagtgaaaaagaaattatattcagataggactgcactacattatttgtcacacatggatctgttaccatcaggtcaattcctagtatgcataaattttttaacccttttaaaagagacctatgttgaaaacccctgaaaattcactgaagaaaaatcattactctttttctcagtaaatcatatcatctgaaatattacaaatttcaaatttctaggtgctatattaattcaatattacaataactcttacctaattattcttacaagttttaagttgtggtagtttagtgatttttttaaaagatgtgtgaaatgttctctgcaaaataattcaggccactgtctccttttatatattattataattatttattatgaagaccagtgaattacgatatttaaagtgagagaacttaattatttgcaaaggtaagttacagcttgttttttgagagaatcaaatgagtttacttttgttcctgttgtttttaactagctttaag

SEQ ID NO: 5861 - DNA, 1048 bp, Homo sapiens
agagatgaggagtgccactgtgttgcccaggctggtctcaaaactcctgagctcaagtgatcctctcttggcttggcctcccaaaatgctggggttacaggcatgagccattgcacccagccttaagctatttttgaacccatttgggattcatccctgttctccccagaaagcctcatgtgagtcataagcctttacatattctctctgtgcatgtggggctgtcaccagttttgaaaaaccaggttttgggtggggaatctatctcgtatctttgggtaatatcacagataaatacagcagacattaacattttattcagtaaccactgacagtaggggaaagagctgagctccattctgatttgtgcagtgatgatcgggctttttttctttttttggtggttggatattttatacctttttttccccaaatactctccactgaatgtagtcgactggtgattttaaagggggaatgagggagtatggaggggtatgagttggggctcagtagagttggggatgtgaaaaattacaagggaccagtgtaaatgtgatgaggccagcggtgtctgcctgctggcaatggtcaaagttagattccatcctcccacagagactgggagacagaggccttatctttcccaatcactacatttcaaagcaatggctccttgagaaagcaatgttccttgagaaagacacttcttagctgtaggagatacacacttgcatacacatacacaacatgtgtatcacataaacatctcaaagggacagaggacagattcataattgtaagtcctttttagtaaatgctcttaagagagggcggtcaggagcctatggtcagatattggcaagaatagtaagttatcctggcagcactgagatttctcaggcaggcattttaatggtggggacaggggtcatcctgggaacacaggctatgctactagaagccatgccaatttgtctctcagtgcagagtttcagatggagttatggggggagagttctgcagttctcagtaaccacaacagtat

SEQ ID NO: 5862 - DNA, 1034 bp, Homo sapiens
acagtgatggggtgcttctttttgagcctgtccaataggggatccccaagctacacatgaccatggctgggaggcatgggcaatagaaaagaggctccagatggcaggcactttatacgaaataggtgtgtacagggcctcattataacttttacattgattgcatgttgacaaatagtaatttagatatattgagttcaataaaatgtgttattaatgctaatttcacctgtttcattttcccctctgtattaggccattcttgtgttgctataaagaaatacctgaagctgggtaatttacaaagaaaagagatttagttggctcacggttctggaggctttacaagaagtgtggtgctggcatctgctcggcttccagggaggcctcaaggagcctccagtcatgttggaaggcgaacggggagcaggcacttcacatggcgaaagcaggagcaagagagagggagtggagggtggtgccacacacttttaaatgaccagacctcgtgtgaactcagagcaaaagctcacttatcaccacggggatggcccaagccactcatgagggatctgctcccatgatccaaacacctcccacctggccccacctccaacactgggaattacaattccacatgagatttgggtggggacacacatccaaaccatatcacctcctaacatgtactagaagattgaaattaccagtgtggctcacatcccacgtctgctggccccacagccccacagagcccagcttgggttcaggcagctgtccaggcctccccttcctccaacattagccagggctgtggctttcccttcgggaagggagacagcgttgagggaaagtggcttactgcagacttcagggccttactcacagggccatcaccttccactgcgcctttggaaagtcagggtggggaagaagcaggcacccctcagggtggcccgcagcagccacagcaggccttgtaggaagtgatatggggaaaagcaagaggctgtacaatgccaaaagcaagtcca

SEQ ID NO: 5863 - DNA, 1043 bp, Homo sapiens
ccgtgcagaatcccctcccccttcccccgcagcccccctaccccacccggcggacagccccgcctcgcttcctgtctcttcctcccaagggagacccctgtcctggctctgactggggttgagttcgccagttttgacttatgtgtagagtccggcagcatcattttttggcatttaactcgtcacatctatttcacctaacctctttcttcttagtaaactgacactcgggtcggtctctcatctttcgtgccagtcaagcaggtttcagacaccacaaatgccgaatgagctgctgccattccttcatcttaccccgaactgccacaacctgtgaacaccttccatgtgaatcaatcagccttggagtcagaggagagaagtacacattctgagctccgctgagtcgcaggaaagggagaggggtgcccagaggtcatcactctttccccaggcctgatttttggtccgtctgctgagcctgatttggacacatctctctgcctcctgcagcaagggaacattttcatcgtggactttgagctgctggatggcatcgatgccaacaaaacagacccctgcacactccagttcctggccgctcccatctgcttgctgtataagaacctggccaacaagattgtccccattgccatccaggtaggctgctggggggcacacctttctgagcagctcagtcctctgcgatccagggctcctgggtggctccattcacactccagctgaggaagctatgtcttgaaagacactagggcttcctgcaggccctgaggtgggctgtccataggggcggagagggttctactccccaaggcacacttgagaagcccctggccagtcgaggcacactgtggaggacctgccctgggatcatattctgcactctccaccccagcaccctgaccaagggcccccagtcaaggtgctgccaggggccaggcaggtgaagctgtggactaagctggagaccaagaccactgaggggcaccatgggttctggggtcaggaaccaggccagtcct

SEQ ID NO: 5864 - DNA, 1048 bp, Homo sapiens
ctatcttaaaatttggaaatgttccagaagcaaatattgaagggaacatatttgccactttcacgattttttgccttttcccacaggagaaaattgcctaagctttcctaggtttgttatagacatctaaaggaatgagaatttaggagctacgaatagctttatcatgtgacacatttgaagaaaatggaatgctgtcacatcttttaaatttagtgttattgggatcttcgattctgtgaagattgcagatttgtcagagacctggtaaccacaacaattcattgaggcctggaggcctcttaaaaaatgagggagattatttattagtaccacttagaaatattatcttttctgtattttctgtggttttctaagtcttctgtttagcgtttctatgattataatggtggattaaatttcttgttccttctcaagagcatctactatgagatgacactggtttttacttcggcagtatttactgagcattgcactatactaatccaggtattcggtgatgtaggaaccaaaggaaatagaagtcagtttctaccctcagtgagctgagtataatttgatagaagataaggattaacgtaagcacatttatgtcctaacacaaggaagcaaatattgttagtcatttcattaggaatttcttttgtcattggggcatttggggccttccaaaccttacatctcttgccatgcctttgtactcactcgataaacctgagaaagcaagatatcttcttttctgattcctggtttaagttgagagtgtggtgcacattagtcaaaatccaaatcataagaaaaggcaaaccttatgaattcattttggaatacaacagggtatcaaaataagtatatgagaaatatgaaaagctgacagtagaaaagatgctactcaggtactaaccagagttctcaatctcctctgtattgaagctcttatgatgtaaggctggatctgtactagaaacactttttaaagtctctctccagtattgagaagtatagtcctccagtactgcctcttggt

SEQ ID NO: 5865 - DNA, 1050 bp, Homo sapiens
catttcagtcattctttttaaaatagtcttcatttgtagaagttttagttttacagaaaaattgagtatatactacagtttccatataccccagacccaatttctcctataattaacatcgtatgtttgcatggcacatttattacaattagtgaaaagtattggtacattattaactaaaatccatagcttattcagcttttcttagtttttagctagtgtttttgttttgttttttcaagatcccatctggaataccacattacattttgttgtcatatctccttaggatttcttagctgtgagtttctcagatattcctttttgtgattaccttgactgctcaaatattttgtaggataccgttttattggaatttgatgtttttctcatttttagactggccttatgggtttctagaaggaaaatcacagaggtaaagcatcatttcatcacatcctgtcaagggtatgtactgttaacataatttatgacttgattttgactttgatcacctggctgaggtaatgtttgtctgatttttccattgtaaagttactcttttttcctccttttcatactgtaatactggggaaaggtgaccatgcacagcccacactttagggagttatgtcctgcttcttgatggcagagtatctacataaattattaatatttggaatccttctgtgcaggagatttttattttctcccatttagtaatttgttcagtcatttatatcagtatggactcatggttgcttattttatactttgggttatagtccaatactattaatacttaattttgctacacacattgtttcagatttggccattgggaacccctttagttagctcctgtgcctgtgacatacttccatcggtgtgggtgttttgtgagcacttactttctggcactgcaggatactcccagctcatcttgtatgttttctaccctagtcctgggatcagccgtttctctaaggagcactgtttcctttaattagaaaatggtattagaaacaaagatctaggtgcccttgttgc

SEQ ID NO: 5866 - DNA, 1044 bp, Homo sapiens
cctgcacagggatagatacaaattttgcaaaattttaattttcacttgatagttttaattttttcattggcaataaatactgtcatttatttttcttgaagtgataggcacactttgttcattttcaagaaaatgtcttccacataccctagcccaaataacatagtttgtgtgtcattctttcaagtaaaaattgtattatttaaaaacatgtctcacaagtgcttttcctgcaatggcccctgtacttcagtatatagcaacagtgcttatgtatacttcccatttcatcataacagataatgtggatattcctcttttatatgtgctacaccagaatttaacaaggtaactgcagggagaatctgaaactatattaataaatttttcatattctattatattaaaatccatttgtctatcttgcgttttaaatgagtgttttgcccatttataagtttgaaacatcatgtattagtcatttggaaaatactgatttagtgaggcctgcagatctttcaaatgtgtttctttataccaccattgtcatagtgtggtttgaggactgacagggctagcagaaaactccatctgtatcaggtatttgacggtcaagatttatgtaattaagaatttttggaaatagtaagattgttaaatttctaccctgactgatgagtattaaaaaaaagaaccacagattatcagtatgtggagtgaaagatggacatcacaacatatatggcagatattaaaagaataaaggaatattataaacactcaaaagctaagaaacaatgtagatgaaatggaacactcttttaaaaaatattcattgcccagatttacacaagaaaacagctacgtatttattaaggaaattaaatttgcagtaaaaaagttcctcacaggccctgtgatatcatgagggaataatttgatgtggctcctacttctaaaagcagcaattctcaaactttttaagagttttggaatgtctgtgttgttaaaaattattgaatatctcaaggtgctttatatagg

SEQ ID NO: 5867 - DNA, 1032 bp, Homo sapiens
agaaatgcaggccagcatccctgatgaagatagaggcaaaaatcctcaacaaaatactagcagactgaatctagcagcacataaaaaagataattcaccatgatcaggtaggttttttcctagatacaaggatggttcagaatatacaaatcaataaatgtaattcaccacataaacagaattaaaaaacaaaaaccatattcttatgcagtaaaatccagcatctctccatgataaaacctcaacaacctaggcatcagaggaacatacctcaaaatagtaagagtcatttatgacatacccacagccaacatcatcctgaatgagcaaaagttgaaagcatttcccctaagaaccagaacaagacaaggatgtccactctcaccattccttttcaacatagtactagaagttctagccaaagcaatcagacaaaagaaataaaagatgtccaaataggcaaagaggaagtcaaattatatgcttgttgatgacatgatcctgtacctaaaaaaaccctgaaagattccccgaaagactcctggacctgagaaacaactccagtaaagtttgaggatacaaaataaatgtacaaaaatcactggcatttctatacaccaataacattcaagctgagagccaaattaagaactaatttacaatagacacacacaaacacacacaccacacacacacaatatctagaattacatttaaccaaggaagggaaagatctctacaaagaactgtaaaacactgatgaaagaattcatagatgacacaaacaaatggaagaaacgtcccatgcttgtagattgaaagaatcaacattgttaaatgaccatactgcccaaagcaatctacaacttcaatataattcctatcaaattaccaatgtgattttttttcacagaattagaaaagacaattctaatattcatgtggaaatacaatagagcctaaataggtagagcgatctaagcaaaaggaacaaagccagaggcatcatattacccaacttcagactatact

SEQ ID NO: 5868 - DNA, 1025 bp, Homo sapiens
cctcagcctccaaaaatgttggaattacagccatgagccaccacacctggccataattttattttttataaaaaaaaattttacaataaaattcagatttgttcttattgggagaacagtagaagtcattgaatgaggaatcagtgagcagattttaaataagaaaacataattttgttattgtgaagaatggatagaatatggcaaacctattagggaactattgcagttatccaggaagacatgatggtagcttgaaatgtagtcgtgtgaatggattcaagagagatttagagggaaacagtataatcaacctgttgttgataggaggagtaactcctcagagtagttgtgggtaatggaatacatgtttctaccgtttgctgagacaacaccggaagaggaccagattggtttttggatatgttgaatttgaggtgccttttgaatgtccagatggaaatgtcatgtaggcatttgagtttgaaatcagaggagagatcagaattggaactcacacttgggttttattatattgaggtagtaattgctgtgggtgtgaatgagattagccagagcaaaggaatatagaaagagaagagcagtcctgtattttgaggaattccccctattgaatatccaggtagaatagtgaatcattaaagaagcctgcaaagaactgatttcagcaaacctaggacagtgaattattaaagaagttaccgtgtgttgctttcctatggctgctttaacaaattaccagttctactggcttgaaacaacagaagtttattctcacagttctagaggccagaagtctgaactcagtattagtaggctggattcaaggtgtctgtcaccagggccatgctctctccagagtctccaggggagaatctgttcctttcctcttccagcttctgttggctgctggcattccttggcttatctccacatcactccagttactgcctacacggtcagattgcctcctccttttctgtgtgtctaatctccctctgctt

SEQ ID NO: 5869 - DNA, 1024 bp, Homo sapiens
ggaggcctaaccgtctccctgtgatgctgtgcttcagtggtcccactcctagtctgccttcatgttccatcctgtacacctggctctgccttccagatagcagtagtaaattagtgaaaatactgatagtccctgatatgcagaaataatggcgtaagctgtctttctctgtctcctctccctctctgtctcctctccctctctgcctcagctgccaggcagggaagggccccctgtccagtggacatgtgacccacgtgaccttacctatcattggaggtgactcacattctttaccctgccccttctgccttgtatccaacaaataacagtgcagccagacattcggggccactaccggtctccgcgcattggtggtagtggtcccccgggcccagctgctttttctcttgtctctttgtcttgtgtctttatttctacactctctcgttgccgcacacagggagggacccaccgaccctgtggggctggtccctacaaaagcctagtgagaaacctgcacttccaccccccactaggcattttttccaccagagcaatgtcaaaggaagcttactataatggaatattaaaagtagatccagtcacctaatgtaataacccaaatatccaggtttcaatgaaaaaaacctctcataccaagaagcaggaaagtgtcagctcaaattagaaaagacagttaatacatgctgacactgaaataacacagatactagaattatttgacaagaatttttttattgtactttaagttttgggatacatgtgcagaatgtgcaggtttgttacataggtatacacgtggcatggtggtttgctgcacccatcatcccgtcatctacattaggtatttctcctaatgctatctctgccctagctccccaccccgcaacaggccccggtgtgtgatgttcccctccctgtgtccatgtgttctcattgttcacctcccacataagagtgagaacatgtggtggttggttttctattcctatgttagttt

SEQ ID NO: 5870 - DNA, 1059 bp, Homo sapiens
ccccatcaagccaccattgactttcttcacagaattagaaaaaataactttgaattttttttttttttttttgagacagagtctcactctgtcacccaggctggagtgcagtggcatgtgatcatagctcacagcaatctcaaactcctgggcttgaatgattgtcccgcctcagcctcctgaggtctcgctatggtgcccaggctggtctcaaactgctgggctaagcgatcctcctgccttagcctcccaaagtgttgggattgtacccatgagtcatggcacctcgccctgacacaaattttaaaggagtcatcaagacagtgcttcaacaagcagttatgaacatgcttgaaataaattaaaaaaaaaggaagttttcagcatagcaaataaataggtaaagaaaaaccaattggaaactttataactgaaaaatacagtaaccaaaataaaatcttaatgggtaaaactgtagcaaaactgacacaaaaaaaagaagacacaaatcatcaggagtaaaataagagatacaggttgagtatccttcatctgagatgcttgggtccaaaaatgtttcggatttcagattttttcagattttagaatatttgcattggttgagcatcccgaattcaaaaacccaaaatctaaaaatgctccagtgagcatttgctttgagtgtcttgttggtactcttaaagtttcagattttggagcatttcggatttcagattatcagatttgggatgctccaccactctggagcctgtggacatgaaaaggatactatttttaaaaatctacagaaataaatttgacaactttgatgaaataaactaagttttcagaaagtacaacatactgcaagtcactcagtatggcatagataatttgaatagtgctacaacttaatagaactttataattttaaaatgaaaataggcccgaatgatttcattggagaattctagcaaaggcttaaagaagaatttacactatttctgtgtagtctctgccagaaaataagggaatacttcctaattcatttatgaaatc

SEQ ID NO: 5871 - DNA, 1124 bp, Homo sapiens
gaaactttattaaaagtcctcaatagggctgggcgtggtggctcacgcctgtaatcccagcactttgggaggccgaggtgggcggatcacgaggtcaggagatcaagaccatcctggctaacacggcgaaaccccatctctactaaaaatacaaaaaattagccgggtgtagtggcgggtgcctgtagtcccagcagctcgggaggctgaggcaggagaatggcgtgaacccaggaggcggagcttgcagtgagccgagattgcgccactgcactccagcctgggtgacagagccagattccgtctcaaaaaaaaaaaaaaaaatcctcaatagatgaatttaactgcagattatataaactcaaaaaaggaaataatgaactgaataattactcaacaagcattcaagagaaacagttgaaaagtacgaaagagaagttatacatatttaaaaataaatatttatctgaatggttttctgtaagagagaatggtaaacaacagttaaaagaataatggctaagaattttctgcatcttgtgaacaacactaaactatacattgaagaagcacaggaacctaaggtggttaaataaataaatcctcacttagccttgttacaataaaacagcagaacatcaaagacaaagaaaagatctttgatatatctggggaggaagacagatttaccgtgaataaggtcacacccagaagacaggggaacattttcttaaattaaaataaaaatctagaattttatactaagagaataaatccagggaaattcatacgtttcttgcagacaaaaactgagcatttgcaattaggaagtcttcacttgaaatttagaagtgtgtactctaggcatgaagaaagtgactctcagacaggaggccagagatacaagaaagatcaaaaagcataagagtaataaatatcttagtaaatctaaacaaacatttttataaaacagtaatcattttcataggctttaaagcatattaatatatatgtcaatgatagcacgtaagtcagaaggatgaatggagtttctgtaaggtacttgtgaggacagtaaagacacataacttttcagagtctaaagttaatcagtatgtgtgtca

SEQ ID NO: 5872 - DNA, 1049 bp, Homo sapiens
ttcaattgccaataatctatttagatttcttcaaactaggcatgcagttaataattcatccatttcttcctgattcatagtcatttggagtcattttccagcacatggtggtacctcaggagtttttgaggcacacggggctatttgcttcagttctgtagtaatatttatttagtgtttttgtgcttggaattgtatggggcagtggagggaaataccaggatgactaaagaggatattttcatcagcagggagctcactgcgttaattcgtttccttaagtttccttttttattattttttatttttattttccctgaaagcacacattggtatcttgagtttttgaagccaaataatgagtataatgaaatggctcattagagcttatgtttgtaaccaaccctgaggagaattttgtttttgacattgaccctgttgatattgcctgaaaaaatttaaaaaaaaaaactgaattctttagaaatattttatgcttatggctttctgttttgagttaagtaaaaaggaaaaggaattaagatttgttgaatgcttatcatgtgccagtttcttacttaatttgatgctctcaataatttggaagacaagtacaaatatctctatttacagatgaagaaactaaggaatcagaagttgcctaggatcaaagaaacagtaagttagagaggcaaactctttgtgatatcaagggttgttttttatttttttgcccaagagaaaataattattttctgaaatggcagaaacatttgtaatatcaactagttggatactttcatatcctaaagacagaaaactccaaacaaaggattgattgcctctcacagttgatctttgagattataaacaaatattcttgccaagctagagcaatcagtcatactggtatctcttttacagatacctttagaatgacagcaaacactataaaattgatttttccagagaaagtgtttgcacctaataatcttatttttcaggaataataactgaattatttcatcagtttgaaaatatagtgtacg

SEQ ID NO: 5873 - DNA, 1029 bp, Homo sapiens
ggagaatgagtttgacggattgacagaagtaggcttcagaaggtgggtactaacaaactcctccaagctaaaggagcatattctaacccaatgtaaggaagctaagaacctggaaaaaaggttagacaaattgctaactagaataacccgcttagagaagaatttaaatgacctgatggaactgaaaaacacagcacgagaactttgtgaagcatacacaagtatcaatagctgaatcgatcaagtggaagaaaggatatcagagattgaagattaactcaatgaaataaagtaagaagaccagattagagagaaaaaaaaaaagagtgaaaagaaacaaataaagcctccaagaaatatggaactatgtgaaaagaccaaatctacgtttgattggtgtacctgaaagtgaccgggagaatggaaccaagttggaaaacactcttcaggatattatccaggagaagttccccaacctagcaaggcaggccagcaacattcaaattcaggaaaatacggagaacaccacaaagatattcctcgagaagagcagccccaagacacataattgccaattcatcaaggttgaaatgaaggaaaaaatcttaagggcagccagagagaaaggtcgggttacccacaaagggaagcccatcagactaacagtgaatctctttggcagaaaccctacaagccagaatagagtgggggctaatattcaacattcttaaagaaaagaattttcaatcgagaatttcatatccagccaaactaagcttaataaactaaggataaataaaatcctttacagacaagcaactgctgagagattttgtcaccaccaggcctgccttataggagctcctgaaggaagcactaaacatggaaaggaacaactggtactagccactgcaaaaacataccaaattgtaaagaccatcaatgctatgaagaaactgcatcaactaatgggcaaaataaccagctagcatcataatgacaggatcaatttcacacataacaatatta

SEQ ID NO: 5874 - DNA, 1025 bp, Homo sapiens
acaatctttaacctctaaactaggcaaaattacttttcctttagcaaaactcacaccctcctctcttttttataactttcttcaccaaaaacacatcctactttcattgtatactttgcatacaagagtgtttcccatgtatctagtacttttaattacatatattaactacgattttaactcttagtagttctaatttcaagtgaaaaacctagaaagtaagtagtagttaactggtttatgtctgtatttgtagacaaatcatttcatggtttcgtagaaagatatttctataaaatataattgatgcctacttttttgtttattaacagatctaaagattattaacagatctaaatatatttagcttttttataccatgtaaaaacaaaataccaaattatgtaaactaaactaaaacatatctaataattaatgtttttgtatcttaatgtatgtagaaatgactcaaacattttatgattatctattactttattaaacctaacatgacttcaaaactttaaactactgaaaagaattttgaaactgcaacacagatacccttcctaatgtcttcctcagtcatactgagtcgcaactacccacgtggcacccaagtatgattatgaaggggcagggcctatctgagtcctgattttacacacccataatggagcccaggacagaggacagaactgtgaagataatgtctgactcttcccaccatagccaggagacaacagccaggccagagggagtaccacatatgtctgcagtcctcacttgttagagcccagaatctaatgagtctaatacataagctcacagacaagtcaaataagcatcaaacatatcacagaagcaatagttttatgagcttcagacatctagtagagaaagcctaaacctttctgaccagcagacccaggcaaaaatgtctgattgtgtttaaaactgacaagtctgaagacattctaattttattttaccaacaattaaaaagctaattttatttctcaaag

SEQ ID NO: 5875 - DNA, 1068 bp, Homo sapiens
gcttttgagtaccttgggaaatagtatattcttacaaagtagatgacctatttattcagttgaatgtccttgtgaaaattgacgttgctttactgacactaataatctacatgcagttgagcaagcccagaagccaactttggaatattttgaaatgtttaccattttgagtacaaagtaattttagaatcttggataccagctcactgaagtgttatggtaatatcatacccatatcatttccgttacttatatttgttattgtttaaacagtagccaaaaatggccaggcacggtggctcacatctgtaatcccattactttcggaggccaaggcaggaggattgcttgagaccaaggagttcaaggccagtgggccatatagcaagacctcatctccattgaaatatatatattttaaagtagccagaaacatgtacttactttactgccaaggatatggctgtaaagtcttgagatctttaataaataacttgaatgtctgaatgacttggaaacaagttctgaattagcttactgatttcatgtgtctggcgctatttagctaaatccaccctcctcaaaatgtagaaattgttaagggacagtttcttgttgagacagtttctgtcttagcatcattttgtggttagaatgtagtaaacctactcaaataagcccaattaagaattaaatctattttatgaataggtctttaaaaacccaattgcagaactacaaaccaggcctctttctcccctttgtgggtgggggtcagattctcctagaagagagggcaaactaggtatgattagtatacctgctagaaagaacagttaagtggccagggcaaacaaagttgtctcttggctgtaataatttttttctggactcatgggcaactaaagaaacatgctaattatactgatgcttaaaggatttgccctctattacggagggtctgtgggagtagaactgtaacctcttctttataagcgagtagtacagaaaagggagaaggagaaagaagaatcctaaatatggaggggaatcatctggaaagagctc

SEQ ID NO: 5876 - DNA, 1043 bp, Homo sapiens
ataaaggatattacaaaggatgcagataatgagatgcatagggtaaggtatgggggaaggaacacagagcttccagaccttcccagggcacgccatcttccagaatcctccacgtgttcagctatccgaaagttccctgaaccctgtcctcttgagcctttcatggagatttattggataggcatgattgacaaccatgtggaaatgggattggacaaaaagggtataatctaatactaacaggccgagtggagaaacccacaagcctgtctgtccaaattcttcttagcctttctgtgcagcattcctttctcaagggtgtgggacaggaccacttctgaaatgagagtcttatgacctgcagtcagaaaggcaggggaagattagactcttgccttgagctggtgaaaggaggatgggaaaatcagagagagagattctgttttctgaggcctggagcaccccaacatcataaccaaagtctgtaacaaggtatatgggagttaagagccgggagctgtggatgaaaacctatatatatgttccctatatatacaatacatagaattatatatatgttattatctaatatgtaatagatatataatatcacacttggaaattgcactttttctcagtcttttgatgatacttttttatggtagtgacacactaatatctccatccgtatggccacacatgtgctctggatcccattcttttcttcctttttggaaataatatgctatctgagaaacctattttctttctcattcccccattctcactcttcctctctttattggatcctttttgttagcatataaacatgttcaggttgtctctatgttatatgtgttatactatgctatatcatatatactatataatctaattatcctcccttgaccatttactcctctttatctatttcatctttggtcttctttgttaaacttctctaaagaagtagctatatccagtttccttataaatttcccagttacatggcagctcattttaatctagcttctgctgcgttc

SEQ ID NO: 5877 - DNA, 1027 bp, Homo sapiens
accagtattcacatgggtagaaaaaaagtgtcttgatttttaatcctacaagtagtaaaggaatggtagtcagaagttgaatcgtacttttaatgcctcaggcaggatagaatagtattgttttgttttgtatcccaatatgcctaactacttctctctctctcctttctgttttgcttctcatcctttcacccattacagtctcagtatgtgtgttacaccaggaggttgccttggcaggtcagaggatctgtcacagtgaaggcactgtggtaccctttgttttttaggcaaggatgacacatgctagtcaacttatttccatttgttgttccctccacttggcactaaatgagacttaaccatttttgaatcaaagtttataaatttcttacaaaaattaaggtttttattctctataataagcacatgagaaagactggttttaaattttaaactgtggagtgacgtaaaaacatgtttaattttaattatttgctttcttttgttcgtcttgtaagttattaatgtattaatactggtaacttctagattggaggaatgatttatcctaatgtttcttttttaaaaaaaactatcagtcattcatatggcatatgctaatcaaggctctgcggtattttttttcttatgttttttaatgaagcagctcttttcatgatctagcagtctgtgttactatcagtacgtaaacagtaaggactcaaattttaagattaaaacaagttcattttgttaacatcatgttttgttgcatcttgcagcttcttggtgaatttttggatgaagccattaaattaattgcttgccatcatgagcagaagcaagcgtgacaacaatttttatagtgtagagattggagattctacattcacagtcctgaaacgatatcagaatttaaaacctataggctcaggagctcaaggaatagtatggtaagtgtttacttccaaaaattaggcaaagaatcattaactgctaccttttctcctctcgtaatttagat

SEQ ID NO: 5878 - DNA, 1149 bp, Homo sapiens
aagtgctgggattacaggcgtgagccactgcacccagcctcgtatgcattctttatcctaccttttcttgatggaagtacaaggttaaggatttatttaggctttaggctatctagtggagctaaataattatggatttgtacattgagtgcccacgatgtactaggtggatctttgaggcaacacaacgaacatgcagggtctctgttggcatagtccactgtctatttggatccattagcattttaggaaatagttgcaaaaaaatatatgttgtaatagatatagaagacacatgttgagcgtcatagacttggaagggatccagttacttgtctttggagaaagtgagaaatgtatatgactgtttcatgaattcagtttacagatttttgcttgaagtttttttgtgtgtttttgaatttcttattacagcgcagcttatgatgccattcttgaaagaaatgttgcaatcaagaagctaagccgaccatttcagaatcagactcatgccaagcgggcctacagagagctagttcttatgaaatgtgttaatcacaaaaatgtaagtgaacatttttggtttcctaagtatagatgaaatcaagatttattcatgaatatgtgaatatcaaagactaaatattaggggctttaaattgttctgtattaaaacattgtttaaaagggatatatatatatatatatatatctacagggtgattttcctcaactttattaaattgtatcagaagaatggcttctaaaatttagattatatgatttcctgtcatttaatttacaaaaggagttttaaaaagataagcgtttgagaagaattttattcagcttgatctcatcttctgctttttgttctccgtcaggctgacatttagaaaactgtagcattagcacagagatgaaattgttcccattatgctttgacactctgactttaatcatattgaatataaaatttatatcacttctccctaccccactcccacctctttaagtgatggcagtattcactgatcactttatgatgaggatagtgggtttagcagaaagtgtttgaaactatctagagggtattaacatgtttctaattctattttctaatgattgcaaagataagtctttataaag

SEQ ID NO: 5879 - DNA, 1031 bp, Homo sapiens
gtctattctggacatttcatgtacatagaattatataatatgtgatattttgtgcttggcttattttacctagcataatcttttcaaggttcattcatgtatttattgtgtgtcagttcttcttgtcattttattgacaaatatttcactgtatagatatattgtttatccatttatcacttgattataatttgggttgttaccactgactattacaggtaatgctgacatgaacatttatgtaaaatttttttgtgtgttggtatgttttgtattttagttaaatctagcttattctttgaaaagtattgagaggatttttttttttttttttcctgagagacagaatcttcctctgtcactcaggccaggatgcagtggcgtaatcatagttcacttgcagccttgaactcctgggttcaataggttgaaaagaattttttttttttttttttttttttttgagacagggtctctgtctgtcacccaggcatgagtgcagtagcatgaacatggcttactgcagcctttacctcctgggctcagtgatcatcccacttcagcctcccaagtagctaagactatggacatgtaccaccatgcctggcaaatttttattttttatttttttgtagagacggggtcttgccatattgcccaggctggtcttgtattcctggcttcaagcaatccagctgccttgacctcccaaagtgctgggatcacaggcatgagccatcatgcccagcctggaatttttaaaaattatttaattcagtggaattacatcttccttctgagtcatctgcgtcaaataaccttactcatgtaataaaataaatacagagagagttttcacagtataagacaattatgtcttagggctattggggctttttttttaagtgaacaatcctgctacaggcttatccttaattatcattgtaagtgaattccttgtatattacatatacagctgctctaatcatttgtctaatgcaatctttaaataacataataaaaatctcttt

SEQ ID NO: 5880 - DNA, 1029 bp, Homo sapiens
cttctttgcttggaagtgacacacatgacttctgcttagagtgcattgacaaagctagccatagacttgcttaatttgtaaggaaactcggaaatgtggggagagcagacttcagcatagtggtgagccccagcctctgccacagtctgttcttctggctggcaaacattcctttgctccctttattccacaccttcttaagggaaataacccaaagttctattccatcaagacatttatcaaatccaggcattgttcctcttggtccagaaacataggaactggaatgaccaaattatatggccaaccctataaccactgctcccctgccaaataccatagatggagtggtcagacagggccagtgttatcacagtgaacaatcccatttagaaaactgaaaaatgcagtcattggttagttgtaattaaattcttctgtacagacattgtgagtgtcccttgccgtgggtggggaatattcctaatcagtcctcctgactgatctctgtggttctctatagtacctggctctaccctgtgggagagtcatctttttgctatcctcatgaatatatctaaagtggatattgaagaatgtattttccttgagggctgctcacctttctcagcctgcttcttacctataaaagattggggcccaagggtcattttaaggccatccttctcagccttgccactattgacattttggagcaaacagttctttcttttgatgatggaatgtttagtagcattcctggcctctacccactagatgccagtagcactccccagttgtgacaatcaaaaatgttttctgacattgccaaatattattttggggcaaaattactgtgaattgagaactcctgtttgaagtgtagaaggatcatagacctttggcgttaggtctgacagttaactaactctttcagaaatttaagagatttcttatctttctgattgtagttcctttcatagtatcttttttagctcatgggtcctgtattcttggacttaattgagg

SEQ ID NO: 5881 - DNA, 1108 bp, Homo sapiens
aatttttttgcttaacaaaaatatctgtctttaaaaattgttactttgctcttaattttttcacaatgaagtgcttgaaattggaatgttatttctaaattggaatctgctagtataaagagccagtaaccttcaaccatcacactaaacattgaagtagtatcaaagcttgtaatatttattcttaaacatgcagtgtttctttgctgaggtactgtattttagaagtattagcaacattatatttacagaataccaataatgaaaatttttttcttctgtttcattaagacctttgaattgttggtatatttaatttcataaaaccactagattacatatcttctaaacccatccatgattgcctgtcgaaatatgttaaagacaacatacatgcttttctgtatgttaacattacaaaagtaatacaaaagtaatagttgtctttcaagcaggctattttccttttttgtattaatcggtgatatttaatatgtatactgcatgtcagtacaggtaatacagtgcatttgtgttgtggatttatgctttcttcgttttttggtcctttggcttataatagtattcatcaaagctaacaggcaaagtatgttaaacatgaagccatgagtgtttatgctgctgcctgacttttgatgggcacagcacagaatatgttaaagtaggggccaggtgaaaaattctgaattattcagtagtatctatagcaagtaattttatagattagtggcaccaaggcaatggtgtcctacttctacaaacagacagaaattttatagcaaatttgtgtgacttcaggtgggaaatcagggatggaaaaatggataatgactcttctagtcctttggaactgggtatctgccagtctaaaagatcaaataacatttgttaggattgacaagatggctcgttgttgacttaaaacatctgtataaagcttattgtgactttaaaatgagattttaaaaatattggtaatatgttatgcaaatgaatataaatgctaacttatgactttcttttactatagtagtttttttatgtgagctttgcgatgtcttttcaaatcccttttactctaaccaaa

SEQ ID NO: 5882 - DNA, 1034 bp, Homo sapiens
ctcatagcacaggtgcagcagtgatcaatggctctcagcatccatcatcatcgtcgtctgtcaatgatgtgtcttcaatgtcaacagatccgactttggcctctgatacagacagcagtctagaagcagcagctgggcctctgggctgctgtagatgactacttgggccatcggggggtgggagggatggggagtcggttagtcattgatagaactactttgaaaacaattcagtggtcttatttttgggtgatttttcaaaaaatgtagaattcattttgtagtaaagtagtttattttttttaatttcaagtgatgtaatttaaaacctaagttgtgtttcaaaacagcaacaaaactgtattgtattttttttgctgtaattaactgtataatgtaaacctaattattttatcatggtttaaattttttgcatatttgctttatcttatgctgctgatttttttaactgaatttgtaagattttgtttatcaaagcaactattatgtggtgacttgcctatatcatgaattatttaagatttttatagttttttttaattagaatttatttcagatgttttgttcatgatactatccttcagggttatgtgcttatcaatgaaataaccccagaggagtgagggaaaataacttgtagccagttatattcaggaataactactgtaaatgatgaacgtgttaggagacctccaatatttgctacttgccaatcctaatttagttacaagaattggtaggcaatcctacttaattttggcaaaagccccgtcatctaaatggcagaataactcagagcatgtctttgaagatgctgggcgtctaccaccaccttatgtccccaccctacccaacaaaaataagtaaaaagaatatggtgtattctacaaatttgtggcatgctcaaagtttatgatcacataaaggcaagaggatacttcatgaataatacatttcaatgcaaataaacagatggttcacttctactagctatgagcctgtttttgtataca

SEQ ID NO: 5883 - DNA, 1114 bp, Homo sapiens
gtggtgggcacctgtagtcccaattactgggaaggctgagatgggagaatcacctgagcccaggaggtcaaagctgcagtgtgccttcattgtgccactgcactttagcctggacgacagagtgagaccctgtgtcaaacaaaaaaaaaaaaaaaaagatagattctaagaggccaaggcaggcaaatgggcagattgcttgagcccaggaattggagactagcctggacaacatagctactaaaaatacaaaaaatgagctaagcatggtggtacatgctactcccgaggctgaggtgggaagatcacttgagcttggggaggtcaaggctgcagtgagccgtgatcatgccactgcactccagcctaggtgaccctgtctccaaaaaagaaaaatgtggtatatacatagaatagaatattattctgcctttaaaaaggaaattctgacagatggtaagacatggatgaactctgagtacattatgctaaataggccatctataaaaaaaaatggtgtgattctactaatgtgaggtacttagaatagtcagattcatgtgaggtacttagaatagtcagattcatacagaaaaaaagtagaatggaagacggctgggatggggtgtagttattgctaaatgggcagagagtttcagttttgcaagatgaaaagagtcctctgaagatagatgttggtacacagagcaccgtggctcacgcctgtagtctcaacactttgggaggctgaggcaggaggattgtttgagcccaggagttcaagaccactctaggtaatatagggagacctcatctctacaaaaaatttagcccggtatggtggtgcatgattgtagtcctacctacttaggaggttgttgtgggaggatcacttgagctcagaaggtcgaggctgcagtgagcctttaccaaaccactgcactccagcctgggcgacagagcaagaccctgtctcagaagaaaaaataaaggaaaagtagatgttggtaatagcacagccgtgtgaatgtacttaatgcctctgaaatgtacacttaaaaatggttaaggtggtaaaatttatgttacatgtattgtaccataattcttaaaa

SEQ ID NO: 5884 - DNA, 1051 bp, Homo sapiens
taggatggtccttggcaccaaatttgccttcaaaaaagcatttgcttcatttaatttcgatttattcacgaaggactaaaggacactgcaagggcggggagggagtgtgcgcctgcgctctgcgcctcctagagggcagtcaagggcttctggctgacccgagcggagatctcgcgagactgtcagacgtatggcgagaggtgtgggaggaagattgtgttgtcgcgagaactctgcctttgggccgtaggttagtgtggggccgtgtctcagtccacccaaggtctcctcggatcgcctggagaggcactcggacctggtaagaacgctgtgggccgggtggaggctcgatgaccgctggcccgctgggcccgggcttgtccgccccttcccgacccgaccgacaccgggaccggtctgccttctccttcccttccctcccctccacacgccaggcccgggcacctcttcctgcctgcccgccgggcccgggcctgtcttctccccttccggccacacgccgggcccgggcctacgttctcgccttcccgccacacgccgggcccgggcttgtcttttcctccccgaccctcctcgtgcccggccgtgggcctgtcctttcctccccgaccctcctcacacccggctcggacacctcctgctccccgccggccttcccctctctttaggtgtgacagctccaagtttcctgtttctctcgcctcttgcttggatgtggggcgaggcgaggtctgttttgccggacgggcacagaacataatccatttctagcttgtcaggtggaaatgcaaagaagatattgggtttttttggccctctgtgtgccaaacacatactgtcacatttaattctcccaataatcccgaaaagtagcttgattatctctgttttacagctgagaagagtaaggcttgctcattcattggttcattccaccagcaatcatttatttggtgcctgtatgttcaggatgttgaggatagcaatgaaaaaaatggacacctaattctcatggaactaaattcttgtt

SEQ ID NO: 5885 - DNA, 1025 bp, Homo sapiens
cacatgaacaatgtggaggtctaggctggaatgggggcccagttgaccacttttgctctagctggtaggcattaatactatctccatgcatgtcagttagaggagctgccatattgtccttagcttatcttctttgattgttaaatcataacattgcaatgcttaacttctgatatgaatgactacagtcttaagtcttaatcattcttttttttttttttttttttgagacggagtcttgctctgtcaggaggctggagtgcagtgggcgatctccgctcattgcaagctccgccttccgggttcacgccattcttctgcctcagcctcccgagtagctgggactacaggcacccgccacaacgcccagctaattttttgtgttttttagtagagatggggtttcaccgtgttagccaggatggtcttgatctcctgacctgacctcgtgatccgcccgcctcggccttccaaagttttgggattacaggcgtgagccaccgcgcccggaccactcttagtcattcttatcccaagttgtcatccctaattttgcttggcttgattaatcaagatgttcctctttggggttagcagtgtgtttgggggcacctttggggcttaatattcctcttatgcagcattacctaagtgctctacaaatatggcagtttggttcagtgaagtagtgagtagctcacaaaataggttaaaaggttttgttgtcagtttggtcatgggtgagaagttaagtcttttaatactgagacaatttcagctttcaaaagaagataatctcaggtgtgttttgagctttattttggcattattgttagtcctctaggctttaaaggagggaaaatattaatattttatcacttgttggcttctatggggagaaccacaaagtgtttgccatataaaatcaggataaaatggcattattactgtgatagtaggtaagttaacatattttcctatccttgactctattatggcaagaagtttcaagttgaatatagtcc

SEQ ID NO: 5886 - DNA, 1285 bp, Homo sapiens
catataatatctcactttaaccttactgcagcccctctgtagcaaccatccttgtctccctttttcctgaggaagttgaggcccagagagattatgttactagctcaggggtctcaagcttggagacacagccataactcaggtttgtcagactccagagtgacctcttaacggtcatgcttgctactctggctcttgaacctgaaacaaatggtgaataactgttgaaaatggccatgtgaactagttacctcatacaagtctctttggatgtaacatttcgtacagctggcttaggctcattgtgatttgaattcacccatggttggggctcttcatttccgctctgaaggcttcctcttcatcacagtgcaagagggcaagcctttgcatagctcctttcttggcatctgggctctgaaagctgacagtgctctaactgcgccacagggaggaggagggacagagagagccaaaggcagcaaaggggcaagcatcctgggacttaccataaagaaatgaaacagattttcttcgtggctgacagatgagttctcaagatgacttttgaaggataacactccttttaatttgaaaaaaatgtgataactgtgtgtggaaaaatcagttttgtaacttttaaatctcatcctacattctgtctatagctgataagggcaaagtccaatgtgtgaactcttgctgtagtctactcttattgtgtaatattaatacttgtgattgaattgagaggacttgctttaggaatctagtaatacagtcagcactgtatgtatttgagtttgtctcccgtatgttccggaattctggagttttgacattgtgaagcaacaatttaattttattgattcaattttacactgtgccaggcattgtggcattccacacaaatggtgagaagctaaaagtgagaaatttggcacaggtgaagaaggctgggtaacacatttgaaagactgctaaacaggtcttgcatgactggcctaagtgcaaagtgaagcagcccatcacgctccagctctccaaatcggagccggcatttcacccatgtgatacaggtatttttcatagtccctgcagtgagttccaagtgcacactaatgcttctgcctaacacaggcagcttatggcatgcaaaaggaggctgcaaagtaaccactgttggtgtgtccagggttagaaaaatttccacagggatttctgtgaaatccaattaaggcagccctttctttttaatagatgattatggagaaaagagactgac

SEQ ID NO: 5887 - DNA, 1049 bp, Homo sapiens
aacagccattccactactagttctttctccattgaaatggaaaaggttggagatcaagagcttcctgatcaagatgagatggacctatcagattggctagtgactccccaggaatcccataagctgcggaagcctgagaatggcagtcgtgaaaccagtgagaagtttaagctcttattccagtcctataatgtgaatgattggcttgtcaagactgactcctgtaccaactgtcagggaaaccagcccaaaggtgtggagattgaaaacctgggcaatctgaagtgcctgaatgaccacttggaggccaagaaaccattgtccacccccagcatggttacagaggattggcttgtccagaaccatcaggacccatgtaaggtagaggaggtgtgcagagccaatgagccctgcacaagctttgcagagtgtgtgtgtgatgagaattgtgagaaggaggctctgtataagtggcttctgaagaaagaaggaaaggataaaaatgggatgcctgtggaacccaaacctgagcctgagaagcataaagattccctgaatatgtggctctgtcctagaaaagaagtaatagaacaaactaaagcaccaaaggcaatgactccttctagaattgctgattccttccaagtcataaagaacagccccttgtcggagtggcttatcaggcccccatacaaagaaggaagtcccaaggaagtgcctggtactgaagacagagctggcaaacagaagtttaaaagccccatgaatacttcctggtgttcctttaacacagctgactgggtcctgccaggaaagaagatgggcaacctcagccagttatcttctggagaagacaagtggctgcttcgaaagaaggcccaggtgagcataaacatcaaaatagcactggtttgagttttatttatttattcatttattttgagatggggtctctgtcactcaggctggagtgcagtggtgcgatctcagctcattgcaacctccccttccgaggctccagccatccccctgcccgcactacagcctcc

SEQ ID NO: 5888 - DNA, 1001 bp, Homo sapiens
ctactgaagtgtcctccattcatgagttggcaaaatcttcagagtgactgttggagcaaggagcctttcatgtgctcccagttattatatagtgcatagaggctggtaagtgttagtcctgtcagaccacctcgtgctatccctcgaagaccacctgggaaacagagacaaaaggaaaatgaaatagctgtatattgcatagtgccctagcacgatagggttaaataaaaagtactgtgaaatgggctgggcacggtggctcaggtaatcccagcacttcgggaggccgaggtgggtggatcgcttgaggataggagttcaaccagcctggccaacatagtgaaaccctattaaaaattcaaaaaaattggctgggtgtggtgatgtgtgcttatagtcccagctacttggaggctgaggcaggataatcacttgaacccaggaggctgaggttgcagtgagctgagatcataccactgcattccagcctgggcgacaggatgagacaagtgagactccgtcaaaaaaaaaaaaaaaaaaaaaaaatactatgaaatggagagaccattttaaaaataaatcaatattccatctcaaaaaggagacaacgtttttaaagtaataccacttgtgtaatacatatgacttaacattttcatattcataatttttttccccctactttccaatttgttcctatggcagtttattacggagttccaactagaacagtcgtttcctgctagtaatatgatttagaactccactagcactgtcaatggatttaagtctgtaatgtaaacaaggtgacaccctatttggaaagagtattaacaacctttggactctggatgggtcctccaaatattaaccttgaagattagtgacggccaggcatggtggctcacacatgtaatcccagcactttgggaggctgaggcaggcttgagctcaggagtttgagaacaacctaggcaacacggcaaaaccctgtctctgca

SEQ ID NO: 5889 - DNA, 1027 bp, Homo sapiens
ggctggagtgcagtggtgctctcagctcactgcaacctctgcctcccggcttcaagcagttctcctgcctcagcctcccaagtagctgggactacaggcacacaccaccactcccggctaattttttgtgttttagtagagacggggttttaccatgttggccaggatggtctcgatcccccgaccttgtgatccacccaccttggcctcccaaagtgttgggattacaggtgtgagccaccgtgcctggcctgaaggtcatttttataaagatctctccacgtcttagatttgattcttcctttaaatatttttctcattgacatttgaaagcacctgaccttatataaaatgaacaattttcataactccataaaaggagaattatggcatcatctatttctttctcttgtctcataaatctaaaccatcaacctgcttatttttgtatactgtcacactgtgtattccctgcattgaatgcctgtctgttgacattatctgtaaaaattgtgggaagttttctgcaccctgaaatttctgttatgcggattaaatatccactatccatgtttttccaagtcttacagtagaaagggtaaatgcagccctcacagcagcctgttgttcgtcctgcaaatgtgtttccatcacattacacaaagcctctttgtcttcgtggttctaccctactaataagttttttaaaaaattatgtaatgtgtgtatatacaaatacctatatgtatgtgtgtacacatacagctgatatctgctgagattatgtatgcatgaactatagaattaacttgtaattttaagaaaataaattattttgtaaagataaatctcatgtttaagaagaggaattacagttgaatcatttagggatgcctcagcctaaacataatatggaaaaagccataaccaaaagtcattttagagtactgctaggttactcaacctatcatcacatttaattaaaatgtcagtttgaaccatggccagtctatgttggttaatatgt

SEQ ID NO: 5890 - DNA, 1030 bp, Homo sapiens
ctattgtctgccctgctgatatgtgataataatttgtgatcctgttgtcttaaaatggggtcactcatctccagtagaattaagtccacagtgaagttgtccccccatccccagagataaacatatatgaatgaactcacgtgataacaactactgctgcctgggatcatgagagacctgaactgaactgataggaagtgaaaggtggctgaggtaatgagaatagacccatctgcagaggatcataaaaccagcaaagacaagatcttgtctaagatgccttcacaaactttgtccatgagaactctaaggacttctccagacctgttggctgctgctgtgatctctgcccaagaggagcctctgaccaacatccaaagggcttctggacccactggactcctctggaggtaccttggtctcccgatccatggctgtggttttttactccgtttatcactgcctgtgtgtagaatgataattgcacaattgatagtgtgaagacctcttgataaatggtgaatctgagcatatgtatttggctgacatgtcattgtgaaacctcacagcttcagtcagtgtcagcacagctagggagcatgtacctaatgcacatatcactgggcatagtctacaggcacctaataactcaggtaccttaacagtcactaatgagtgtctctccaaggtctaaacaatggaagactgtagaagatgttattcattaagatatctcaagaatgtggaagactattattcgcttctaaagggacaggacttcatagggcacctgaagaaactcccatgaaaaatcacttttacaaaatgtcaagttatgatatccaagatgaaaccaatgagtcacaacattcacataatacactgtacaaccctgatctcttgactgtcatcaaatgtttcttacctctaaaccaaagtttcattttataatttaatttttctcattttttctgttctcttagcttaagaaaagatcattacaaactttttgtaagtttttcatatatgc

SEQ ID NO: 5891 - DNA, 1045 bp, Homo sapiens
ctccccactcactccaaaagttgagtaggtcagcattctaagatgcccattttccacattataatatcttggaaattgggatgcattttccaatcagaggaagcttattattataattagtagcatgcttttactttcttggtggttcaaaagataatatgagttgttaaatcaatggaagcttagatttgatgtaaaaatagtggtgccttggaataaaaacattgcatctacctaaaatatataccactgaacaagtttacttgatttaaaggaacttcacttgtggaaatcttccctttggatgcagttgtttatgaagctgcaactgtgatgtcagaaggttagtcaacaaacaagataaagagcttaaaataataagcagccccttatataataatatgtaagcctcagtaaaaaatgtgaaacaattgtggcatagcaaagaaaataaagcccttttaatgaaagagcttggatatattaaattgaaataaatgaaatggttgtctctgtaggttgcatcagtcgaacgttgaaaatttcatatgcctgtattattactgattgtgtgtttgaaatttcagtattttatataatttctttgcacatattttaatcaattgatatttattttcattttatcataattttggtctcagttttaggttactttttttgaataactgtttgtatttatttatttatttatttctattataaaatccaaatctatttgtaggtcattcagattatacagaaaagcataaacctataatccatccctagagataactactgtttaactgtcactatgctcataggtctatagttcttcccaagaaaatagattcttcaaattttgtagtgacaatgaagaaaaatgcaattaatttggtggaaatttgttttacagacaaatttctggtcaagcaccttaaaactagctatgtgatcttgaaaaaaaccactgaatatgtctaagcctattttctcatttgcaaaatgggaatggtaatacataacctatctcatatcatatgca

SEQ ID NO: 5892 - DNA, 1054 bp, Homo sapiens
aaagtatctgagaattaaaaaaataatctatgcgctttcatgttagcattgtgtctagtggatgagcattcacttttgaagaagagagcatattagctactatctaaagcattatttctctgtattgttttagtttaaaacctgagtatttctgagattatccagaaattgtaaaagatagcaagaaaaagagagaagtatacttaagtacaaatgggcacctatttttcattgttgttttaaaccccatttagtttatgtgcagtagaagcctgcccaaccccagacacattgatttttttctagtggcttctcagaaagtggtggcaggaagctggttggattattttgaacaaaaattgaatccactcttggtgcattcattttggtcagtaatgctgattaatgcactagtgaagtttggtccattttccaaggataggagacatgtgttaacagttactttcatggttttggaaacagtatttctaaactaagtgagtaatgtaactgtgtgagtgtgtgcacacatgcatgcatgtgtttgtggcacagattttacctttagggattttgaattttctttttcaacttggtcaatttgttaagtgccagggtgtttgggtttcaaactgattcttcccttggagcctattattctttgcttgactccacagcaaagttataagagaggctctcagattcttaggcattcccaagacaacactcatgccctaaatatttttaacttctcacagaagccagtggaagtgagaataagataaaacattcttgggtaaaagcaaatcctttccaatgtgaaagcaaactttaaaattctgacagtggctcattagtttaatagtacatttgttaggtgtctttggggtgcagctttctgtaagacaggggctcaactttctctaggaactgagaagccctggcaggcatcctgagtaaatggacatgtaaacaccctgttatgtggaaagcaagcactggctgctggccccacactgcccaggaaggaccttgccctctgcaatgtcagctg

SEQ ID NO: 5893 - DNA, 1062 bp, Homo sapiens
agcaaatggaaaacaaaaaaaggcaggggttgcaatcctagtctctgataaaagagactttaaaccaacaaagatcaaaagagacaaagaaggccattacataatggtaaaggaatcaattcaacaagacgagctaactatcctaaatatatatgcacccaatacaggagtacccagagtcataaagcaagtccttagagacctacaaagagacttagactcccacacaataataatgggagactttaacaccccactgtcaacattagacagatcaacgagacagaaagttaacaaggatattcaggaattgaactcagctctgcaccaagcggacctaatagacatctacagaattctccaccccaaatcaacagaatatacattcttctcagctccacatcacacttattccaaaattgaccacatagttggaagtaaagcactcctcagcaaatgtaaaagaacagaaattataacaaactgtctctcagaccacagtgcaatcaaactagaactcaggattaagaaactcaccccaaaccactcaactacaaggaaactgaacagcctgctcctgaatgactactgagtacacaacgaaatgaaggtggaaataaagatgttctttgaaaccgatgagaacaaagacatacataacataccagaatctctggaacacatttaaagcaatgtgtagagggaaatttatagcactaaatgcccacaagagaaagcaggaaagatctaaaattgacaccctaacatcacaattaaaagaactagagaagcaagagcaaacacattcaaaagctagcagaaggcaagaaataactaagatcagagcagaactgaatgagatagaggcacaaaaatccttcaaaaaaatcagtgaatccaggagctgttttttttaaaagatcaacaaaattgatagaccactagcaagactaataaagaagaaaagagagaagaatcaaataagcacaataaaaaatgataaaggggatatcgccaccgatcccacagaaatacaaactaccgtcagagaatactataaac

SEQ ID NO: 5894 - DNA, 1048 bp, Homo sapiens
ataaagctgcacacctataactctctgatctgcaacaaagttgacaataacaagcaatagggaaatgactccctattcaataaatgatgctgagaaagctggctagccatattcagaagaataaaactggatctctacctttcaccatacacaaaaattaagaatacttaaagacttaaatataaaacctaaaactataaaaatcctagaagaaaacctaggaaatacccttctggtaatcagctgtagcaaagaatttattactaagtccccaaaagtaattgtaacaaaacaaatagatctaattaggtgacatctaattaaactaaaaagcttctgcatagcaaaagaaactattaacagagtaaacaggcaacacaaagacaaagggagaaaatactcatatattatgcatccaccaaaggtctaatatccagaatttgtaaggaactcaaacaattgaacaaacaaaagacaaatagctccatcagaaaatgggcaaaagacttgaacagacacttctcaaaagaagacataaatgcagccagtaaatatatgaaaaatgctcaatgtcactaatcattagagaaatccaaatcaaaaccacaatgacatactatctgacactagtaagagtggctattattaaaagtcaaaacataacaggtgttggtgaggttgcagagaaaagggaatgctatgctttcggtgggaatattaatttttcagccactgtggaaagcagaagacagaccataacaaatgttggcggggatgtgaagaaaagggaatccttgtacactgttggtaggaatgtaaatttgttcaaccactataaaataacagtttggaggttcttcaaaaaactaaaaatagagccactatgtgatccagcaatcccacccctaggtatatattccaaataaaggaattcagtatattaaagcgatatctgcacttccatatatattgctgcactatgcacaataggcaagatttggaagcaacctaagtgtccatcaatgggaaataaataaaataaatgtag

SEQ ID NO: 5895 - DNA, 1064 bp, Homo sapiens
aggctggaatttcctcagttagccctgctcttggggttgccatttaccagtccttcatcttcttccttcctcatccaacttctctagctcagtgctgtgttacaggcagggcatatgataatacagttatgaaggatgtgaaaatgaccttggttgcctcctttgaataccctttgctatttgtcacttgtgtcattcatgctaatcccttcatccctacctttcccaccatcaacatggattgattactggctgataatatgccaagatattaacctgttacctctttctgatgaacgtggtgatgtgctaacaggagcttttgggagaggatatttatttaatttactcagctgagtaatatttctgacaagattttaaggggaggaaggctgaggaagggaaaggaaaatttttaggcagcacggcttgtaaacatccttgtatcttgccagatgtgatttgaagaggacagggcttgagcataagcacttcatacatgctttcagtcaaggctgtacaggaggtggtagtgtcttgattttagtgatgagaaaactgagcaaatcctcgtggaagtgtcctttaaaggatctcggaaataagacctgaaagaaaatttgggttgtttgtttttttattttgcatcggtaccagagttggtgaattgaggtcttcaacttatctgtttaacttgttatttaagacacattgattttgctttggggttagttcaagttccagagtcttgtgcattttccaaatgtatttctaatacaccaggagttcttgttccatttgaattaccaatatatgcacaggttgaaagtttacatttaatcatgtattcactggaaatttgaccctcatgaaactatttctaacagacctgaaaaaacaaaagatgtcgtatctttttcctctttcctgactacggtcctgtttcctagtgccctctcaccataacatgtaagagatgctgagagtgcgttaaaaccttttcttttgataagattttcaggtgatttcatagttgctcagggtatgaataattattttcattt

SEQ ID NO: 5896 - DNA, 1051 bp, Homo sapiens
gtgtcacttaacgctaattatttataagtaaatgtaagattcactagattctacttagccagcacctgaatttcataacaatggttcccaaagtgtgatgtttatataattggtggcaccagggatgcttctatgtggtagagaagtgaatttattttatagttatagatattttaataagtgttgggagaaaacatacaacaatcacatcaaatccatgctgtgtagctatgttgctgagggtaaggctaagtattaagagttcatagatttttttttttaagaatgaggtgtaaaaatacagattgtgcgtaatgtcaataagggtacacaagaaagttttgggaaagattgttttaaagtcattttcaacaaggaatgaaatggattgttctcctgtttgtgtttttgctccccactgccctgtttgaagaattctggccgagttctctctgtatctgtgtttgaatgactccttgcatgctgtttgtcaacttcttcataggaattgctgtggggacatagagttagatggagatggtggttttcatgaaatatattcttgctttgaggataagtcattctggttaaaaattgctcacattaatacatcatcagaaaaacatttgactctcatcctccttcagatttataaactctcttgccttgagacagtgaggtccatggctgaagaggccagcctagaaataataaaggatgctggggcacccacttccatccagtctgggttccctggggagctctcacttcccgtactgtctccacagcgaggcctctcatttcctcctccaggctccttcttgattcctgacagtagatgcctgtggctgtgaagagccattccatcatgtggtattttatagcagaaatacatggtgcttcccccgactcctttctttgtaaagaaacaatttggaaaaagtttggaagggaaaaatctttgataggatacacatttattttcccttaatctgttccctttccttgtagaaaaaaaattagattattccaaattaaaactatgtgtttt

SEQ ID NO: 5897 - DNA, 1034 bp, Homo sapiens
ttttagggtaaagagtagtctggcttataccacacagggttacattgtgggttgggtctaatgggctgtacatttttggatcaatattccctcagagagtgccattcagccttcctgtaaaaggctatttcattcagtctgtgacccctttcatgtgaaacctcccaggggcctggatgtgaagcagtcttgctactggcatcatttgtgatttaacgctgaggagaaatgtacttattttggtctgtcccagcaatcaagggtcagtggtaaaaggaagttgtactctgggtcaaaacaagtcagttttggattaatgctattccttggcctctttaattggtctttttgctcagatactgtgttagatcatacttagataaacaggcaagaagggaacttgagaatttagaacagttcacattttcatgccctgtttgacaataagatgcttttataaaaagtgttttgaaattctgtgatatatttatttgaggttatcaatgtatagaaatgctctctgggacagtagtcaatatgtttcctaggttaggaaaaaaacaatgttacactgtctatgactgccagagagaaccaagggtagattgaatgttgggtatgctttctcgtgtctgcagggccaaaacaacaacaacaacaacaacaacaacaacaacaacaacaacaacagaacacctagcctgcattggacatagtgaagcaagcaatagacagtaatatcttttattttctctgatctttctagtttgttatctaggccaagacaaattcccgaagtatagcagcagggtttgaagcatgctacattgaaatcccccggttacccagactcaccatctgactccagggcatcacgagaggtgtccacacaaaaggagacaggctgtggaatctctgggcttcttgatattagagcaattagaaaaagaagaaaaagtttctgttttgtggtaccaaatccccatttgccatgttaaaagtccggacatgcttttgtgatacttatgagcata

SEQ ID NO: 5898 - DNA, 1059 bp, Homo sapiens
acacacaaaaccacagcctcttcaattattaaaaacctctcaaggttgttgagaggattaaatgagctcatgcatgtaatagatttagtttattgccttatagaatgtagtcattcaataaatgttagctctcattgttatcatttattgattctgacttcattcaccaaatatataagaacttttaaccctgtgacaggaatgggcccatgtgtattcttcccatatttctaactctatacttggatctaattttgctcattgaaatagctctgaccctattttcggagtaatttcctgaatcacagatggtactctgacataggtcatatttaggacttattttcctttctttcttttccatccatggtgttgtctcagttttctttccatgcatttcacgccccctccccaccaccccattacaatataaacttattactctagaaggaaatattagaaacttttgtatagtgatatatttagctgtgctaagaccacctctgcagctatctactctctgagctgaataaaccaagggcttctcaaactctagtttacatatgaatcatctggggaatctccttcaatgcaggttctgattcagtaggtctggggaagggcctgagattttttttttttttttttttgagatggcgtcttgttttgtcacccaggctggagtgcagtggtacgatctcagctcactgcaacttctgccaccctggttcaagcgattctcctgcctccgcctctggagtagctgggattacaggtgcccaccaccacacctggctaatttttgtatttttagtagagatgtggggggtgggtttcaccatcttggccaggctggtcttgaactcctgacctcgtgatccacccacttcggcctcctaaagtgctgggattacaggcatgagccactgcgtccggctgggcctgagattcttaatttgtagttatctctcaggtgttcctgatgctgctggtctcctgaagaccattaaatagcaagggattaattgattctctccagtttcttcctcctttcctttt

SEQ ID NO: 5899 - DNA, 1080 bp, Homo sapiens
taagcacacacagctgtagaatataaaggctaagagcatggactgtggaatcagatgagcttgagtttcaagtttctgatatcttagtcatgttgcttaacatctttgaccttcaatttcccccgtaaatgagaataagaaggcccacctgaaactaacgttatgcaaaagacctgttgtaagcatgccctaaacaatggccattgcttctgtagttttaatattagtgttttggagacaaagtcaaatttaaaatgtgattcagaaggaattttagttgagatataatgggaaagtaggaaatactaattcagcattgttaagagcttactttgtgcaaggtactttattggcatgaattaatttgctcttctcaacaatcccatggtggtttcatggtgcctccaggcaggaattgttccatgtgctctgtacagaggaggagactcagtgcaaacacatcaagtgactcatcccaaggcttgctggtccaagacgtctggctctagggctctgacactatactacatgataatcaacagcaggaacataggggaaaattggaggaaattgggctttgtgaagaccttcagatcattcatatgcccagttcttctcaaactgtagtacgtataaacatctcttgggttccatttgttgcagtgaagactcctaggcccatctccaaagattctggcttaataggtaggcttggggaatttgggaccaggaaatttgctataactccttgagaagtagctttctaggtatatactgcaagaagggtgactatatgcattcatttcttagttctgctggaacacatcgccacaaactgggtggcttcaagcaacagaaatttatttactcccagctctgtagactagaagttcgaattcaaggtgtcagcagagccatgctctttctgaaaaccctaggagaggagcttcccttgcctctttctagcttctggtggttgctggcaaccttaaccattccatgacttggacttgcattccaatctttgccttcattttcacatggttgtcttttctctgtgagtatgtgtgtctaaattcc

SEQ ID NO: 5900 - DNA, 1035 bp, Homo sapiens
cttttggaaagaaaatctgccagaacattcatgctacccagagagaagtatcattctccattctcctcaaaattgtatcttctttgctttgattctcatacgcctgctatcagagattttggaaagtttctcttctctttattgtaaaagatctcaggtataattcaaatggttatttcattttatagaaactttactggaaatgtccaagtgccttcagcagtggaaggaggggtcaggagagggtggctccactgggaagcatgattggcctctgatttgtgggaattttccagggccattgtttgtgcgaagttgtgttaagaatgtaggttgaaaggtagatgtggaattccatggagcacgtgcagaaaagcgaattctactacccagcgtaaatcattcgctctacattaagcatctttgccaattatttgggtgaggccattaatggcatctcactcagatttgcacagggcaagatgctgtgaggattgcttattatgttggaaaacagaatcaagatcccaaaagattatgatgggcaagagtagtgatttataaccctatttcagacaatgctttccttttcataccagatatttcctaatgctccctcactatgctgaaattaaattcatcaataatataacccatctgcacacataattgtgtgtatctatgcatatatatatatgtggtatcctaactataatataaacaaaagataggggaacatgtatcatgaaataatacttgctttagtaagtgcttgaactgtccaagttggagatgattgctggaaaagggctacacagtaagttgaactgaagatgtgaagtgcttgttcctaatcctgaaatcatttgatgtaacaactgaaaacaaatactagtactgatgtgttttacaggttactctggtgccactggtggtgtttgtatcaagtgactcagttttccaaagtgatgaacatctctctgtaaagtttttaacaaaataaagtactctctttccttaatttacatttttgtt

SEQ ID NO: 5901 - DNA, 1091 bp, Homo sapiens
ttatattatttcatttcattaattctaaccataacccagtgaagaaggtattattatcctttctttttttttttttttttttggaatcttgctctgttgccaggctggagtgcagtggcgcgatctcggctcactggaaactccacctcccagggtcaagcgattctcctgcctcagcctcccgagtagctgggactacaagtgtttgccaccacacccagctaatttttgtatttttagtagagatgagattttaccatgttggccagtagggtcgcaatctcctgacctcatgatctgccccctttgggctcccaaagtgctgggattacatgtgtgagccaccgtgcctggcctattatccccatttttaagaccaaaaaaactgaggctcaaattaatccagtgacttgctcaaggtgctatagcatcttgagttacatgagagttcactctcttcatgtaacgtccccagtccccagccaatcccgactaaattattctttctgctgtttaggatactgcttaagtacatctcctctaaaaagccttccatgatcccccagcacttcctgggaatccctcttatgtgctcctgtagcaccctttatttatccatcatccaaagtagcacttggaatcaatattgtatttttacaatatcttattttgtaaaatttttttacaaattttccgtttacaagcctgtcttctcaattccacttgcaaacaacttgagaagtatcatatcttcattctcactgactccccttttagtgtacctgccacagagaagattttcaaaaatcatttattgaatgagaaagttaaataattaaaaccttgtttgaatgaaaataagataatgtatgtgaaagtgctttgtaacacttatgtgtatgagattttcttagtcaaatcactaggtacaaaatgttatattaggatatagtttcaaacattcaaagagtttaccttctagtccaatagacactttactgatatgacccagttataaaacagttgcactgacttcaaattttttcctggggctctattaatctgtgatctcctacaatctttacattggg

SEQ ID NO: 5902 - DNA, 1038 bp, Homo sapiens
tataataaagatggactaacagtaatcaaaacaatgtggtactggcataaagacagacatatagtctgatagaatagattagggaggccggaaataaataagatgtatgatcagttgacttttgacaaggctaccaagaccattcaatggggaaaggacaatcttttcaaacaaatggtggtaggaaaattggatatccacatgccaaacaaggaagttgggtccttacctaacaccatatacaaaaattaactcaaaatggatcaaaggcctaaatgtaaggcctaaaaccataaggctcttagaataaaacatatggggaaagcttcaaaacactggatttggtaatggtttcttgaggatgacacaaaataggcaacaaaagaaaaaaaatagacaaattggacttcatgaaaattaaaaaaaattgtgtctcaaaagacaatatcaacaaagtaaaaaaaccccacagaatgggagaaaatatttgcaaatcatatatatgaaaaggaattaatatccagaatatgtagagaactcctgaaactaagcaacaaaacaaaacaaaaaaaaactcaatttaaaaatgggcaaaggaaatgaatagaaatttttttaaagaagatatataaatgaccaataagcatataaaaaatgctaaacatcactagccattagggaaatacaaatcaaaactatgagatgctacttcacacccattaaaatggctactataaagaaaaaacccagaaaatagcaagttttggcaaggatatggaaaaattggaagtcttgtgtgttgttgctgggaatgtaaaatggaacagccgctaaggaaaatagtatgatggtttctcaaaaaattaaaaatagaattaccatacgagctaactattctacttttacatgctaggctaattatttttattttttattttttgatggagacagggttttgccatgttgccgaggctaatcttgaactcctgagtttaagcagtccacttgcctcagtggattgagattacaggcatgttg

SEQ ID NO: 5903 - DNA, 1047 bp, Homo sapiens
tgtctgtgtgtatgtttatgtaagttaaaacagtgaagatccccataaaaatgtgcattttattgtggagagtttaatgtgttgaatcgagaccagagttatcaaatatggtacactctttaatcagattagtttgcaggttcctggaaaagtagattaattttgatatagaagaaagaaaatcaagtccaaagcaatttcatgagaacagcatcactgcagggttagacagagctcctaaaggaatctcatacggccaaagaatcccagggagtaaggtcctaatgacaaaccatacgtccgtaacaattttaccaaagaatagcccaccctcttgcttcccatagcatttctcagcaaatctaacttttgctagaacttgctaccaaatctaggaaactttcctatttgattattcagtgtgtctctccatcacaattatatcatcagttaataattctgacccatttttctaaaagacagcacaaattctttctagctagtcatgttggaaatctttcttcctcaacagatttggcagactgtgtggagtagataaaaggtagaatttttttcctcctaatctaattgcctacagatcttctatcaactaaaaataaaaagcctagttctttttttgttttgctttgtttttgaggtgaagtctcactcttgtcacccaggctggagtgcaatggtgcaatcttggttcactgcaacctctgccttccggattcaagtgattctcctgcctcggcctcctgagtagctggtattacaggcgcctgccaccacacctggctaatttttgtatttttagtagagatggggtttcaccatgttggccaggctggtctcgaactcctgacctcaggcaatccacctgcctcggcctcccaaagtgctgggattacaggtgtgagccactgcgcctgaccaagcctggttcttataatgggtatgaatcttattcgacaaactcaaatgtgcaagcaacacatctctttatttttataaaatcaattaatatctgaccttgagctcctg

SEQ ID NO: 5904 - DNA, 1055 bp, Homo sapiens
aaaaagaaggcttctaaatctaaattgggatcttcctcagtattggtcagaattaagtacttacaataatttctgttttttccatgagttcttaactatatgagtaatcactacggttttttttactgaggcccaaatcatagccaatgatggagagttaattatactgaaggacaatgtagacagaacagatttttctttcttctccctggtctgtatcacagggaggatctgtaccttcctcatatgaacataatgatagtagtcatgttcattaagcttgtactaagttctacgtacttgacctagatattatttcatttgatgtttataataacctatggcatagatactttttagatgaagaaatttagatgaagaaattgattaatcgaataatttgagaaaaaaatctacgtaactgtattagtttgttctcacactgctattgctataaagaaatacctgagactgggtaatttataaagaaaagagatttaattatctcaggctgtacaggaagcatggctgtggaggcctcaggaaacttacagttatggcagaaggtgaaggggaagcaggcacttcttacatagccagagcaggaggaagagagggaaacgggtaggtacgacacacttttaagcaaccagatcttgggataactcattcactatcaccagagcagcaccaaaggggatatccatccccatgatccagtcacctcccaccaggccccacctccaacattggaggttaccatttgacatgagatttgggcaggggacacagacccaaaccatatcagtaaccataaatcctgagctcctgtgtgccataccatggctcactttgggcactctcaagcccagctacccagttgattggaccagctggactgggtgcaggctaaaaacccctttttgttactaaccactcccttctaaacttgctccatagacttgttcttcctctttcctagatgaaatcttgtgcagatagtatacctttccagtcttgatcaatcacaataacagcctcattttaatccatta

SEQ ID NO: 5905 - DNA, 1050 bp, Homo sapiens
tgcagccacctctactctgtcgtcaggctgaaactgttccaggcatagctttagactcctcaggcaccacaagttctttaaactatggaagacatgggcaaaattatttgattctcataaattagatcttatcacttggcttgaaggaaggttatgggttgaattatgtcccttcaaattcatatttgcagtcctaacccccagtacctgagactgaaaccttatttggaaatagtcattgcagttataattagttcagttaagacaaggtcatgctggagtaggatgggcccctaatctaatatgactgatgtcctcataaaaagggggaaatttggacacagactgcacccagaaaatatgccatgtgaatataaaaacagagattggggtgatgtgtctacaagccaaagaacaccaaagattgacagcaaaccaccagaagctaggagagatgcatggaacaggctcctcctcccagctctcaaaaggacccaaccctgccaacaccttgattttggacttctagcctcctgaactgagagacaataaatttctattgtttaggccacccaccctgtagcactttgttataacagccctaggaagctaatacagaggggaataaacatcctgtgcccctctctcatgccctcatggggagaaatggaacagagactgccagataaattctttttcagtctctccaaattcaacctcttacattagctagaggtggacaatcagctaatactcacaaaacagattttaaaccactcccttcacaagtcctgcctggatgatcttgcacctcactttagaatgcaagggttcatggaacctagtgccaatcagccatcctagtttctttattcatgggaataagtgcaccaagtgagcactcttgactcatgctgccttgggtccaggctctgtgctgagatgtggcttaaattttatctcttttccctttttgtcttcttgagtcacagcagctagttgtggataacttcaggatactaaattaaaggtacatcttatcctagcagt

SEQ ID NO: 5906 - DNA, 1316 bp, Homo sapiens
caacaacaacaaaattacaataatctgcctaattttattgctgggagaagacagggaagagaagccaggaaaaaaaaattcagataacagaaaggaagaggcagagtggaaagacaaagaaattgtcagggaagaagaatgagaaaaataccaggagttcaagccaaggatggatttaagtttgttggctcaaataagtaagaagctcattagaagttcctactctagaggagtggcaaaaccaggcaggataatttttctttagaaacatgtctgatttcttttgttatttttgcagctatcatcattagatgtttgttcattcgagaatataaactcataatttaacatgttacctaaactaacttgccttactaaatttaattctgtgatccaaagcccaatctgtgtttatttttaataaaagttttatttaaaaataaccaatagcttagttaacagctgttctctcaaggaacacaagataacttccttccactccttttgtccatgggcagctctgtgtgaatggaaaggtaccaaataaagccattttgttatttctatcttggtgtcagatattaaatttgcagtgtaaggttacaaaaagcacaagctgccatttcactttgggcaaatttgcttcaaaataatagctaggaaaatgaagactcaacctttatggcaacaattcaataacagagaggtgatcaggtcacacgactgcaccaacattcatcactcagtgtgatcacacaggtattattcatttggcatcacagaaatgaagtcattataaccaagggctgtgtcatcagatcagcatctgctgctctagaaagaagctcctcatctttgcctaatggtttatatttgagaaaggtctcagtacccagagtttaacagtccatgtcattagcctgtaactattttttttagaaagtcacctcatccatttcctttattaccatatttctcatgccggaatgtcagaagtcataaaacttgtgatatcttgcaggacacattaggaaatgtgttggaatgtgctcattggattgattcagctctgggggaacaagtcctaataaaataacagtagacctcaaaaattaggttccagtcccaactctgacatgagcaagttgtacccatggatgagtcatttaaatttgttcttggtttgcttatttgagaacaaattagctccttttccatttcatccatttcttgtgaggatcaaatgaaatcgtggctttgatatgagtgcaaaacattacacgaatgtaggagtgtgtgctctggagttagattac

SEQ ID NO: 5907 - DNA, 1043 bp, Homo sapiens
tgcaaacaggaataataatgctgtttaattcatagggttatttgatgattatgtgaaatacatgctgaataaattttcattatccacgttgtaactaacaaaattaagtttcctcccccgacaactatagatcttagagcaggagacagcagcatatttttctcaacgttctgtcatttcataatttgttggtcataagaaacaaaggcagcattaaattgtcttgtggtctcggttgtagtgtcagggtaaaatcagttataggtcaataacctggctttattaacataacacctgggtgatacctgactggcaggtatttcctgcatgcctgcattccagtgctataacctgctcaaggacacagagcgctccttacttagctctgtagcctcagcacctagcgcaatcctttatacacagtaggcatctgatatatgtgaattgctcagatacattcttttttaaaaaatacttttagttaaaaatatacctttactaaattataaacttattacatgcacttgtggatcatttggaaacaacggagcttaaaaaaactacaagcttaaaaaattgaaatcacctataaccctattatctagcaataaccattaacattctcttatatgtctttctactgtttatccatgagtacatacctttatttatttatttatttatttattttcagaaagacaatcataaacactacttttggtagcctacttttaattcaataatatttaactcatatttgtccaggtaattacatagtcttctgaaacatatgatacaagttatcccatgtttattcttgaacatttcaatcgtatcccattttatgcctttgtattgaaatcactgtagttaagtactgacatgctccttgctgtccccttgcctctgccaatgtgcttccatactattgtgtgcttaacttactacagagcctacctatgtcattaggtttttctgttttttcctctttttctcctcatcagtcaacatcctccatgaaaaaagagaccctatgtattttt

SEQ ID NO: 5908 - DNA, 1053 bp, Homo sapiens
ccatatctgttattatttccaaaaaaaaaaaaaaaaaagaggagatgttgcatcacaagacttcagtcctccatgacagtcatcttcaggcaatccccaccactccctatcatccctggggccaagtttcagttggcattcagcattgtgcttgccatatttgttacagcagaaacaatattttctatcaaaaatgaaaaaaacaagatataccaagaaggtcaagagtatatatttttttataaaagtgaggaatattcttaggcatttactatacaaggaaagtataaaataacatgcttggcctgctttattgattgataatatctctgcggttcctgtagtcatgttagtttgtgaaccatgatctacagggcataaggaaggatgaaagagagttctctagagcctgaaatagccagaagtggcctgtgatattaatacttagttttcatagcacatagagccatctgctgtctttcagagttcatgcagccctgctattctttgtcgattcttgcatatcacttcaaaacctcattctttcccattatttctatatttttggactagaacactaacaagtcttccttcttcctttgttctttcctattttcctttcttcctgtctttctgtctgtctctctattttctttttccctttcttgctccctctttcttttacttcccctctctttcctccttcctctctccccctttctccctccctccctttcttccttgtgcttgtatagtattttaacaccattgttcaattactcttccatttaaatttgtatctattctacaaagagtataacaataataaagtaacccaaatcccactagcactgttttccatgttgtgggctagtttctctgattaattctttatcagtgtctcaagagtctgcaaaaaatcttcgtttatatgatttgagcttcaaatcaatggtgcaactacacccacttcccaaatggtattaagcttcatgtggatctttctgtgggaaaagttgctttccttacattagctgggaactactagtcttt

SEQ ID NO: 5909 - DNA, 1044 bp, Homo sapiens
tttgagtaaagctactgatttgggggaattattccctccatttatgtcactctttttcattcccctgcttttctgagaacaatattcatttattcacacttttctcctgtatagcttgtttaacttaatataagtgctaagttttctagatgggcacagttgcctgctaggttgatttaacttttaagctgaaaacaaccatatagaaagatatttaaatgactgtttttgctgctgcaactactactactgctactactaataaaaagttctatgttttgtgttatgtattttaccacctagtgacaccttcacagggtcttatgcccaacatataattactgattctagttggtatgggtttttgtgtattgtccatttcaatatatttaaggttttattttgtaataattcttgctttatgaacattaaaataaaatccgaaagtacccatatgcatggcatgggtattctaggttgcaaacattgtaataaattgtaggcttcataaaattagagctcaggtaagaataccacttccatttatggaagcgtgtggaaactccagtttccttgcttgtcattaaattcaggtcaatggaaattgtctgccaattgcttctcccatttcaatggattttatattttctacatattattttgttctccatcccaaaagaatagtcttctacatgttttctcttgaaaacactaacatattctatcatgtattttattttgtgataaggatatttaacataatatctatcctcttagcaaagttttaagtatacagttcagtattgtttactataggcactattctgcgcctctagacctctaggacatattcatattgcataactaaaaccttgtaccctttgactaataccttcctgttttcccctcccccaacccctggcaaccaccattgtactctctgcctctacacatctgactattttagattccttataaaagtgggatcacatagtattctcattctatgactgtcttatttcacttagcatagtgttctccagg

SEQ ID NO: 5910 - DNA, 1048 bp, Homo sapiens
acttaaataagctaagaatctacttcctttataattccccataatacactggcctgctatcacctagcgacatcttagatgaagaacaaacatcacttaactcacattgcaaagttgcacttctgtatataagccttcaaattagcacattcctaaggcttaagaaaaatcgattcaggatgataataccacaagtaaatattaaccctaactaacacatgtgggtagattaagtgatattaaaatactttgataaataaaaattgatacttaaaatgcaagttactattattggtaacagaaaaaagataaaggacttattgaattatgcttatttaaaatatattttgaagatggtttacagcaaaacgcatatgaattttatagtacaataaaaataaaagacaataagcacattttgtaaaattttattgtttctcaaaaatgattttagtgaatagatttatatttcttttaccagagttcaaattccaaccactagtattggactgtaggccttttatttcttttatgcaccaaagggagtaaatcaaatataaaatatggccaaagataatttttggaaaagaaaacatctcttggcaagaatttaacctggaattttcttattaataaatgaggagtgtgtttggtggactggattatgttgtgcaggctttcccatggaccaatgcccagtttgaatattctttttttgaatacataaacagatgtgcacaaattcttttttgccattttcattactcagaagctttaagaagaaagttgcccaaataaaatactgactgtggaaaaattatttagaatgcaaatatatctctttgttttatttttaactagatttagcccttactccatactccacattggattcagttagtaagcacaactttgtttcgtgtaaagaattaataaccaccccaatggtagagaatacatggctggtagagatcacttattaatctgaaatcagttttatcattgaatgcttcatcaataatatttctatgttcaatgtagaggcttt

SEQ ID NO: 5911 - DNA, 1121 bp, Homo sapiens
tggagtggctgatgcctccagcagattgacttgaaattcaacaaaaattcctgtcccctcattaaaaaaaaatcttaattcctttcatgtaccattgtagattctttagattattttattcattataatcttataaagccagaatctatatggtccagtctctcagtgcagggtcaaatagacaggtcaatatccaaatgttcattaaaaataattttgtttgtcaggagatcgagaccatcctggtgaacacggtgaaacccagtctctactaaaaatacaaaaaaaaaaaattagctgggagtggtggtggtcgcctatagtcccagctactcgggaggctgaggcaggagaatggcatgaacccaggggcagagcttgcagtgaggggagatcgtgccactgcagtccagcctgggtgactgagccagactccgtctcaaaaaaaaaatttctttggatttttaaaatgtcccaaaaggaggatacttacaaataccattttcttcttccagccccatgtgacaactgctctcctctctctccatcccatcttagtaaaaatcccaccattattctaagcccctgtgtctcctgttcctttcctccttttctttcctcttgattctacattacttatggacagactattggtccagctaaagtcctctcctcaaaaagtggtgggaagggaagactgagccaatcaaatcaagcatcaaacaatgaaaacctgtaagttcactagtttagcaaagattatcaggggaacaaaaggaaatatctggagccttgggctctgagatgagcctaaacaggcatgaaggggcagcagttgtgatgaaggcactcttaagatggagtgaggttatatataagggtgcccactcaatagcccttcaataattttcacttgttctccaagtagtactagatatgctatttgtgtttagctgggtttcagggaaggcaccttcaggaagaggagccctagctctgtgaatactggatatgctcagaaaagattctcagtaaaagagttaactttcttaaaaagttgtacctggttacacaggagcttgatctccctttactgttaaacgtgcagcagtttacaaaat

SEQ ID NO: 5912 - DNA, 1058 bp, Homo sapiens
tttttgttctatattaatttttctttccttttttgcctctactttaatgaatctattacttttaatatttcagttatccctccatcaatttgttatttatacaagttgtgcttctttaagtggttactctagagagtacaacatgtaatacatgctggcattagtaaaattagaggtaagtcattacatttattaatactcagacagtgaaatgacctaacaacattcaactctattagccccttactctcttttatattattgttgttagatgttattgttttatatagtaataatttatatacatttaccctcatatttgtcctttctatgatacttacattttctttaaatctttgtgctttcatgtggattcattttcttttaaaagatctgaagaatacattttattatctcctttagtgtgatcagtaggtaacaaattctctagtttttatttctctgaaagtatacctatttacctttattttcaaaggatatttttgtcaagtatagaattcttcgttgtcagattttttttcagccgtttgaggctaccattctattgtcttatggctttcactgcttcagttaaaaagctgttatcttattgttcctttgaaggttgcagatatttttgtctgtctgctcttaggagttttctgtttttcattgtaacagttttactgtgttatacctaggggtgtgtgtgtgtgtgtgtgtgtgtctgtattagtctgttctcatgctgctaataaagacatacctgagactgggtaatttataaaggaaagaggtttaatggactcacagttccacatgggtggagaggcctcacagtcatggtggaagacgaaggaagagcaaagggacctcttacatggcagcaggcaaaagagcatgtgcaggggaactcctctttctaaaaccatcagatcttgtgagacttattcagtatcatgagaatagcacgggaaaaacctacccccatgagtcaattacctcctaccaggtccctctcacaacacgggaattatgggagctacacttcaaaatga

SEQ ID NO: 5913 - DNA, 1410 bp, Homo sapiens
agtctctattgaaacaataaagataggtttaaaaaaatacaaataagctattaattttagctcatagtggtatttcagattttgacaatcaactcaaaatttttcttaaaaactttgaagcacagttttagagaaacattctgtttttctgatttttaacttgaaacaaaatttggcaaactttatacattattagaaaaatatgccaattgtttgcttgaatgatttcctatttttccttgttatgggtatgttgaaaaggatattaatagtgccgttcattaccagtaagttaatagaatacttcactcaagtacagctgcgtcatttaacaacagggatacatgctaagagacgtgcctttaggtaattttatcattgtgcaaacatcaaaaagtgtatttacacaaacctagatggtatatagcctattacacacccagactatatgatatagcgtattgctcccaagctacaaagctatatagcatgtgactgtactgaatactgtaggcaattgtaacatgatggtatttgtgtatctaaacatatctaaacatagaaaaggtacagtaaaaatatggtataaaagataaaaaaggtacaactatgtatagcagcttcattagaatcttacaagaccactgttgtatatgcggtctatcattgacagaaaagttattacatgatgcatgactgtacgttaataagagtcattttctaaattaggttattacaagtaactataaaagtggcaagcttccatttgcatcactatcgaaattttataattagagcttaattttttgaggatctgctaattaatgtcaaaaggaaaccagtgttatttacctgttatttttataatgattgtgttaaacaaagacacacggtgctcaatatggagtagaacatttggacagtagagggtgcaattgtacctttagttctgtattttagtcattagaaattagtatttaatggctgagagataaatttgaagaatgtactgtttgttgaagctgtacactatggaagtgtatttgaaataaaatgagtcatgtaaagaaggagtacaaatttctcttgtcatgtgatgctttgctttaccttgtacttttaaaaaatgaaacatttaaatctcaatcagaaactatttgctaaaaatattatttttaactgaataaagaatatattttctacatatagaaaggcatatcatatcaacatgacatttttctgttgtggagctttattaattttaattacatatgtttttcctcttgggaaatggtgcttccaaaaggattaggtatattgatgactgcctcatgagactcccagtttgtgagaggaaaaatctaattaaaaccactaaagataaatgatgcaatgccaagagggttttta

SEQ ID NO: 5914 - DNA, 1037 bp, Homo sapiens
ttatttattcaacgcaattagccagtatagtgagcgccttcctgttctaggtgttgatgaacaaaatagacataattctttgctttcatagtttacagtctaatgggagatgtatctatctaacaaatatttatgcaaatattagggttagtgttagggttagaatgcgtaatatataattatgcattgtgataaagtgcttttagaagggaaaacattatggggatgattctgaaggattatcagagagagtttttttagggaagaactgaagatttattgaataaatgactcaagagatgagaggcggtaatggggaagtgatagggctaggatttgaaggcagtgaaaggggttgagaataggtcttcacgggcaaaaagagaattcccattggaagctatgaaatgttaagacgtaattgcttaatgcttggagaacttaaagaactaaaggatcactgtaacactttggtaattaattactcatcaaatgctctaccttattttgatcccattgtagtccttccttgaacattttcacaacctaagcaataatcctgtgacccagtctaattttaaagggaggaaattgattatggatcaaatggcaaggctaatccttcctgtaggcaccaaatttgttatatgttcatggttttctgtcatgtcattggctgtggccacaggctgggcaaattgtggtttgaaaggggagatgtgagtagttgacagtactgtttgtgggacgagaactgtgtgttcttgtctcagatattgctgtgtatgtagatagcaataggggatttcacaaatggagaaaatgcttgtactttctattaaattgtctaactgacttttaaagtattaaatgccatgaatactcaggttcaacactgaaagtattagaagaaggaaggtttagttgttaaacaatgtatatatttaccatttatttacatggtatatacagtatgtaatattttatgtatttactgtatatttattttggaaattcataatacatactggaatgtt

SEQ ID NO: 5915 - DNA, 1031 bp, Homo sapiens
aaatagaccaaacatggaaacactgttatcttaggtaagttttagttctgtgactgctgagagaatattacttgctgttttctgatggagggtctaaccagtggaaactggaaaatgaaagtaagcaattttcactaagttctctatgttcctaacagcagcaattgcttttaatattccacaaataaacattgtgaagatttccctgttattttttccacttaaaagttgtagtcaacatagatgattttctaaagaaactagatgattagaattttggctgtattataatctggggaaaaattagatgaattttccataatgactctctacattaactctttgagtaaaaaatttgtatgtaatacagtgactctagacagacactattttgtgctaatatcaaaaaagtgtgaaatttcctattgtacatttatttatatggtgcattgaaactatatgatactttagatattgctgctttgggtaacttcttcattatataggtgtttgaacatttgtcttttaagtttaaatctggaacactaatatttattctttacctaccagattaaatgcctgtgctttcaataatgaatttttaaaaatccagtctagaccatgaaggaattactgaatcttctctaaaaacctacattaggcaaggccaatgataatgttgtagttagttacaaatacatagtgaatgtatgcatctcctgggccccagcctggggcttctacccttgtttcaagaataatacgtggcaatatcttggccctggaatgatatccatttgctttactagcctactatttcatttgcctgtcgttagaaaagtggatttctggatttccatctcatgatgattatagaaaagtcacaatttgaagattccttaatttgaagctaggtgatatttacatgcccattaagttaatgagagtggagatctccatgtatttccctactatgtctttttgcctgcaaagccccctctcccttgaatcactgacattctcacaatgta

SEQ ID NO: 5916 - DNA, 2065 bp, Homo sapiens
aggatgattgctttcctaaaacatattaacacaaagtaatgtataagtgggtttgtaatgtgcctaaaataataggtattatcattacagatcttccttggttttacttttctatcagtaatgtggaaagcaaaatttgaaaatatttataaactagagaagctcagatattttgaattgaatagggtgaccaactctcctggtttgcccgagactggaagattcttagaacttttagttttaaagacaggacaatttcaagcaattttaggattagtacaatctctggcaaatgggttcaagttacttaccctgagccagaatgtaatcttgttgaaataaagacaggactgttttgtgaaaaggaactttttgaaaaccttgttgctgctctttcaggattttccaaatttgtcctcttcacctccctgacccctaagtcaagcaagttgatgttaaagacactcttctctctctggatacagaataggacagtagcaacacttataagttctgcagaaagtaatgaggggtaggggcctcagctctacatcacctagtctggatatgaagccagtctttgccattgattaggtgaatgattctgtgactccattttctctaatattaatagaatattaataatattgaacttatagggttgtatgaacaatacctatcatgcattaagaagtcaaggaagttagttaattttttgtgatcttgattatgattagcaacttagaacagaccgtcatgtctgccagtaatagctttaaaatctagattcctaggaggacttgttacttttagcaatcttctgccagaggaagcttctgtctcctgaaaggctcagctatatatttgtttgtttattttttcccattcaagatatacacatgaaatgacagaagaaaatttcaaaacttaagattcttccaggaaatacagtgtcagtggaatggataagtggataaaattagcacagttcttttgggctaattatgtttttagtgaaggatgacaaattctacagatttatttttgaatagccagtattataataaagctactttattggaatagctcattaaatgattctgagaatccattaaggaaggcatgtcagtttttattctcaattatgaggattgggtgcaagactaaagagcatgttggagttcaacaggccacagtttggtctggctaccagtagaactttgcttctattaaagttatgaaaaaggaagactgctgaaaaacaggttgtgagttgtttctggaattctagagtatgaagtcagttccttcaaaattgcattgttctaactgttagcatctaatgtcaaagcttcatctcagataggcagtggggcagggctcagatcaagccattctcctctactctatccctgaaggaatctgaggtagacacttcctaattagcagaaagtagacttgtgcctgatctttgatcttgtaatttagccaattaagtttactacatgacacttagtaaagataatttgtctgttaagacgtaattgcaggactttgatttttcacatagggtttatttccagcatttactaagtacaacgcagaagatgtttaagaaaatattggaaacactcaaaaggttgagatggaaacctggtcgctcaagatctaaacagctggtcaaaagcatcattgaaaaacatacttaaaatatttatttttactttaaaaatgaaagagaaaaggctagaatcctggattttgcatatgaaattataaagcatttaaggggaagtcaatttaaaaaaataacacagcctgagataactaaatatattctattccttgaacaccttttaaagtcaattgtaaaagtcatgtcttttcagctttttactctatttgtgtttgttataacagattcctgactctcaatatcagattcatcctggaacagattttatatcatgagatgtaaatttaaaatgaaaatgtaatgtgtatacatcctatagttgcatttagatatgccagcttaaatactgataagtatttacataattta

SEQ ID NO: 5917 - DNA, 1088 bp, Homo sapiens
gcaaattggaatctgtattccactgctaccaaataactccttgagaatgtaaaactactaaactatatttggaaataaactgagcaaataaacccttaaaatgaaaaacaaaacctaagcattcattatgtgagatcagatagcctgttgattgcctatatagaatagttcttatggacttaagtaattttatttcatgaagtttcattcctgaaattgattctatatcatgttagaacattcagtctctgaaattttgatctaaaccccttatcttttgaaaatattcccaaatcttttccattttcatgtcacagggtttcagtcatttcagttggattatatagacttgagttcctaaaagtggttagtgtctttgtatttttgtaagctgttgctttcactccatgttctattttgtttcctttctttttcctttgttgttgttgttgagacagagtctcactctgtcacccaggatggagtgcagtggcacgatcttggctcactgtaacctccgcctccagggttcaagcaactctcccatcgcagcctcctgagtggctgggattacaggcacgtgccaccaatgcctggctattttttttttttttttttttttttagtagagatggggtttcgccattttggccaggctgatcttgaactcctgaactcaggttatcagcccacctgggcctccaaaagtgctgagattacagatgtgagccaccacacctggcccctgtttcactttttcattgcgaagtactttggaggagttgaggataaaaatatttatttatatttatttatttatttatttatttatttatttatttatttattgagacggagtctcgctctatcgcccaggctggagtgcagtggtgccatctcagctcactgcaagctctgcctcccgggttcacaccattctcttgcctcagcctcctgagtagctgggactacaggcgccagccaccacgcccggctaatttttttgtattttcagtagagacggggtttcacagtgttaccaggatggtcttgatctcctgacctcatgatccgcctgccttggcctc

SEQ ID NO: 5918 - DNA, 1031 bp, Homo sapiens
aagacttccaggggaaatgagaattcctaaaccctgtggtcagacctcactgctgcccctattgccagctctgtgtgtctttcctgccctctgtccccttagatccttgttacaaagtcctcaaggtgttgctaatggtctctgctaggagcctatttacatttgtaatttaatcattaccttctcaggtgaggatcagccaatatagcactttatataagcaatgaaaatagctaatataattgcaaatactttttgataaaaataatcttagaatcggagtcagcaaggagcttttctgtcttttccccactcctaaaatatgaaaatgtattcagctgacagatagtatgttaaaacagaatagatgtaataaggctacccggaggattggggacattaattatgcagggaagttaatcataagtaaagtaaacactttcattatgaatccagcttcatggagtgcatttggttattgcgcgtaattggggagggataagaggaattagaaacaatgaaaaacatgaccaaaaacatgtgtttaattattatgacttagcagttagaagcagaatgataggcagaagttggtggtaggacactgggaaaatatctgtgtctttgcattcttttattccaacctatgaaaggatgggagttcatataaaaagaagaaattagtgacaatttactaccaagatatactactttcacctgcatcaaaaataaaataatgttaattacttttgcctttctaaagatcataaatgtaaattaaacttcagatttgctttaagatagatgtaatttaattcacttctacatagaggtggagagaaaataatgtaagctatttacttatgctttggctgggcataaaacatgagtaaataccttacattatttttatgtgattataatatgcatcaaaaaacagatctaatgttattgaccttctaatatttagtgtcattttctcacttttagaccctacctactgttaagaagtaacattgtacttctttgaa

SEQ ID NO: 5919 - DNA, 1025 bp, Homo sapiens
cttttagagactagcgtgccttagtataatgatagttctttcaataatactgtattgctactatattcaattttggtttgctgttttgttttgttttgagacatggtctcactctagtgaccaggatagtgtgcagtggtgcgatcttggttcactgcaacctccgcctcccgggatcaagcggtcctcctgcctcagcctcccaagtagctggaattacaggtgcatggcactacatctggctaatttttgtagtttttgtagagacaaggtcttactgtgttacttaggctggtcttgaacccctgagctcaaacgatccaccagccttggcctccaaaagtgctaggattacaggggtgagccactgtatccaacctctatattcaaatttttattaaacacaactacatatacctaaagcatttctagctgattcatacatagaaagttttcctcatcttgtacttgagtattttgtttgtttttagtttaaaatttttaagtagcttcggcttgttcctcttgaatcaaatttccattttgaagaaacattacctcaattttccaatggtttacttcctcactgatttccctcttttcccttaaatattaatgtctttaatagaaatttttggaaagtttatcaatgctttctgattctttattctggcagttaataaaaatttctatggattggttttcagttttttttttttttttggttcaatcatttaccaaatatttgttaaggaactaatatagggtaagactatagtatatgtgtcttcttctcgctcacatagcatttaatatctgaaaatcagtggttgtaggttatatgctaaaaaagacactcctttgtttcttccaacatggattggacccagcattcctaggttgggattgggcttccatttctcagtgtttgggtttgtggtgccgtgtacattttttccatatccatcagagtttgaatttctatgttttgactgttattggttaacaactacttcccccagaaa

SEQ ID NO: 5920 - DNA, 1046 bp, Homo sapiens
tcaggttaacaggcaggaagtgtcaagcttcaggagctcctgatcctgactgaagcaaagccagtatctttgggagtgacttcatgtagatgaacttgatagcatacctactaggtatgaataaatgtattgagaggaaagcgtctggagtaagtacatacacaactaattacctaaaacagaaatgaacacaaaaacaacagctgctaacaatcagaaaacaaaatgctcttcagaaaaggacaattactcataatgtactgcatggattggctatgaaggacatttatagagtcataacaatgtgagcattcagtaatgatctcaccacatttgatatttcatagaactgggaggaagacatagatgggaagtctgtgtgtttgtttgtgtgtatatgaatgtgtgtgtagtaggagtggcaggaaggggaaagagggctgaatcattttcttctatagtagcaagtaaatagataattcctaaacagaaaacaaacagtagcaatataaatatgttagtcagatataggagacagaaaaaaaaatcatcccccacaattaaaagtggttatttctagggtgcagaatttgggtccagagtgggaaactgctgttgtaacaagccttatggaatggtttgactctttgtacaatcttcacatataactttgctaaaaacaaaacccaaattaaactgtatattgtgatactgaaaggcattactgacaaaatgcgtgacaagagatagttgtatataagatgtaagtacgttaagacactgagaggaagtggaaagcctttggaacatatttttgatgcttctgaataaagctgcagtctttccttttttcttgagatggagtttcactctgtagcccaggctggagtgcagtggtgcgatctctgctcactgccacctccacctcctaggttcaagtgattcttgtgcctcagcctctggagtagctgtgattacagggggcgctaccacacctggctaatttttatttttattttatttatttatttatttatttatttatt

SEQ ID NO: 5921 - DNA, 1040 bp, Homo sapiens
tagaatctaacaaaattaaaaaaaaaaagataattcttcattatccccactggtgtacatcccatgaatgtgagattggtttaccatttgaaagtaaatcaatgtaatttaccaaattaaccagcaaaaacaagcaaaacaaaaacaaaaacaaatcaaaaacactatatgatcatctccattggcacagaaaaggcattggacttaagccagtacccattcctgctgaaagctctccacaggaatagaagggaacactcttaacttcataaagggcagttacaaaacccccacagctaacatcatacttaatggtgggcgattgaatatttttcccctaagatcaggagcaaatgaggatgcctctctttccacttcagttcaacattgtactggagcttctagctaatgtgataggcaagaataaaaagtatatttatattggaaaggatggagtataaatagctttttttcaggcaatattatcatctaagtagaaattcagattgattatatagaaaagctactagaactgggaaatgagtttagtaagatgcaggatactacatcaatatgcaaaatgtatttctctatatacactcagaaattgaaatatatctcttacaatatcataaaaatataaaacacttagtgataagtgtgacaaaagttgtaaaaaacctgtaaactggaaactacagatcattaatgaaataaattagagaaaaataagtaaatggaaatataaaatacattcatgtgccattcatagtattgttgtcaattcttcagaaaattgatctatagttttagggcaatcccaataaaaaaccaaggaggcatatttgtagaaattgatagactaattttaaaattcacatggaaatgcaaaggacttcaaaataaccaaaaaatgtttaaaaagaagaaaaaaggtggaggactaacaccacttaaggtttattataaaccttcaagagcatagctgtgtggtgttggcataaatataggcaaatagaataatggaacaaaatagagag

SEQ ID NO: 5922 - DNA, 1310 bp, Homo sapiens
aaaaaaaaaaaaaattactggaggctctgagactgggtaatttatagagaaaagaagtttaagtggccaaggttctgcaggctgtacagaaaacatggtggcatatgcttctggggaggcctcaggaagcttacaatcatagcagaaggtgaagtggaggcaggcacttcacgtggtgaaagcaggcgcgagagagtgaagggagggaggtgtcatgtacttttaacgggccagacctcagaaaaaatcactcgctattgtgaggacagcaccaagagaatggtgctacagcattcatgagaaatccacctccatgatccaatcacctcctttcgggccccacctccaatactggagattagaattcaacatgagattggatggggacagagatccaaacactatcatgctcttttcatccgcattcctcagagaagatatgatctgggggtcaatctacttttgatcagaacctgatcaagctactatccttaattcttaatttccaagtacttctttttctctgattatcttttcttcattgtgttttcttagacttttgtcagcacactgtcctttggatattctcttttgtggacccaaatttgacgtaattattatttttattgatgatgttatttcaaatcatttcttgaccctgaaatactatgtgtgtgggggtgtggagtgggaggatggagagggtctttttctttccctttcaccttatagaagtgaccttgattacctatttacgttgaggagaatgaggatttaggaaagttgacccatgtttgtgggtgtgggacttgatagcgtgggagggagataactcacatgattttgatccctaaaggccagaatgctgaaggttttgttctaatttgctgatgtgtagttgtgtcttcattggaagcagtcatatatgaagcttttatgtatgaaagatcttatgtatgaaatttgttcttagattgacagtattacttcaccatgtaaaacaagcatggctttagccctaattgttctataatccttttgtttgcttacaaaaaaacggggaaactccaaacgggctgaatgaaagacttgagttaatttgctctttagttacccatccagtttgcatatccttgccctccctgaactcttgggcaaaactactcagaaatagcctattattgtgctcatctgtagttctaccacaaagatgctctcctttgagttgacatatgacctgcaatgttctaagtgctttatgtattttaccttgtttaattttcatatcaaccctgagtcaacttagacat

SEQ ID NO: 5923 - DNA, 1081 bp, Homo sapiens
agaatgggagaaaatttttgcaatctatccatccaacaaaggtctagtatctagaatctacaaggaactgtaatttacaagaacaacaacaacaacaacatcaaaaagtgggcaaaggatatgaatagacacttctcaaaagaagacatatttgttgccaagaaacatatgaaaaaagctcaacatcactgatcattagagaaatgcaaatcaaaaccataatgagataccatctcacaccagccagaatggagattattaaaaagtcaagaaacaatagatgctggcgaggctgtggagaaataggaacacttttacactgttggtaggaatgtaaattggttcaaccattgtggaagactgtgtggtgattcctcaagaatctagaaccagcaataccatttgaccaagcaatctcatcactgggtatatacccaaaggaatatacatcattctactgtaaagacaaatgcacacatatgtttattgcagcactattcacaatagcaaagacatggaactaacccaaatgcccaccaaggatagactggataaagaaaatgtggtacatatacaccatagaatgctatgcagccataaaaaggaatgagttcatgccctttgcagggacatagatgaagctggaagccattatcctcagcaacctaacacaggaacagaaaaccaaacaccacatgttctcactcataagtgggagttgaacaatgagaacacatggactcagggagggaaatatcacacaccgaagcctgttcaggggtggggggcaagggaagggagagcattaggacaaatgtttaacacatgcagggcttaaaacctagatgacaggttgataggtgcagcaaaccaccatggcacatgtatacctaagtaacaaacctccatgtttggggcatgtatcccagaacttaaagtaaaataaaaagttaagaaaaattaaaatgcaaaaaggcgattaacattttttctttgctttaagaaatgagaggtttttgtgatacttaaaaaaaatccggatagacttaggaatataaatatatcaattcgctatctaatt

SEQ ID NO: 5924 - DNA, 1069 bp, Homo sapiens
actgagttatttgagtttcttatttattttgggtattaaaccctggtcatgtgtataggaggcaaatatttcttccattctataggttgtgtcttcattcttttgattgtttccttaactgtaaagaggctttttttgatgtaatcatatttgtctatttttgtttttgctgcctgcgattttgaggttttatccaaaaaatccttgcctggatcagtgtcatgaaatatttcccctatgttttcctctagtagcttcatagtttttggtcttgcatttaagtctttaatccattttgagttgatttttgtttatgatgagagataagggtctaatttcattcttctgcaaaagtgtaacattcctacctttgaaaaattagagataaatgagtggaacatttgcttttggatttttataagtggaataatttattcaaattgtcagtgaaattaaatattgtgggcttagaagtcaaacagatttatctttaaatcctgactctacctgtcacttactattgtgcaacattggacaatttatgtaattctctgagttctactatggcaaacttagagagtcaaaaatgaatcttaaatgagggaaggctctttgtacattgtggaacacagaataactacttaataattatgaatagtggtaataataaatattaatagtagtaatactactactataataatgactaatgttattgtcagtattgggttaatttttcactttggttaagaagcttggtaaccacagagcttttatgactaggagcatgattgtttgttttaaacttttagttattttcaaaattaatataaacaccatctcacttaaggcagactgtaaatgtctaatgtattaaagccttacgcaaaacaatggttggaggtaaaactgaactgagtatgtcagagtagaaaatctgccttgtgagacatgtaggacattgtaatgaagcgaaatttggctccaattttctggaattaagtgaattgagtaaagtagccaagtcaccattatcagtcaagagaaagtgtacactttgggataaggg

SEQ ID NO: 5925 - DNA, 1028 bp, Homo sapiens
tcttttataaatataaacagtagtaatagtatttgttctggaatgttgaaattttattcatgtttattcttaaactaaattacaaactttaaagtatgtatccattggttttctagcaatctttgtgattaagaaaaagtctaaagcaaaatggacttgtatgattttgttggttggttggttggtaggtcacttattcattaaatgatagaatacttaaaaaaaattcttagtgcctttttttttttttttttgttttgctgccatggacatactttgttctccagtcttccagaaaattattggattcctaacaagaaaatacatttgtggtgtgccagagcactctatggcgctgctaaacctcacaaactatgaaagagcttgtcagatgtgccagtaaatcttccctctcttgccataggtccaaggatcttataaaggaagctatccttgacaatgactttatgaagaacttggagctgtcgcagatccaggagattgtggattgtatgtacccggtggagtatggcaaggacagttgcatcatcaaagaaggagacgtggggtcactggtgtatgtcatggaaggtacggtttgtaactccaatcctctgacattcaaatattcttttttcatcttatcagctgcacacagatggcaatgcattacatggaaaattccatttttccttcttttattgagaaattagtttgagaagagttgaaacactacttagataaagtggttaactaattatgggaagtgtttgtatttagagtattaatatgagaatccagtattttttcagacatggaaaagttaaaaatgtgaaaaaagaaatatagtttattacactgaatattcttcatgcagtcaggtcactgagcaaacatacaaagcttcagcagaagctcaagatcactggaagtatttttggccgataatttaagcatcttcaactctccccttaacttttaatatgtgactagttttcctgctatgaagcttctgtaaaaagaaaatg

SEQ ID NO: 5926 - DNA, 1071 bp, Homo sapiens
taacttgttttgttttattcatttaattgatatacaatagttgtaagtagtcatgtagacatggtggtgttttgatacatagaatgtatagtgaacatatcagggtaattggcatatccatcatctcaaacatttttcattttctttgtgttgggaacattcaatatcctccttgtagctctttggaagtacataatatattatcattgtctgtactcatcctacaatcctacagaatactagaacttaccaatttttttcatgaggtgtttgttaatgataataacttttgttagttaattatatgccatgtactgtttagtcactttctaggtcttaaatttttaattctcataatgacattaagaggtaggcattctgttatctacatgttaataaatggtaaactgatgcctggagaagttaataacttggtcaagactatgcaatcagtatgttgaaatacacgtcttagccttggagtccccatgcctaaggaatgtgcggtgctaacttttgaagtacagattagaagtactgttgttacaagtttattatgtatattcaaacttgaggagcccataaaagatgcatagctttaaaccatgagattaaaaaatgatctgactatttgcaagaaataaaacttgaacagcaatagttcaaaaagaaaaaaaattcaagatatttcctataagtacttcttaggcctctctgcatcctttgaatattaaacttcatactgacctctctgtagatcatctggcatccattcctcttctcttattagttccttttttcttattgaaagaatggctatgatttggcttaattcttggtccacctctgtgtccttatggtttagaattaaattccaccatgtaccttggaggccttattttctatctgcaatcaatagcattgattttgtttttctcacaggtttcatttttatttttattttttaagaaggaacaattctttcaagttattacacaaatgactcttttaatggagcatttgtatactaactctaagtgttatgtgattattcacatctactctcaaaag

SEQ ID NO: 5927 - DNA, 1043 bp, Homo sapiens
aaaatttacttcaaccatcattacataactgttgaagagtttgcatgctgaacacttcacacaatctacaattgttatgtgttcattttaaaaaacacatagatatatttcttcagggactttaacatgattttcagtgatttctttgtggagctggatagactaatgcttttaatatccatccctctaatgagaaagccttgaatgtttagtaattgttttggcacactctccaagggcaggacagataggagccacttcccagcacaggggagcttactggtgtggctaccatggcaacagcctaccccacccccaccacagagaacatccgaattggtctctgaagttcttatttgaattctcccatgtctccacatttgagaaacacaggctgtaattgcacctacttcatctgaatttaaccactgtagctttggaaggctgcagttttaatctgatctttatatttaggcccttctataaactcctttctgataaaatgaaaatatttttgtgctaaggctccaaaagtagtacacagagatttagaattatggtggatgacgtaaaatggtattaaaatcaatctgagaattcacactttatgtgtatttaaaataccaaggaattattattgagtatatagttacattaatgatttgtgtagaatcttttatttgtctaattcatccaactttactgaagtggatttttttccttgtatcacaaaacacccataagttattcataagaatatataggaggagatgcttttattttattttaaatgttattttattagttttgagacaggatctcactctttcccatgctggaattcagtggctggatcatagctcactgcaaccttgaactcctgtgtttaagaatcctcctgcctttgcctcttgagcagctgtgactacaggttcatgacaccatacccatctatttttttggattttttgtagaaatgggctctcactatgttacccaggctgttcttaaatttctggcctgaggtgattcccttgcctcag

SEQ ID NO: 5928 - DNA, 1032 bp, Homo sapiens
ttaatatcaaatagagtaaacatccatagaagtaacccacgtaatcaaaagcttcttaaggttttcactaatatttaatagcataaggaagtctggagactaagtttgagaaccatggccttaagccatatgacttgagggcatatatgaccatgtggttgtttgtttcagaaagtagaatgtgattagtttaaggttcaacatatcagatactgatgtttctcctccacatcacacatatctagaaccgtgttacaaaagaaatgtctcttaaatagtcttgataaattagaagcagaaaaatttctgtaaaggctaacatttaaatctagtgcaaatagccaacacagatcaacaataggcaagtcaattccattgaagtgcttattgttctgttaattacattccatttcacagtatgaaaggtatccttgatacattttgtgggttctgtttgtacactttctgatgttcaagatttgggaattggattggattccccaatgcttattctgagttagcgtcgcagaacattgaaattttatttttttgtagttagacttacagttctaaaggaataaaggaaaacagatattctttgaattcaaccagcattttggagagaggaaatggttttatactgtgcttatttttcacttaaaataatcttagaagatataacatttcatcttttgaagtctcagtacaataacttctctaataccataatgttttcaaattaaacaagataatacattactgtatacatggtcccagtgtagtactctctgtgtatatgtaaacctacattgtgagctaccgattggatgtctcttttaaagttttcttgctaagtaaatgtttgaaatgtctacatatttctcttgtgatgcattttgcaaagagctttttcatttgctagtacctttgcttgtttttgatatttcagcaccattagcattttcttgggataagttaaattttttaaaatgctgtttttacttctttttcttggaaaaacaactttcttct

SEQ ID NO: 5929 - DNA, 1723 bp, Homo sapiens
aaaaattagagaaactgtattcgggtttaacatttttaaacaaaaggggcataagctatataacatttaagaattaatcttggaataaagactattttgaagataaaatttaataataaaacaaattgttaagacaataaagtattttttagtaaggcaactgagagttgacacacagaacatattatgaatcttttggaaagcttggatttgtgctatcaatatgaaaggaaagtacctactttttaataatacaccattttgaaaattggccctgtctttttttccaagatcaattgatctatctgtatacctatgtctgtctatgtatgtatgtatgtatgtatgtatgtatgtatgtatgtatgtatgtatctatctatctatctatctatctatctatctatctatctatctatctgtgtatattttgttaggtcatcatatgtgtggaaaactgcacactattttccaaataccttcaatgggaatgcttgaacttctgtgcacatcttcaggcctaggtctttgaatcaaatatacattcttaatttactaatacaaagaattaaatgaagacatggatattaaggaacatttttagtctaatgtattctaagttccatgtgggtagaaaccttgttggtgttccccgatgcctagccctgagctgacacatggatggtgttttattcacttaacaaataattagcatttgaatcttacttgaatgccaaatatacttcttgacactacaactccacaaatgatttgcagtttatttcagggactacatctgctcgtttttaaaaacatatcacatacacaaaactttatttaattcttttcacatctagaattatcttcttataattataataaacaatacagcttttgaaaacatttaagcaggatgttattaagcatctggcttattttgaatattatctacctgttttccctctatgaaatttttattcatttaattgtaaaaactcacacatttagtttgttaaggtttctaaaacttctgttgaagtataataagccagagctttaaaaaattatttgtttgacctaacataatatcacttggaccatgtaaattttcaattaagatcattagagttgggcagtgtgtgtgtgtgtgtatttgtgtgtgtgtgtggtgtgtgtaaattctcaactttttaaagatagtgaggagattcacaaaactatgtgtaaaactgtcatcaatgtggaagtatatgtcattatgctcaagagataatttattgagctaatcttcatcctaaggaaataaaagaaaattagaaaaaactttgaatagaaatgtttagctttcgatgtcttctaatcacttgcctgtaactaaaatgaaacttaaacttttatcatgcatgacaagtgtattccttcaattcctcataccaaatgtatttctttctaaaaaatacccatccatatcataaaattactagatttaaaaggagctaaaaaaataatcaaatttttcttgaggtttgtatttaaaatcaggctgtatgtcataaaaaatttgaaagaactggatttcataaaaccttttactattgagagtgtttttccttatgcttaaactaatacaacctaaaactctatttttaaattaaattatttttattgttaaaaaatagagaactggttacgacttctgttcaattatctttgttctcaagaa

SEQ ID NO: 5930 - DNA, 1033 bp, Homo sapiens
gaaattctcagattacattccttcacaatcatacttaccatttgatataaagtctgcaatacatgtagaatggaaatgcagtggtttgaatcactgagcaaaatggatgaatttaaagtgaaaataagttgtaataaaaaccttatgtaagatctaagtaactctttggaagacactactaactacaaatgtaaatatttcaatttaattactttttttctgttaacaaactttgcttatttctgatatgactaagggtagtaaacagtggctgctatttgctctactctaaagactccaagcctttcaatgaccacatcacatcctctttttctgtttcctgaaactagcagaaaacttgacattaataaccaccactagtgtttgctgaatgaatggttgaatgaagtagatgttaacatgtccaaccaaataattgtgaattattgttattccaactctatggaaatggaatatcatatacaatgtatttaatttttattatagaaatcctaagactgacattaattcctgatgtatatgttatgcatatatatttatactataattaatttgggattaatgtattaaatttaacctaattaatgtgaatagtatcaatatgattacatttatatttaattatttttagaaattctgactgatattaattcctaatatatatgttatatgtatatacatatatactataaccatagtgcccacaaccatcaaaaatttactgtgtaagaaaagtaaaaaatgttgtaataagctaacattgctatattgctttaaaatgcaagtttaaaatcatttgcttgtatcatcattgagatatagtatcatttagattcacataaaatgaaatggcaagggaagacagttattttgaaaaagcaacactcaaatgtctgtctgctacacattcacagttgacaggagggagaaatgtttctacgtagatatattgagtgattaaaaaatatatttacatgttaaaaactggatattaaccttaagtctaaatatg

SEQ ID NO: 5931 - DNA, 1048 bp, Homo sapiens
tcctatttttcaacatgtttatactgtggtggaagttggcctgagacatatctcatatatcattagtctttgtaaaatacaaatttgctagaataagataattaattgaaaaaaatgacaagataacatatatgatgtaatgaaattattgatgatgtaactatagagaaaaaaagccttaaacatatcttccaaatacactgaccttctaataaccaatataacatttgtatgcataatattagtacactagactgaataagagagcttaatgcagtaaaatgaaaactgatgctctccatttttatattgttgaaatgtagtttttattatgtatgagcaaatatattttgttacttccataaagcacccagagaagctttcactacagcttcatgagatattgatgacttgcgcttaatgatgccaaatttcagtcaaccagggattatgaatatgtaaattggtgctcagaactcagttgtaaatactaagaggctactattatcaagaaatacatcaaaaagtaaattctttggactctgtagaacatgcactagctttatccagcatctatttcaagactagtcaagaagacatctcctgcatctaatgttttgctttcttaaaaagaagtttttaaaatggattatatagaatagtagctgcagacaaaacttaaatgaagctaaaagtgatgatttagagaaggttataggataatatgttgataggtcatagctaattatcggctttatccgtacatattcgtttaaagtggtcatctaactgatttgttcatatcttcttgtactttctgacagaatagaatatgacagttggaaagcgttagtagcctgaaacccgcagaaccactggaaggctgaaagtttttgattttattcagcacgctaatcatgtgataatagattggtcattcttcttgattcctccttcttaatcaggagttacggattatggacaaataacccttacctttcagtgctccagtccctcagacacctgttaccaaaaggtgttctaggtt

SEQ ID NO: 5932 - DNA, 1028 bp, Homo sapiens
tggattatgcctgagaatggatttagttgattttagagatatcatatcaacagttccaaaggccaacaggttcctgtatcccagggcagctatggtggtatccattttactgtagccacttccctttagcaatagatctttgcatcacgtttcagccaggtctgtttgtggccaaatacatggatgcaaaccctgtcatcctggtctggggcttactactgcccatatttataactgatagcatgtcacaggggttagagtgggtaatgagacccagcttgcctaggagtgcatgtgtgcaggcctccagtgggttatggcaggtaatatagatctagacaggtaatgggtcttaacaggattttaacaaaatctcaagtggcagatttgcatgcaagatccagcaaggctgtcaggtctagagtctataaggtctgatgtcagcatgcccagcaactttaaagtccaggggacaccactcagcttggattccaacagccttcaagaattgtcgaattcatacttaggcataagtctttttcttttagctttgttttatccttgctcctgggaatgggcagtcctggcatgaaagggttgaacctaggcccaatttcagtgggaaaaaagtagaatcacaataattctattgattttggacatatttaatattgattaaaaagaatgacttctggaaactatgttataagacaaaatctggtaagaaaaaaagactaataacagtttttctggtccttttacctccttaaagtgttgctagatggaaaggggctttttggtagaaatattcaagttattatcaagaaataaaataatagcacaaccaaaataataattatcctgctttgtatgtaatgacaatgccacccaaccctgcaggctctagtgaaatatgcagttagtgctgggttgtgggaaagcatagataaacagcgcaaaaagggattcattaccgagtgaagtgaatcattttgcttttccctgacataagctgttctgtgttgtac

SEQ ID NO: 5933 - DNA, 1362 bp, Homo sapiens
tttcctggaaaatgtgtaaaaggaacttttaaaactggttccacctgtaaataagggcaatgaagtaagtcccatttaatttgaaaaacttggctatttcttgagaacaggatacctgcaagaaaatataattttactacaaaatgacaacgttaaaatcttaagttgtaaaaatagactagagttatttaaaagttgaccttttttccttgtattggtttctctcagacattcagattttaccatgtatttgcttgtcttaccacccaaattcctgaatttgtttctgagtgtttggctgttaagtgaatagcttgggcaaaccaaattcaaattatttaggtagaaattagaataatttattttcatgcctcagtgatgggtctaaaatgtggcccatcattcttctaataaattatcaatattgtgaatttcctattacagttctacagacatttgttgtttctcagaacataaggctacaatgcctaaatatcatagctgatataaagtttagaatgaacaataggaattctctcctcttttatgaaaagattatttttttatgtgcttcagttccactaggatggttaaaattacccaaaacttgttagatcttgcttgttttgatttcttgaatatatttgacctatgagacaaaagttactctgctgatagggaagaaaattatgtaattaagctttcatttgtgtcatggttcttattggcacaatgctttcatgtttctgtcctctgttgctcctaagtttagtacaatgtgaatggaaaattaggagtatagaattttcctagttgatttagtctgaggctctaaacacttaatgccattttgtggcactatacgatgaacactgacaaggaaatgaagggatgactgagacagctgtgtttattggctgccctcagtcttgtctttataaaggatcttttagttataactgacctcagctagccatgggctattttttgatgacacagattctaaggagaatagcacacgtgagtaactttagaaatacatgaggcttttcatgtactttttccatcttgacaaacaactatataccacaattataggctactttatttcagagtctcttttacattaataaaaactaaacaaagtagtttttcaatgtctatcttatgtgatatataagatcatatatcatgtttaatgatcatgtatcatgttttcattaaacatgatatatgttcaagtatatttcccatgtgtcagctttttattttttcaagatacaattgcaacaaattgatgaataaaaccacgacaagaagatccttcagaaaacaactcgagacacagtcacattttaaaat

SEQ ID NO: 5934 - DNA, 1032 bp, Homo sapiens
ctcatagcaaactgaatttccaggttttaaaaaatatttccttagtcaaaataacttcttgctcttgaaagttttgagttttctgacttctataaaacaaacagaaacatatgttcttattaggaacaaagtaggtatataggtaagaaagacacagggaaccgaattaaagaaacagtaaggtttgtaggcagacatgcaggtattttagccattttgctttatggtactacaaaattcctatgagcaaataaggtggtggagaataaaactagttccctgtggcccatggagctcacccatattttgtttttaatattaaggctctaaaacccatatttataaacacaaaatgcagaagttgcataataaactcctgtgtcccagttgtttgtttattcattcaacaaatatttattgaatgcctattaaacacatggccccatttgaggacatagcctgaatcagatatcatttctgcatagttactaatatatctggaattaaattaaaatattatgaatgtagaattataattaaaaagagaacaagactaattatataaacaataaatgaatatgcatttagagcctaggtgttgaacactgtgctatatattttgtatttatttattagctcacgtcatccaaatgactctgtaagggtggcctactgtgcccattatgcagggagaaaactgaagattatagttgtggagtgccttacctaaggctacagaaataacaggcagggtccagattttaactcagatcttccgactctttgtccagtaacctactatacatgcgccttagaaatgtgaagtcaaagcagttggttatgtgtgtgagtggttatatgtgtgactaaacacttgagttcatacgtaacaacattgttgttgtcatatctatagtctagaagtagttcatcttttgttttttatatttcaacttttattagtaactgtacaactaattacatgattacttgtctgcaagtaaataataactaaataagtgagtaaaaaga

SEQ ID NO: 5935 - DNA, 1493 bp, Homo sapiens
taacttaaggaaaacagatgatatcttagctctccatttctttaagacttaagactatggttgttcgggtatacaatttattttatgtctcttagaaaattgtcataagtcttattttacttgaagaagataaatatgatgatagtaacagaacaatcagaagtggttattcttttatactaaatttcaactaatatctattaagtacttatggcatgccagaccctgtgatatgagctggagattccagttttatagagagatacagtgtttgtggatgactttatgtttaagtctgggttgggtagaacacattttccacttgagctgcagcaggattccaactgaaaacatacttcaatcttgtaaattctaagttctagtgtatacttgatgattgaagggaaaagaaagagaagggaggatccttgctataattatggtcaagaagtagaaaggagcaggagggatagtaggaaggagaggctatagattggtctttagtaggacaaggttggtgtttagcattattgcctttgcaggaggttaaaacctttctgtatcccagatgggagttagttttatcaactatgttgaaaactagtatatatgtgtatgtatgtgtgggggagagggaagaattgcatgtatttgaaggcttatatgaattagatttatttttatatacttttacaagtaatatgcacatatacattcaattctactatagcaaaacatgtacatttcttattaccaccatgttaggcaaaattgtacaaaaataatcacagtgcttataggaagaatgaaattagggacacaacactagaaacctttgtcagtgacagataataaagaaaggaacctaataaaaattgtaccaacttttatgcatgttaattgcttagaacatacataaatactacaataactgtgatactttaccttgaaaatgccttaagtttgataacagaagtgagcatgagaaatatttgggcttgtgaactgtgaagtaatagaagaaaaatgacctgaaattcagcagaaagtttaaacttcaggtgtggataggtgtgactcataacacactgaagcagatggtaaatatttgagttataaacatgtgtatattttttgtactcttaaacagctcagttcaagttggccactttctgcagatgaaattgtgcagaagcaaatataaaatttgttttatcctcaaattgtttcataatatatgaataacagtggaatgaatttgtgtttcataacaagcataatagtgtgtagagatatatttcccttctcttgcaaagtactcaacctgtcttgactttggcacttctgttctgcttgtgttctgattatttacacttatgccttttcctcaattaggtattaagcttttctagggcaaaggctgtctttggtatggctttaattggtacagtacctatttaagtgacttacccatttataaaaattattaacac

SEQ ID NO: 5936 - DNA, 1083 bp, Homo sapiens
tctgggcctggctttgtttcttcactgaatttcactgctcatctcaaggcagcctcctttgccagctctcttctttcaggtattggtaataattctctccctttgacgctttgggctagggctggtgacagctctgctgttacacatcctgggttacagtgctaaatcctgtgtctcccttatattctaccccaaattctgatgatagtcctttcctaaatgaacactcctcaagtgaccctaatgcaagagagctgtttcttcttggattctctacgtgttatttaacaatataagtcgggtaaaagaaagcctacaaaacactagggacatacaaaagaaagaaggatcgcctcttctgaatagtaagtatcaggacacacagctcaaagtggtggcatgtgggctaacacttgaaggatcagaaaatttatgaggtgaaaaatacgggaaaaagcatacagagtgggaggaaacacacttgccagaatcacagaggttgtaaattcaatagctagttctgggaatagttaaggatgtgtggttgaagcctaatatgtgtgaaaggaaaggatgggagacataaagatgacagcagcaaaactagtgtgtatcttttctaccaagatctctgtgcctagcacaaacatgatgttcaataacagtttgctaagaaaataggtaaatcaataaatacaaaagtagacaggaggcagattatgaagggtttgaatgctaaggaatttgtacttcacagctaaaatgatagagacatagaaaatgattttgaataggggcttgatgcattgtaatattcttcctttcagttatcagtacatttattgtctcccttaccagattgtaaccatgttgaaggcaggaaacaagtcttattgatctatatacccccattatctctgaatgaaaggattcatacattgttggcacccaaaatctgcttgctgaattattgcaagtataaattacatgcttggagttttcatagcatgtgcattttattttaaccatttttattagagcttttaaaatgaaaccatactgattttatctcaaacattgatt

SEQ ID NO: 5937 - DNA, 1030 bp, Homo sapiens
gacagatatacacacacacaaaaaaagacatagactcttctaaaggaatgcgtagtctaacagtggaatatgtttgtaaataatttcaactagaatatagagtgagttaaaagaaatacaagggtagtttatggggtttaaacaaagaaattcttcacatagattatggataagatgagaaatccttgaagtaagatgatttgagattcgtttgagaattgcaagtaggccactttgtctgggaaagaagtggaaggttatgatggagccataatgtggcatgccttgaaagctaggataaggtgtttatttttaatttgaaagcaatggaaagccattgagtattttttgagcatcacattgattctgttggaactgggcttctgaagatatatctggctgactatatagaataaatattagtggcagaaaatgagagttggagagaccagtaagaaagctaatagacaaacgagaaacaatgatgtcaacggggtgagatataaatgtgagggacattttaggagtagaactcataagacttggcaagttattgaatacagagggagagagagagagagagaacagtgtctcaaggatcttgggcctacttaaatggtcacttattaatgccttccccaaagtggaattgttgcactgaaggatatacgtattaaacattctgttataaaatgcacacactgagttttgtcccttttcaaacattggtgacaatttaatggcaggaatgatattgttattttcattcattctgaaaattatgaataaaaggaaacacattaatgtgttttgttgactatacccatcatggcattccttctgttatattttcgtctctccttgagtaaattcttgctctacatggtttgatgctgtgttatgaggaccatgatgacttatgacagtttgagacccattcagactattttctgactaaaaaccaagaggaaatggaattcccaaatggaattttctaggcaattgagggcacagctggatgtgctgcaat

SEQ ID NO: 5938 - DNA, 1031 bp, Homo sapiens
atctaggcttcatagcaatttccaccctgcctcctgacatttcgtatgacttttcacattttgtattgggtaatagggctttttttaaacttttatttcttgagatagagttttgctcgttgccctagctggagtgcagtggtacagtctcggctcactgccacctctgcctccagggttcaagtgattctcctgcctcagcctcctgagtagctgggactagaggcgctgccaccacactggcaaatttttgtatttttagtagagatggggtttcaccatgttggccaggctggtctcaagctcctggcctcaggtgatccacctgcctcagcctcccaaagtgctgggattacagggaattatagggttttatttttgcatttttaaaaacctgttagattataaatctagatttttctgtacccttctcacttaagtgagaattctctagtatacttgtaagggtatactaagtgagaaggataaacagcaaataggagactggtaaacatgtgtggatgggtggttaaattttctgcctgtaatgaaattacattcataatttacattcaaagtgttttaaacagaagcagcagggtaaacagtcaattttagtttttcaaagttctgttttctgacttttcttgtattcgttctggtgaaggtagcttacatgcttactttgtaattctgtttttaaacacatcataaactgtgaggggctacttgcctgtcaagaatggagccattaccggctgggcgcggtggttcacggctgtaatcccagcactttgggaggccgaggcgggtggatcacgaggtcaggagttcaagatcagcctggccaagatggtgaaaccccgtctctactaaaaatacaaaaaaaattagccaggcgtgggggtgggcgcctgtaatcccagctacttgggaggctgaggcatagaattgcttaaacccgggaggcggaggatgtagtgagccgagatcgctccactgcactccagcctgggtgacagagcaaaact

SEQ ID NO: 5939 - DNA, 1036 bp, Homo sapiens
atgtaaaagaacagaaattataacaaactgtctctcagaccacagtgcaatcaaactagaactcaggattaagaaactcactcaaaaccactcaactgcatggaaactgaacaacctgctcctgaatgactaccgggtacataacgaaatgaaggcagaaataaaggtgttctttgaaaccaacgagaacaaagacacaacataccagaatctctgggacacattcaaagcagtgtgtagagggaaatttatagcactaaatgcccacaagagaaagcaggaaagatctaaaattgacaccctaacatcacaattaaaggaactagagaagcaagagcaaacacattcaaaagctagcagaaggcaagaaataactaagatcagagcagaactgaaggaaatagagacacaaaaaacccttcaaaaaatcaatgaatccaggagctgattttttgaaaagatcaacaaacttgatagaccactagcaagactaatatagaagaaaagacagaagaatcaaatagacgcaataaaaaatgacaaaggggtatcatcactgatcccatagaaatacaaactaccatcagagaatactgtaaacacctctacgcaaataaactagaaaatctagaagaaatggataaattcctcgacacatacagtctcccaagactaaaccaggaagaagttgaatctctgaatagaccaataacaggtctgaaattgaggcaataattaatagcttaccaaccaaaaaaagtccaggaccagatggattcacagccgaattctaccagaggtacaaggaggagctggtaccattccttctgaaactattctaatcaatggaaaaagagggaatcctcccaaactcattttataaggccagcatcatcctgataccaaagcctggcagagacacaacaaaaaaaagagaattttagaccaatatccttgatgaacactgatgcaaaaatcctcaataaaatactggcaaaacgaatccagcaacacatcaaaaagcttatccaacatg

SEQ ID NO: 5940 - DNA, 1467 bp, Homo sapiens
ttattcatggtaagaggtgctttggtcaagaagggatgaaaatgttttcatgtttataaaacagtcattgatcaacattctttgtctctccctctccatccctctcttcttcccttccaccttccacttctttctttcaccagtatgacaaaaacttggtagcctaccattctggattctgtctatagaactggaaattcctctatatacagaacttacattctagtagttataacagtgataggtgtatgtagaaaacctaaagcagagtaagaaatacagagccctgaaaagcactactttttagaagtgttcatggaaggtgtctttgaagacataacattagaggagagagaataaagtgaggaaacaagccttgaaatgacatagaaaatagctttccaaatggagcaaatattaagtgccaaggccctgaggtagaactgtgtttgtctgctattagtgctgggccttcagagatgagtgcttgcaggacttggtataggacctggcccacaggagtggctcattgaatatttgtgggatgaatgaatgagcagatgaatgaatgtaaaccccatccccaaagaattcccactgtagcagaggatggaagtctgactaaagataactacttggtagcaataacaacattcagcattgctcttcattgggtagggcactaagatctttacataagttatcttacataattcacaaagcaatactatggacacatgttattgctcccattttgtaaacagaaagtcaacagagattctgttataatgtttaagtgtttggactccggagccagactgccttgatttgagtaacagtacttccacttgccatctttatgaccttaaacaagttacttaacttctctgtgcctgggtttcctcactggttttaaaaaacccgaatataaccgtttcaggacattggtgtgaggattgtgtgaattaacatatgcaaaatacttaagacagtaactggcactatataacttttcttataataaatgctgtcatcatcattttcaagattatgtaggaaaatagggatgctaactgcttgagaattccacagaggtcttcataaataagatgtttgaactaagatttgaatggaaaggtaggaattctaaaatgtattcaagtggtatgggtgtgtgtaaatatttcagctaattcagcattgattttttcagggggatttaaaaagtatatttggtagtaaattgtctcctttttgctgaatatcaggctactataatataaattccaccttgttcccccaaatgcttctagacttacaacttgtatacatgagaataaaatcattgtcattttccatcttataagacaaaacataaatctagcctggtttagcctccattgtcattaaataaaaaataagaaaatgatctcctgtgcagatagtcaaattgaaaagctcatgggt

SEQ ID NO: 5941 - DNA, 1024 bp, Homo sapiens
agtaactccctagttagttctttactaattgatgctttgaaaagacaatgacttttttatctgatgtatttttaataaaatagtctctcacatcacatttctaatgaatgcattaaaattctcaagtgactaaagggagtttaaattatctctgtattattatgtcagccatctagatctatgatatcaaaatatatatatttaagatgtgcacaaattaattaaaatgataagtttctaaatctctctttgtataagttccaagaattataaaaatagcactattttctgatcaaacagttaacactaaattttacaatgtttgtaaatgtggcttagaggccagtctttttacatggttccttggtttacaacagcagccaccatgataatttcagcaagtcaatacaatgtgttctaaaaaaaaaaaaaaaaagattggcaaactttttttttcctaaccatgttctgcattatttaactttaaagtagagctcatctttctaaagaggaaaatagtgagcagtaaataaatctcttttgataagataacaatgaaaggtagttatctagtccaaccagcagtgcctcaacaaaggctaagcatcagaggcagaaaataataaaagaggagcatttttcttcccctttatatttttgtttcatatttttcttttctttctttttttttttttttttgagagggagtttcactcgtcgcccaggctggagtacaatggcaccatcttggctcactgtaacttctgtatcccgggttcaagcaattctcctgccttggcctcccgagtagctgagattacaggtgcccaccaccacgcctggctaatttttttgtatttgtattagacacggggtttcaccactttggccaggctgttcttgaacttctggcctcacgtgatccgcgcccccccccgaccccagcctcccaaagtgttgggattacaggcatgagccaccgcgcccagcctgtttcatatttttctatggaaaaattggattg

SEQ ID NO: 5942 - DNA, 1607 bp, Homo sapiens
ttatgaactaattacctcccgaagaccctgcctcctaatcccatccccttaagggttaggattccagcatatgcattttgaggagacgtaggtattcagtccattgtgcacaccaaattatgaattaatgtattaatatataattgtatccaaagaaaggtctaccaggaacccatatttgtttgctgatttgcttgtttaatatgcttcatttcctcaaaacaaagggaagcatattttagcttattttcctttttaatcttttgttttgagaatctctgccattgctaaagtagaaaattatgttttcttaactttttgtttattatacgtaaatacattattattaataatataaattcagtgtgtatgtatttctctatagtgaaggtgttgctttttaagtgaatgtggctataaactgagactttaaaaaatctcattgtcattaaaaaaatactgatttagaaaagttctagattcactgtatagaactcacagaatatagaatagttgctagagcacagaaactagtactcttttaacttctaagaaaaagtctgggaataatgtagatcccctcatctttatttaagtaatcaaaattgattctgtgctgggcgcgatggctcatgtttgtaatcctagcactttgggaggccaaggtgaatggattgtctgagctcaggagtttgagatcagcctgggcaacacggtgaaacaccgcctctactaaaatacaaaaagttagccaggtgtggtggcaggcacctgtagtcccagctactcagaaggctgaggcatgagaattacttgaacccgggattcagaggttgcagtgacccaagatcactccacagcactctagtctgggggacagagtgagactctgtctgcaaaaacaaacgaacaaacagaaaaatgattctgcataatgtggggcagattatttatttacaaaattattttttaggaaagaaaaagttgattactaagatttagctagattcactatgatcaagtcatggagtcaaactttacgttgttgttgtttgcatgagttaattggctgatagattactggaaagtcatggatgttgtgtatctggtttttagcaagatgtgcatcagtgttccctataatgtctttatcaatgagtatgagggctgtaagctgagtgataattttgttaggcagatctttggctgtttgaataatcaactgtagcaatgttattcattaatgccaatttgatgaaaactttggtctggttcaatatgtttattaataaattcacagagaagcttaatagcatactaatacaatttgaggatattagaaactaggagggttagttcctatcttgaataagaaggcagatccaagaactccacagaaataaactatggagaataacagttatttaattttttcaaattatggatgtggaggaagaaatgaattaactctgaaatgagagcaagacataggactaacagatggaagtttcaggaaaatatattttggctcagtaaaagaaataaattactaagatttatagtagtctgaaactgaaattgagaatttttcaggagatactcaacta

SEQ ID NO: 5943 - DNA, 1045 bp, Homo sapiens
gtcatgtaatgacatttattagagaatctggcaaaagcccaaataaaaatacaggttttcacactgtttaacaatctgaggttttatgtctttttggtgaggtcattgaataccagtctcatttttactgcctctatttttgaaaacagtaaacagtcatatttttattgtcctacgtggttgcacaaactgacacattgccaagtggttctgactgaatgcttttcacttggcaaactaaaggtactaaaaagaggttcacagtggagacttatgcatgtaggggagcaatttctgtgggcatgtgtatgtacaaaataaatctgtgaattccagtagagccagtatccaggactctaaaagtagaacagactgatttatttgtgacaatgtacttcagctgaacctctgtgctagtttgttggcaaaacctaacatatggccttttaatgagagacagattaataattgcagatatgaataataaagcagaaagattggctgtgccatcttttattctaataaggaattagatttggttactgaaggagcagctgtttgccaggtatggtatgctactgtttgagatagacactttgatgcaaaatgggacgcttgatggtgatggacttgaaaaaatggatatgcgatgtgtgtttaaatttctcaagccctataacaataaacattttacaccccaatgattattattctataccgtcattcaaaaacctacaaaaaagacacagtgacaatgttttctgtcttgttgttctttgagagaaaagacctatgatggtacctcagtgcaatggaaaaaaaaattcttgacaaaaggatcaaatagaagtggtggcacagtttctggaatatatgacattatgtttaaaattgagtgcaaattcttgtcctcccctgtgctagacacgtttctttgcctgcttgaatccacagctccttcaatagaatcaacctgcccctaccttggctcctagaagtgtcagctgcacttatcaggtgacccatttccatttctagctatgat

SEQ ID NO: 5944 - DNA, 1036 bp, Homo sapiens
catatttgaagaggaaagataatcacacaatttaagacgaggaagctcatcttaatttaagccgagggaggtaaagtaataccctgctttaagtcagtgaattagcagcagaattagaatctgaactctgatatccttatattagcctactgctaattcctcctaaggcaagaataaacagctttacagattaggcctgcaaacccaaacctataaagtgacagcatatgtcacaattcacataacagatgttgttttaggttgcaattgttgtcaactactctttctgccaaagtctctcttttttagatcatcagagcccatctgacaacctgtagaacttcagaggcagagaaaagaattatttctccctgtcctgtgctgtccttaaacctgagagggtcatgcctgacctgatgaaaacacccttaaaaaatcaaccatccagtagtccaaagccaatttcaaaactgctttatttgcataagcaatatttagaaccctggataccaaagatccacatcattgccagtggagaatggcttttttgccctctatgctggaacaataaaaaaaaaaaaaagatgaataatgtaacagtctggcttgaaacaaaaagattgctgaataaggtgggaagctcccagaactgaaattcaaatagaataatagcatggattgtgatgaggaaggcaagggaagtcgtcctatatataaatgactgggtgagaaattctctaatgagcacatacaggataaaagacaggaggctgggagaagagcccaataaccaagcgcaagtgtcagaagcctgtagaatgtgtcaaagggagaaaatgccaaagatgagaaaagtttataagtatgttcagaacaagaagatagaaggtgattggatgagtcaaccaaaagcccctctaggataacaagtcctactttgtcttcccccaacacataacagtttctctatcaaaggaaataaatattagattggatagggtataatactagtgagaagaagctgaagcccaaagat

SEQ ID NO: 5945 - DNA, 1084 bp, Homo sapiens
gcagtagttaaaagtaatttagagatgtgcacactatcttccttactctgttaatactgaagatgttgtaaattcagtgtgtcaattcaatacttctcttctttgagcaaggtgttgtgttagacaccaggcatgtagcaagatgaatgagatgcagtctctgcctttgaggagtggaacagacatgtatataatttattgatataatcttaagcagaatatatatattaggttgccaatatttgacctaaaagtgtaacaacctcatatgatacaacctagtaaaaagtgttctcattgtgctaagagaacactgagactgaagaccttaactgtaactgttggaatttgagaaggcttcatgggaagcatatcattttagtaaggcttcataatatgggtggaactggattccccttaaaccaacctccttctgtactagagagtaggaagcttgatcaaagaaatgaagagcaaaagctaggagttatacttagataatagcaaacaatccagaatggcttgagcaaataattcataggtggggcaagggaggacaaatatggctgagacagtacattggtatcagactccattgtattattaggctatagagaagcctcaaaggttttgaggaagggagcagcaaattcatagctatgcacctaccattccactgtccttgagatttgcacttgctgctccgcaagatggactgactttctctgacccagaaagttaatagacaaatttgacattatcttataacagccattttgaaacaaatatcaacatttataaacgagtccaaagtgaggtggaaaaggaactaataaaaagttgttttgatagaaactgaagctgaaaagaaatgggagcagaggttgcaaacccacatgcccacaggatccagacagcatagatagagagatagcactccacaaactctggcccaaatccagcccacctcctgtttttgtaaatgaagttttattggaacacaggcctattttttttcacatattgtctgtgactacttccatgctgcactgcaatagcagagtttagtatagacactgacagt

SEQ ID NO: 5946 - DNA, 1144 bp, Homo sapiens
cgttgtttaacttgtttattcccaaatcctcaggggccagcatagtgcatccccatagaaggcacctgctaaatttgtagaatgaatgatacatcaatgaatgagcaaatggagccccacctatatcccatattgctgtgtcttttctttcatttctggcctctaaatttgctctgatggcgttcttttctctctcttctgtttctcttgtcttcctctcccattcttttaaaaactaaattgattttttcctacttttggccaagtcatttactgatttccattttctacctgtgcatgaaggtcacttcagcttggactctttctcaactctctcatgtaatcttcagtttgtgtctgcctgcttacattgctataacttgaattactgtgtctgttaacaacaacaataaaggtaacggcaaagtggtaggggaaatgttaaacaacaatcgtaaaagggagtaaatgaacccttaggtagaaagttagaaggactgaatttatctgtggctgttgaaaaactaaactacatacattgttaagctttaagggttgctcttgaaaatgttctcaggctgcccaggacagttattgacctatagggcacactcaatacatattaattctctgctcaatgtagtatgacaaagtcaggatcaaatattcatacatccagatcttccagagataagatggattgtaatatctatgtttcttctaggtcttgtttcaagtgcatatcaaaatattggtaatatttgggttggaagagaatagtttgcatattattattaatgttttattaaaaaaatcgctcttttagacctgcaattcaaaatggtctgtgcatttgtaaccatgatattatattcaacttcacattttctcatctaagtacatttgcagttgtcgaaaagtcagcattaaatcaggtttgtacaattatggtatcttatggttaaaattaacagaatccatttagttcattctcttaatttttatgatgagaaaactctgatcacagaaatggtctctatggcaaactttattgaactgcatttatatatttaaagaagtgctaactgaaatagtgcaatttaaagtttcatataaaagtgcatggaaaattgtaaaatttatt

SEQ ID NO: 5947 - DNA, 1066 bp, Homo sapiens
tagaacatatccacatgcatttatgtaattcttatcatctagggtactttgtttattagaggagaaaactgagaccctggaagtcttactgacatcatgagcctacagttactgaatggaaaagtgaggcttgtccctctcattgcagggttgctgtggtttaactccccaacctaccctaaacagccttttggcaaaagaccaatttattcagtataccttgggagaaggcagatatctaaatttatcttgcttttggcaagaaaatgaatatttggtggcataaaaatgatcacagtttgagaaatactaggaaacattctatgagaaactaatgtttagcaacgtatcaatttatgacatttgaaagaactaagagtgaatgattgcttgaaacctgaattggactgctgatcatagaacaagtttaacccatgggaaagtgggaagtatgtttcagaatgatggaataacctgtcatgcaaaagcaaagacctttcatggagactggtgaattcccagtctcagactttgatggatgattttgtcagctgttttctctctgaatgtgttgtgtctcccagcttactactgaagcaaggaggttcactggaattcacttttccaaaagcagtcagggacacaccatcctttctttctaaagtttgtgcctttttcagcttagaaaagcacttgcctttctatctctgacaagtgactgtgcaaaactccatctatgacaaaatggaattgtgcaagagtaatgaagggatgagaaatgcatctcctttgacaggccatgcaaacccctttactcacattattacagtgatagttgtaaaaggaggaggaagtagaagaactggtattgagctcctagtgtatgtgaagccctctctatgccttccagccctacaccctgtgttggtagtgttactgttattcctgttttatagataagaaagctgaggtgctgggagaatacagaactagagctgcgatgttttcccctcctttttatgttattgtgtattgcctcctgcccaactctacagacagattttac

SEQ ID NO: 5948 - DNA, 1052 bp, Homo sapiens
cattgcttcgacttagtattttatcagcgaggtgcagaggaggccagaacatagaagtgcccatcaggatggaaagactttagaacttttcatccctttaatctttgtaaatgcaaaatgtgttgtgtcaaaggaacgtagatcttatactattatcatcaaaagatttgaagttatttttcttctcaaaaggaatctgtgatatcaacagttgcatattgtttttctgttgtaaatcaaacagcttggaagaaaaatgttgccatgttttttgaaagggcagcacaaactatgatcattatggataaatttgagagttcatcctcatgaacttttaatgtttcaactgagtggcagttgcaaataaaagcgatgtaagatcaaagtgtttaatattatacacacatacacacacactatattcaagattttaccatttgtattggaatagattgtttaaagaaattttatagttgaagcattgattgatttttccaagagtttcttttgatttacaagcttgtaagtattctaacataattttcctaggaaaatttagctcttttagtattttgtacacctataaagtgttctaattttcatgtctcgctcatattgttatccaatgtatacatttttgcatgttattgtgaaaatattagattattagattttttgcattagtcataagggaaattattgtactgcaggctaagtactctcagtctgatccaaaccttcctatagggctccaaattagccattctgttcaaccttttcaccaggcaattcagtaaggggaaacaagtcaatctaaggggtgaattttgtaatcacagactagtaaaacaataacaacaccttacatagcagcaaagaaagctatggaatgcaaaattaattaattccttgcttttccttagagaatttggatttatacttaattgagctaaagtacctgactagcctgggatgtgctcatttgtattcatagtgattttagatgttgtataaagatggaaagcaactaagtcattatttatttctttaga

SEQ ID NO: 5949 - DNA, 1050 bp, Homo sapiens
aatagatctatggtatgctctttggcccagattaataatatgacaaacatttggattctgttccctttgatgaactgaaggaaatgtaattcaggacagaatgccccaaataataacgtcgattttgttagtcagaattagagtgatttctgttttctcaactatggatgtaagtgatgattttaaaataaaaacatgataaaataatttgttcaataatgcagtggccttccagcatatatgaatgctttacattgaattaaatcaatattaagtgccaagtataagcagtaataataatttatataaacatacagaattttaagaatataaataatttgtggaattcaatttctacatatgttttgactatgaagagctgggaattacctcattcattcacttcacttggcaaacagatgtcttaatttctaggtttaagcaattgatttcatggctcatatctttgtagtaaaagaaatcatttaaacatgtagaaacacagaattttagaactgcaagggcttgtgtagtccaggctctctcaagaatcagccaggatgcttttgggagcagataacagaaaactctgctcgaactatctcaaactggcttaaacaacgacatttatttatcatctcacataaggatttttgaggtaggctggactctgggtgtagtatgaaagtttccctgatgttcttgggatttggatttggtctctacaaagcattgctttttctgctgagattgtcaataagatggatgcagtagccatgcctttgatgttcagtgaaagctgtgagagagtcgttctttcctgcactgttttttcgggaggaagtaacttcccaggtgcttcccagctgaggcacttttattaaatggttaggctttatgccagagatgagcaaatactgtgatttatataaagagatcctgaccatctttgggactgggaataagggtctactttcctgagtcacatgatggtgaacgtcaacttactaaagctggggtttcatttgagaggaggaaaaggagacatac

SEQ ID NO: 5950 - DNA, 1032 bp, Homo sapiens
ccactttgattttctcctttctcagggaagagatctctgtcttcccaagagcccccacagacctctgcttcttagaacttttcacagaggagttttaaattactatgattacttgattacaagtttttccttttagtaaatattatgagataaagcccacttttttttagtactcaacaaaagaataagcaaataaatcctgagatttttcattcccaaagctataaaacttgtttaagcattgtcgtgtgttccaagatgaatgtactgtacttctaggtaacatgtagacatggtctggtcccatgtactgagatagcgtggtagaaaggctacataaaggataggcaaacagaagaatatgaggtagtctgtgtcatatgccagatgagcactacaaataataaatgccctcagacttcaggaaagttcagtgaagagggccatgatgtttggagactacttcatagagaaaggaaaacttggactgggaattgaaggaggagtagaacatagacaaatagaaagacacagatccaatccaggaagatgcactaagaaagaaaagttagatttactctaggagtgatagattagtttgatgaggcattctctcagtgggagtagaaaaaatgaaatcggggaactagaaagtgagggagatggtagagactgtccagtctgggataagacgttggactatgggggaagctattgaaactctatgggcaggattttgacataaaaaaatcaatgtttataaagattaattttcaaaccatgtgtagaatgggatgtgagagagaaaaagtagtcaagcagtaaagtagcctaagtataaataaaaattcaaaattaaaattaaaaaaattcacatgaagagaagaaagcgataaattttgaagaattgacaggacaagataactcattggacacaggggctcagatagcttaaagcaaaattcctaggtgtcgagctttaaaaaaatgatggcatcattaactgaaatagcaaagttcagagaagggttt

SEQ ID NO: 5951 - DNA, 1224 bp, Homo sapiens
agcagcacaacttgcaattgcagaagtatggaaccaacttaaatacccatcaaccaacgaatggataaagaaaatatattatgtatacaacatggaatactactcagccataaaatggaatgaaataatggcatttgcagcaacttggatggagttggagaccattattctaagtgaagtaactcagggatggaaagccaaatatcatatattctcacttacaagtggaagctaaactatgagggtacaaaggcataagaatgatataagggactttagggactcaggcggaagtgttggagggggatgaggactaaaagactacgtgttgggtacagtacacactgctagagtgacaggtccaccaaaatctcagaaatcaccactaatgaacttatccatgtaaacagaaaccaactcttccccaaaaactattgaaataaaaaaggaatcaaatgctatctttaaaaagataaatgaataatttattgttagatacaacattttaatgcagtttggatcagggctttccaacatgtttcacttcagtgcacatagaaaaccacagagattgctcacagcttgaggtgaaggaggtcagtattttgactgtctgtaaccaataactacatactcaggctgaggccagattatcaaggttttttattctgtccttggcattcttgtttgttgatagcttatgcttgtagaaggggagactaatttcacagtattaattattaatatatcattacatctagatttgtaaaatgtattcatgccttactttgtatcaaatggacataggttatgattgaaatatttagggtggctaaaatattgatttgttagcctatttaatggcaaaattaatgcactgatttttaaaaggtagattatctttgtgacagcaagctctgatcattcattttggattttttaagagtaatttggtggaggatcatctaaattacttagatttttggacatcttatgccttcaaatacctttccatagttaaataccccctttgaagttattatgcttataaaatttccaagccattcactaaaatcaagttcataacatgaattggagggatttaatgggtggatcatatagtgagttactcctggatcactcaacagattggaaactgtgagtagatcacaaagattcatgcaagcaggatttaaatctttctggttttcactgttgtatgct

SEQ ID NO: 5952 - DNA, 1045 bp, Homo sapiens
atctctttgtgacaaactttgcaaaaagttttgtcctataaattgagatgtgcttatattagtaatattatggatataagatgtatcacttagacactgagcctttaaagtaatttaaagtgattaactttaaatggggttttcagatctagatggcttttactctcacagaatattttcaaaatattttaaatctatggtctaatgtgattgggaaaatctgaatattactttcatgtgttcttctgcatacttccttaaagtagtctgggttagtttgctgagaatgatggtttccagcttcatccatgtccctgcaaagggcatgaactcaccctttttatggctgcatagtattccatggtgtatatgtaccacattttctttatccagtctatcactgatgggcatttgggttggttacaagtctttgctattgtgaatagtgctgtaataaacatacatgtgcatgtgtctttatagtagaatgatttataattctttgggtgtatacccagtaatgggattgctgggtcaaatggtatatctgattctagatccttgaagaatggccacactgtcctccacaatggttgaacaaatttacactcccacgaacagtgtaaaagggttcctatttctccacatcttctccagtatctgttgtttcctgactttttaatgatctccattctaactggtgtgaaatggtatctcattgtggttttgatttgcatttctctaatgaccagtgatgattagctttttttcatatgtttgttggctgcataaatgtcttcttttgaaaagtgtctgttcatttcctttgcccactttttgatggggttgttgaaaaccaaacaccacatgttctcattcatgttgaacaatgagaacacgtggacacagggaggggaacatcacacactgggcttatcgtggggtggggggctaggggagggatagcattaggagaaatgcctaatgtagatgatgggttgatgggtgcagcaagccaccatggcatgtgtatacctatgtaaca

SEQ ID NO: 5953 - DNA, 1027 bp, Homo sapiens
cctttcctagatcctgtagacttctgagaacttgttatatatcaccttataactttcatgtccactgaaagttgcaatttggctttgatttggattccgctgaagtttgattactgcacactaaaaaattgccctgaaatgaaaatgagaagaatcaagtaataattgttctaagtgcaattgaaacattgtatctcctagtcattctctctgagccttagtttccccagccatgaaattgggatgacagtgttttacaaagtagtaaatagagtaatgctagctccaatagggcataaatcccaaaatgaccgtgctcaacactatagaaagttattgatcgatcctgttagagtggtgagtgtttgaagacagagcagggctgctcttcttcatgcagtggctgatgccatcttacaacacatcttaaaaagttaaaaatccattcctagttcctaaagggaaacagacaatggagaaaaattatgtgagaaattattatgggtcaagtttggaagagttgcactttatttcactcatacttaactgcaaaaaagtgggcagtatagtccctctctatggacaggggagtacaaacacatggaggatggatagttgtctctgccacaacaagcaatgctgtgagagttgaaactccaccatacctgcttcctggaggctttcagcaagtggtggctactcttgctttgctgctattgcaatggtgttattgtcattattaggccttaaagtgccgtgaatgactcagtctttctaacaggaaaattgaaattaaattcgatagccagtggcctggaatttgaggttctctaagagtggaaagggtaaagtattggacatgacatccttatttatctgaggaccacacttgtcaaaataaagtcctatgttttttcccacattataaagttgtctttattgtctaccatcatctttcccagctcttatgtgttataattttaattgcctatgcagtttagagttcaagataaaagccagaatgtga

SEQ ID NO: 5954 - DNA, 1008 bp, Homo sapiens
atgaaattttcttatggcctatcatttagggcctccatggtaaggggtaggggcagtgacaagcagggatgctgcagaaatgttatggaccagattgtgaaggggcttcttaatttggaaactaaacttgggctttctcctgagggaagggggtagcttcaaaagcagtgattctctgctcattagagtcacctgtgaaactttataagcactctctatccctgagcccatctcagactaatgaaatcagcatttttcatagtggtgctggggtattaatatgtttaacaatctccccagataatttctaatgtatggctagttgcaaactattcttctaaatgttagtaagcagagtgtaaagtgatgcaatgccaacactttgaactggaggctcataaaaactgaggcaatgtgaagatgcaaacctgacatgctttgacgttggaggacaaagagagtaaaacaggtaggatgttccttaagtttccagttttttgagcttggaatagatgttggttaagttcaacagagtagaaaatatgacaggaatatggcttaatgaggaagacagaattttgtcccattgagcctgaaattctgtgagacacatctagaaggctcttagctatacatgtctgaagctcaagaaacattttggttatatatatatatagagagagagatgtagagtcaccagcatataatgagaactgaagtctcaggagtaagcaacaatgcttacagaatttgtggtgtgagaattgggataattactgagtcctgaaaatcatcaacatttaagaaccagggagaggagttcacgaaggaaagcaaacaactggagacaaaaggcattcactgtctgtttaaatgctgggaatctatagtttgttccatgggagaccttttaaataatacagaagttttaaacagcaaaatttacttgacactgcaaattttaaaaactagtttatatccttttactaaatatttcccaatggaaac

SEQ ID NO: 5955 - DNA, 1028 bp, Homo sapiens
ttttcttcctatttttttattttttaaattttttaatttttatttttttattattatactttaagttttagggtacatgtgcacaatgtgcaggttagttacatatgtatacatgtgccatgccgatgagtgtgcttttcgggagtcacatggagaggctaaaatgctacttttttgtggggattttaaacttctattgttatgcactgaaagagagtataaatgtgttactgaacaatgtatttgcaaatattaggtgctgcagtaaaatgtaaagaaatttccaaggcctgattttatgcatttagattaattattgatgtttctcctaattctgctacttgaaaatgggtgtgaagaacaaacttgttttcaatgcagttttaaagggactgagtctttggtagctttatggacccacagtcatcaaatttctcatcatttgaggttgttaatcattatgatagttcaaggagattctgagtgaataagaaatgaaattctattattatcttatctttgactgtgaagatatttgaccacaaaatatttaactgcttatacatctcaacatactccattgactagaataataatgagtttaataagctgaaaagattacaaaaatgaataatactacttagcagcagtactttctgaaagaaggaatgacagaggggagcaaagaggtatgtgtagttattctgtacatcttgtatgtggttgtgtggtttaaatgcctttagttttatttagaagtagatttttttacttcagcactaatttctggggtgtttctatattcatgtgttgcatgcatgattatgtatgatatgtaaaattatatattaattaataaagggcttagtgcataaaatagatttgcatgtttaattagactcttattatctagaatggaaaggctaggaaaatgacaatcagggaatatcataaatgtgaacaagaaagttccactagataactaactttaaaaacataataaaaagaaacatgtagtacacttgcac

SEQ ID NO: 5956 - DNA, 1028 bp, Homo sapiens
tctcttccctgagtgcactttaatacctttaaggagtatctctgtccaaattaagagattgtactagatgtatcatttttaaccctgtaggcagcagagtcacctaggatacttgggaaacacagtttcttgactctacctaagactttctgagtactaatctctggtggtagattccatgagagagagagagagagagagtttgtggggtgtgtgtctgggtggtggatgggtgggtgtgggtggttaggtgggtttttgtgtgtgtaatatttgtaaccagatactccaagaaacattcacacagacaacccaacattgttctcagaccaaatttgagaaacacaagtctagatggccttaagggtgctttaacttcgagactgcatttcactctgcagctttaaagtgaagttgtggtagtctcattcacctttgaatttatatgatgtccatgcctcctttttggatggtattctcttttgcaggttcagtttttgacttagacacctttgaaactacttgaattagggattattctttgataatttgctgtcatcaagtgaattgagataaatatacattcagagcatcattatcaactttgaggaaatgtaggcacttgtgtgttcatgttggacacaggaggctgagatgagaggatcatttgaacccaggagttcaaggctaaagcgaactatgattgtgctactgcactgcagcctggaacacagagcgagatgctgtctcaaaaaacaaacaaaaaaaaagacgagtaacaaagaattatacaaaatttgtttataatatttgataccattaaatttacaggtgcatctgcataaatgctgcattttgtgctcagataaccaaggacatggcaaaagctaatcagcctaggaggcaggaggattacttgagcccaggatttccaaaaatatatatcactatgatatatcaattttttattctatttttcttttagagactatttttgtaatggtctgacttcttacatcacaatatgt

SEQ ID NO: 5957 - DNA, 1084 bp, Homo sapiens
tggattcgttaggttggtgcaatagtaattgtggttttgccattacttttaatgttaattagtgtaatttaaagtaatgggaataccacaattacttttgcactaaactaatacttctgggctctttctgttccattggtcaatatgtctatttttatgccactactatactgttttgattattatagctttgtaagatatatttaaatcagaaagtgtgataccttcccctttgttcttcttgttcaatattgctttgagaggccaggcacagtggcttactccagtaatcccatcactttagaggctgagacaggaggatcacttgaggcaaggagtttgagaccagcttgggcaacataacaaaactctgtctcttcaaaaaaatttgaaacataaaaaaatttcctgggtatggtggcacttgcctgtagtcccagctacttgggagactgaggggggaggattgcttgagcccaggagtttgaggctgcagtgagctatgattgtgccactgcactccagcctgggcagcagtgcaagaccctgtctctaagaggaaaaaaaaaaggattgctttggctattgaaggtcttttatggttccatatgaattttagtatttttttctacttttgcaaataatgccactgggattttaatagctattacaccaaatctgtagattattgtgggtagtatggacattttaataattttaattcttacaatccataaccatgtatgtctttccatttgtctgtgtctttttaaattttcttcatcaatattttataatttccagtgtgtaagtcttttgcctcttaagttcatcctaagtattttattctttttgttactattatgaatgggattgttttcttaattttccttttagatagtttgttgtttgtgtatagaacatgacttattttgtatactaattttataccctgaaacttcactgaattgttttattagttctaacattttttttctttttttgtagtctatagagttttctacatatatgatcatgtcatctgcaaacagagataagcttatttcttcccttcctaattaga

SEQ ID NO: 5958 - DNA, 1029 bp, Homo sapiens
tctgaggcatccattgtaatatcttctctttgatttctgattttatttatttgagtcttctccattttttcttattagcctagctgagtttgttgattttgttgatgctttcaaaaaatcaactcttgtttatggatttttttattgttgtctgtttcttatttgatttacttctctaatctttattaattccttccttctgataattttaggtttagtttcttcctctttttctagttccttgaggtgtaaagtcatgttgcttatttgagaatgttctttcctagtgtaggcatttatgttgtatttttgttttcatttgctctgaaattaaacctagttacattgccgcctctgcttttccatgttttctttagtctgctttttagctttacctttgtctattctttccctctttatttaagatctcttaacttgaataaatataacagagtgaacagtgaaggggttatttcattccttttgggaggatattcctctgttttaaccttggcttctaggactgactggtcataaaaggaaacaataaatgcaaagcattgagtccaaaagtggagaaaagccacagttcatcttccctggcaataatatgatagtattattttaagattcagtgaattctgttctgcgagctgtaagattggttgatttgtaatagggggaaaaagggcatgttgtggggagggtagacatttagagaaagtaaatgaccttgagggtattgaactctgtgaatcaacttgttctctaaagttaggggacataccacttctagatggtgaacctgtgggtgttcatttgaacagtagagtcatagaaaaactttactatctggaatataataaaaatgctgctttaactgctaagtcgccatctgttaccagctctttgctactggtttatcttttttccttttaaaacgtgaattcttggattttcatattataattttatacttaccttaaattaggattgagaggaaactttgacaacacctcttaaaagaaa

SEQ ID NO: 5959 - DNA, 1048 bp, Homo sapiens
gaatcaccagtgtggggaccactttcccgtaagaagccctgttgtaattgatcctgtctcctgagcctccccggctgccactggacattgcaggtttggcttcctggctattggttttgcagtcagaggagttcagttcagtttagtgtgttgagtatgagcaaagcagtatgagccgtgaggtatcaggatgagtgtgtgactgccttctcttctcatgtgtcatctgtgtgaattcttcccatgtatcagcctcttctaagacgtgaccttaactagtccagttcctggtgctctgacctctctcaagctacttcactcagagtgctgatcaaatggtttggaaccacagtgttagctatgtccttgttccatttagtctgtaaatccactgaggatgtatcttatacttcttttgaaatacactccgccattagcacattgaggagcactactaggggtttaattgacacctgttgattgactggtacgttaattaatgtagggccttataagcatgtcttccagagacgtttaaaaacttttattcaaattgtatataacatctacttgacaaacatttttagtaaacgtgataatgtagaaacagaattattccctgtaaaatattattcattttagtaatttgagataaagagttatttgctcactagattttattcacttggcacctgtttattaagtgcctatggtgtgtcataagcactgatgatgtaattgagacctaataatagcctaggaaagtatgaaaaaatatgaatatcttcaatgttggttctttcaggccaatatttttaaatgactcattggtagcaaaacatcacttttttttttttttaacgagcagatatttataactgctaccaaaaccaggaatagtttactaaatatgggggtttgaagatattgtctttagctgggaaaagcttccaggctacaagagaggataaagacagtgagtaacatttgagatgtactttatttcattacctaacaaacacctatccagcactcacaatggacaggc

SEQ ID NO: 5960 - DNA, 1075 bp, Homo sapiens
ccccagggaatggatgctgtttcaaccgggttaagattggtttgaaaactggttaagattggtctgtttgcaaatatggggcagtcaagaatatacccagagaaagctattccacaagggacataaatgtaagatattaacaaaataccattctctgtccaacattaaaattttaggaagatacatcctcctctattcttttctctcaaggacttcccaagtttccgtgcaatgtttgctttaattcttttaatatgaataatacaatatgttttacatggcactaccactttatttaaatctcaagattttctaagagttaaatgttcactgctagtcttcacagcaatcatcaaacaggcctattcagtttaagatggcctcatgtgtgcgctgtcagtgacatctgccaaaaccatgtcttatttgtgagaaatgccccttgtctctgcttgatggaaaactgatcagcctcttttactctttcaactcaatgattagcaattactgctaacctagaaaacttcgctggatatttatttaaaaattctcgtcttactgggcatgatggatcttatttgctttttaatataaacagtgaaagtataaatacattcttactttttggagaagataataatattaaatttaatttttgtctccagtgttattgcatttttctaacagaaaaactaaataaaacatatctttagaatttaattctctttaagatatcacaaactatttttcaattttaaaataaaactatatctatatatatatacacacacacacacacatacatatttgagacagagtctcactctgtaacccaggctggagcgcagtggtgtgatctcagctcaccgcaacctccacccccaggttcaagcaattctccttcctcggcctcccaaatagctgggattacaggcacccaccaccatgcccagttaattttggtttttttagtagagatggggtttcgtcatgttggccaggctgttcttgaactcctgacaccaggtgatctgcccacctcggcctcccaaagtgctgggattacagacatgag

SEQ ID NO: 5961 - DNA, 1035 bp, Homo sapiens
tgatgaggcttgttctgggagtgtagagaaagctggaaagtgggaccaactgctgctgcccatgtgaagttctaatcctggggtaatgtaatcaaaaagacagccaagcaggaaggggtaagttccttctccctctcttgccttcttgcctcccccagggcttcttctggcaggtatgaacagtcttccagttggtcaagtgcaacaaatgtagtctgctgaaccatgaggtctgcatcagaaaacaaagaacagaaggatgggtttagagataagaggcaatatcttagtaaccaacacaagtgtctttcaaatcccagtctctttcataaactcctattggattaaataatcaacagagtgaacagagagcctacagaatgggagaaaatacttgcaaactatgcatccaacagaaaactaatatccggaatttacaaggcactcctacaactcagtgacagcaaaaacaacaaaaataaccccattaaaaagtggacaaaggacatgaatatgtatttttcaaaagaagatatacaaatggtcagcaagcatatgaaaaatgcttaacatcactaatcatcagaaaagagcaaattaaaaccacaatgagttagcatcttataccagttaggatggctattactaaaaatacaagaaataacggatgtcgatgaggatgcagagaaaatggaacactcatacacaattattgagaatataagttagaacaacctctatggaaaacagtttggagatttctcaaataactacaaatagaactaccattcaaaccagcaataccactactgggtatctacccaaaggaaaaaaaaattgttatatcaagaagatacctgcattcatatgtttattgcaatactattcataatagcaaagatatggaatcaacctaactgttcatctacagatgattggataaagaaaatgtggtatacatatgtacaatggaatactattcagtcatagaaaagaatgaaattgtgtcttttgcaactacatggatggaactgg

SEQ ID NO: 5962 - DNA, 1035 bp, Homo sapiens
tgtgctctgggctatggaggatatagacatgaataagaagtttttctgtcctcacacagtttaatgaagaacaaggttaacagaaatcattccatagcaaacgcagaaagtacttagaaggaggaatgtgtcctggctggtgagattcaggaagagttcatggaaggataagtaaaaattcacattcaatagtgtggcctcttatacttggctgacttttcactatacccatatttttatttttttatttttttgctactatgtaactatttcctgtttagccttcagtgtttattttctgtatactttttttctcatgccagtcacttagacatatggccaatgttactgagtgccttctatgggtgctttcagctagttgtaaggatacaacattgaacaaatgagacaaggtgcccccattatggaccttgccctctaggtgggtaggcagttcttaatattaaaaggtcacccaaatgaatgcaaagttgcacattttggttggtgctgggaaagacaggtgcaaactgctatgctagtagggtgatcaggtttcattctggagtcacaaatggcttccctgaggtataggtgttaggttaggttgagtcaagaaggctgtttccagcctgtgcagatctcggaacagaagaagcagagtatgcatctgaggaaaggtcactatgggtgcagaaaaagggaatgaggagtgtgtacagcacttttcacacagtaagcatttctcagggtcaggttcaaaaggcacctcctccatgaagcctttcttaaaatacttgaacactaaaaagatcctccctctttttagctcttaaccattgtgtatctctcatgagggtgtttattacatactgccttggtttgtgattatttatgtgcaagtttgattgtctgtgctcaactgtaagcttctagaaaccataatttgtctcatatccatctttgtatccttcagtgtcatgagttcttaaaaaatatttgctgaataaggtcacttcctcagtatgcctgctg

SEQ ID NO: 5963 - DNA, 1027 bp, Homo sapiens
ggcttgttctgatttccatgtcattagacaaggagaagatgatcatcttcccgtagctaaacacttggattccatcagaggttcttctgaaaagtaaacatactatggaaaggagggcctgggggaagcaccacacctgtaggccttctttctgttatttttttttcgtgggggatggtgtttcactcttgttacccaggttggagtgcaatggcatgatcttggctcaccgcaacctctgcctcccgggttcaagtgattctcctgcctcagcctccctggtagctgggattacaggcatgtgccaccacacccggctaattttgtatttttagttagagatgggttttctccatgttggtcaggttggtctcgaactcctgacctcaggtgatctgcccgcctcggcctccaaaagtgctgggattacaggtgtgaaccactgctcccagcccttcctgatatcttctaagtctctttgcaacaacctgagtggacccattctcctgtgctcaggacctagctctaggtattcccttatctttcttagaatatggtcattcactggcatctatgatggaacagaaaaatagctggaaaatgaaaactacaaaactctcactcaacattattttacaatagtgtaggagttaatagttgtggcagaactgcatcttctaaggaaaactgcgctatgacaaacagccccagagtgagaggcagtcaactcactgtcagggtgacccataagtcctaatgggtgggaatgatcattatatgaagactataaatctgattaatgtgcactctgagatgaggtataacatttcatgccaaatgaggtaggggtaggtgagaaaggatgatagaaacagctggttctgcacatgtctgaaggaccatagtaaaattacagtgacatagagagataagtaaacaaacatagggaatgttcagatggatatatgtgtgtgtgtgtgtgtgtatttcagtgtttatataaacatatacctaaacttatttatag

SEQ ID NO: 5964 - DNA, 1051 bp, Homo sapiens
ttacttatgtgtcctcagccttttgttcagagactgtggcatggtaggcattcagtagatatctgcttgatgtgtgaaaatatggaaatttatgtttcttagcctggcagtcaaggtcctcttccagtctcactttctaaagataaaatgtcataaggatttggtaagcttttacttttctagggatgtaaaatgaggatgataaatgtgcctacttcaatgggttatcatgaagattaaataaaatggtacatgtaaaacattcagcatggtgtcaaattgttgacaaggactcaaatggtattgactagtatcattatatgacacatttttcaatatagataggtttttaagattatgtaagaataaataagtataagtatatggtaaagactttcagtgctgtggaaatactgaagaggatcacataaaggggtggagtcgggtaaggagtcaacactgtcaggcatctgaatgcagagtagggaaagcagagggaaattccaaggacaagaaatcaagacaccagatcagggggatttaaagattactttcattgaaagaatttttttcataaaaatctttaacagaggaggaaagctagagtatattatgtttaaataagctgaaattcttgagtattttgtgaaagttcttctctgtgctcagtttgacatattttaaattagaggctatcttgataaattgcttagaatctgagcttaaatttcttcccttcattttgttgacagaagtcctacattgctgatttgctttcattttgtcttaagtcgggacatttcccatgacagttaaataatttctgtaataacacttcatgcataactgctggctaactatagcattatccttgccatttctttttataagcatataccatgaaaatttgtgacaattttgttaaaatatacagtctcaaattggtttcttacacattcctgtgaattctgaattctcttctttgaaagcttcctagatagctcagcattcactgggttctccacttactcccttgaaggagattttgagt

SEQ ID NO: 5965 - DNA, 1091 bp, Homo sapiens
agtgacagctgtgcttttctacgttactaaaagaaggtttggcatcaatgtttaaaaaaatataaaaaagtgcatctctcatcctgagagtcaacttgagcaaatgcaatcagtcagtctttctctaacccttgtgtaaatctggaatgtgtttctttctgcagtttgacatgagacccgtctctagattgtaaaaatcaaacaaaactgtctgaccctgaaattgattctgcagcctttccaagtccaaggacttgcttccctgggcaattgtgaggctctcgttttagtgcctcagagaagcagagaaaatacagatacagacagaacgagataatagtaatagcaatagaatcaataactacactttcactagcatacgttctagcattttctgaggcctatgtgccaagaagtgtgctgtcttagatatccatcatctgatttaatagaatatagtattttaaaaattggatctcctgaggttttacagaaagacccttatttagatgagctcttttaaaaactaaggtcaatcaaattagatacagcactactagcttgcattgtcaaccacattaaatgtaattttcttaaaggatacctttctaccctcaaaagctcatgcacactaaggttgacttttctttataatcttcctaactacagaatattattactgttattttaatgttcaatttttaaattatttgaaagcatttattgagcagttacaatatgctgggcactgacctaagtactttatctacattatctcatttaatccctatggaaactaaatagtagacatttatattgtcattatattcatttgttagattcatttacatatggaaaaatagatgctcagtgatgttaacaacaaaatgaagaaaaataagccacttccattttcacaaagacactaattgacagaggtggaactcaaacctgaaaaagtttttgtgagcatactattagcgaataaaatattgctacgatatgatatatttatgcatagcacagtaatttgtttcctcaaaaattatatgaaataattacctttttatctcttcatcgtggaaaaatta

SEQ ID NO: 5966 - DNA, 1072 bp, Homo sapiens
tcccacgtgtgaaaggaaacatgtgatgtttgtctttctgtgctgtgcttatttcacttaacacagtgacctccagttccatctacattgctgcaaacgacaagattttatcctttgttatagcccattaaggttccattgtgggccgggcgcggtggctcacgccaggccgaggcaggcagattatcaggtcaggagatcaagaccatcctgtctaacacgatgaaaccccgtctctactaaaaatacaaaaaaaaaaaaaaaaaaaaatagccgggcgtggtggcgggcgcctgtaatcccagctactcgggaggctgaggcaggacaatggcgtgaacctgggaggcggagcttgcagtgagccgagatcgcgccactgcactccagcctgggcgactgagcgagactccgtctcaaaaaaaaagattccattgtgtatatatctaacattttctttatgcatgtgtccactgatagacacttatgttgcttccatatcttgactattgtgaataatgctgcagtaaacatgggagtgcagatatcacgttcatgtactgatttcctttcagcagtgagatagccagatcatgtagtagttctctttttaggcttttgaggaatcgccataatgttttctgtaatagctgtactaatttacactcccaccaacagcataaaagagaacccctttctttacatcctctccagtacttgttatcctttctctttttatagccattcgaactagggtgagatgatatctgtttgtggttttaatttgcatttccctaataattagtgattttgagcattttttgaaatacacctgtttgccatttgtagctcttttttccagaaatatctattcaggtcttttacccacttttaaatttgatgataatgatttttttgaagtgattgaattgtttgagtttgttttgttttgttttgagacagagtctcgctctgtcacccaggctggagtacaatggtgtgatctcagctcactgcaacctctgcctcctgggttcaagcaatctttgtatttttagtagagacgcagttt

SEQ ID NO: 5967 - DNA, 1087 bp, Homo sapiens
gttagccagtcctggtggtgtgcagttgtaatcccagctactcgggagcctgagataggaggattgcttgaactcgggaggcagaggtctcagtgagccaggatcgcaccactgtactccagtctgggctacagagtgagactcaatctcaaaaaaaaaaaaaaaagtaaactaaaacaagatagcaaaaaatgtgtttctcttttcttttttaaaaatgtttttaaaaaattaaagaattaacagataaaattgcacgtacagacatgtgtcacttaaggtcagagatatgttcaaagaaatgcattgttaggtaattttattgtgcagacatcatagagtatatttacaaaagcctggatgctataacctactacacacctaaggtatgcaatacagcctattgctttgaggctacaaacctgtacagtgtgttactctactgaatattttaggccattttaacacaatgataagtatctgagtatataaatatgtctaaacatagaaagacacagtagaaacacagtattacaatctaattgagatcaccatcatatatatgattcatcactgaccgaaatatcattatgtggcacatgactgtatttaccatgcaaaaaatgatagtttgaagtatatatacattgtggaatgactaagtctagctaattaccatatgcattaccacaggtagttaccatttttgtggtgagaacactttatatctattagcatttttcaagaacacgggaatattattaaccatagtcatgaggttatacaatagatttcttgaccttattcctcctacattactgaaattttgtatccttcgaccaatatcttctcaaccgcttccaaaatccctccccactccagcccctggtagccaccattctactttttacttttgtgagataagttttttagattctacatataagtgagatcatgcaataaatttctttctgtgcctggcttatttcacttaacgtgatgtcttgtaggttcatccatgttgtctcaagtgacaagatttccttctttttagaaggttgaatagtattccattgtacatgtttgt

SEQ ID NO: 5968 - DNA, 1037 bp, Homo sapiens
agaaatgcaaatcaaaaccacgatgagataccgtctcatgctggtcagaacaatgattattaaaaagtcaagaaacaacagatgctggtgaggttgcggagaaataggaatgcttttacactgttggtgggaatgtagattagttcaaccatttggaggagggtgtggggattcctcaaaaatctagaaccagaaatagcatttgacccagcaatcccattgctggatataagcccaaaggaatataaatcattctattacaaagctacatgcatgtatatgttcattgcagaactattcacaatagcaaagacatggaatcaactcaaatacccatcaaagatagactggataaagaaaatgtggcacatatacaccatagaatactatgcagccatatggagctagcagccattatcctcagcaaactaatgcaggaacagaaacccaaacactgcatgctcttacttgtaagtgggagctgaacaatgagaacacatggacacaaggaggggaacaacacacactggggcctgttgggcagttgggtaaggggagggagagcattaggaaaaataactaatgcattctggccatacctaggtgatgggttgatgaaaatgaaatatgtttgccttaatacctaggtgatgggttgataggtgcagcaaatcaccatggcacacatttacctacgtaacaaacctgcacatcctgcacatgtaccctggaacttaaaataaaaaattaaaattaaagaaaaataagggtttctaggctaggggttagccacactgaaacagtctggtaggagggaggaagtggaaatggagccacatagctagttatgagatagatgccctataaatacatggaccaggggccatggaacttgtgtcagaattctcaatgggaagcatctccctggattgtgtaaaatgagatgcttacatgcagcgctgccattaactgggtagtcaaggatattggttcttttattctaaagtagttatcattagtcttaattgaacttcatc

SEQ ID NO: 5969 - DNA, 1053 bp, Homo sapiens
ttgataatttggttttattacagttttttactttttaaaaaaactctgtaaatatttttgctgcttaatctctggtcatctctgattatttcctacagataaattcctagaagacttgctgagacaagatgttatcacatttttaaggcttttatctttcaaaaagatttcaccaacttatacttccatcagtagtatgatgaactgctttatttactttcagatggaataaaagcctctgctagtggatctcagctttataaccattttataggagaatcagtcttaggatgattatccattgactttttgaaatagttgccactttgttgtgtctacttttgtagcattagccttcatttcattatgtcaggttaaagacatttttatgtattaagaaattctaaagaaaagaaacctatcgctctgatattttccattgatagcttgaactgctattctaacatgtttataactctaaaccatttgttttttaagaggttctttctaagaatatattgtacttaactgatggacaaggttttgactttgccaaactcatttctaatcatttaatccttttaaatcatcttcctcttatcagtttaatctatgttaagattgtatttttattcacagtttgcatgtctacaagtttccaaatgtttacttcatttcaaagtacttgctactataataatgcatgttaaacatagatgaatatgcaaagacttaaagccatttggatttagaattgcaaagtctcttttaggtcatgagccaggcataatgccctactaagagaagaaattactgcatcaaatcactcctaagccaaaccaatacatatctcatcatttcatgaaagctatctagcttcagagaacacctaacttaatgcattcagttgtctggaaaaacagccgaggagtttttctttgagaaaagttcagtgcctgataatcaatagaaaaccatagacaatatctgaagtctcaaaagcatatgtctggaatgtcgtgaataagacaatctaatggggcagatggggta

SEQ ID NO: 5970 - DNA, 1082 bp, Homo sapiens
tggaagtattatagaatactacctcatgatacctaatcttcctctgttttatttgtggggctctcttaaattgaataaagactttgtggctctcttgtgtaaaccgcttcactcaaaccttactcagtaacaaatttattttacagacatagaatgggcttcaaagctcagtacaatcagtagcttgatgatgttgccgaggacctgggatgcttccctctcacctcgtggcctcagcatcctgagtctggttattttcgtggccacagatgaatgccaatagccactgcggccacatgcttccctgttcatgaaaaaaactggtttttttttctaccaccaagacaatttagaatacttgcacacccctggatcaataagagtcactagaagaatgccaacacactgattacctgaggctaatgagttatatgcccttggagttggggttaagcacctcgccctggatcatgttgaagaagagtgaatattgaagaagagtgaatatctgaatacaattagcattcttttaacgacggaaaagcttagaagatggaaggcattaggtatcaatagactatgtacaatattctttctaacgaagaatggatacttcagttcctcagttcctggaactcttgatacttttatataacttgatcttatgaatgaattgcttggtaggaagatggttgttggaataccagccagacagtagtccccctaaaaactggtaatgccatttttagtgaaaatgtgatagtttctcgttggttttcaaataaacttttttggtccttttatggatagtcagatgaacttgtttacccatgtctctgggtctaaaatgaaaataagattaacagaaggctttacaatcatcgttcttcttgaaatcggtaaacattctcttctgggattctcagtggtgtaacaggccagatttagcaccggttatcagaacataaaagtcaacaaaggctgggcgcggtggctcacacctgtaatcccagcactttgggaggccgaggcaggcggaacacgaggtcaggagatcgagaccatcctggctaacacggtga

SEQ ID NO: 5971 - DNA, 1317 bp, Homo sapiens
agcatagaatatttttccatttgtttgtgtcctctcttatttccttgagcagtggttctatatgccagcagtgaacaatctgaaaaggaaattttaaaagtattctcagttataatagccacaagtaaaattaagtacctaggaattaacaaacaaagaagtgaaagatctctacagtgaaaactataaaacactgaagaaggaaattgaagaggacacacaccaaaaaaatggaaagatattccatgttcctgatttggaggaataaatatcattaaaatgtctatactacccaaaccaaatactactcaaagcaatctacagattcaatgcaatccctatgaaaatactaatgccgtccttcatagaaatagaaaaaaaatcctaaaatttgcatgaaatcagaaatacccagaagagtcaaagttatattgagcaaaaataacaaaactggaggaatcatattacctgacttcaaattatattacacagctacagtaactaacacatcatggtactggcaaaacaaacaaacaaaacaaacaacaacaacaacaaaataaaacagacacaaagaccaacggaacagatagagaacccagaaacaaatccacacatctacagtgaactaattctcaataaaggtgccaagaacattcattggggaaaagacagtctttcaataaatggtgcggggaaaactggatgttcatatgcagaagaatgatgcttaatccctctctctcatcttatacaaaaataaaatcaaaatagattaacaatttaaagctaaaacctcaaactgtgaaactaccacaagaaaacactggggaaactctctaggacattgatctgggcaaaacatttcttgagtaataccacacaaacacaggcaaccaaagcaaaaaatgaataaatgggatcacatcaagttaaaaagcttctgcacagcaaaagaaacaattaacaaagtcaggatacaacccatagaatgggagaaaatattttcaaactctccgtctgacaagggattaataacgagaatatagaatgagctcaaacaactctacaggaaaaaagtataagaatgtgatttaaaaatgggcaaaagatctgaatagacatttgtcaaaagaagacatacaaaatggcaaacaggcatatgaaaaagtgatcaacatcactgatcatcagagaaatacaaacgctacaatgagatatcatctcacctcagttaaaatggcttttatccaaaagtcaggcaataacaaatgctggcgaggatgtggagaaaagagaaccctcatacactgttgg

SEQ ID NO: 5972 - DNA, 1050 bp, Homo sapiens
aaaagtagattgagtaaaaaaaatttttggagactctgtattgataagcatgcccccttcagactggctgcccagtatattacactgcttttacaactttcttttcatctctcacggaatctacctatgtatatactttgatattgcgaggagaagattgtgaatatcagctgattcatttctttgccgaactaaatcaaatatagagagaaggaaaaatgcaagtatgtggatgtaaaaaggaacaagaagggggaagtgaaataggtaaaattaaatagaggtgtcaaataataccaggaagcctcccaggggacttagtgacttcagtttatgtattatcttgttattggttaactacggctgctgtttattaattcagatcatcattagagacacgtattgttgtcctactgctagacagcttaaggtgatggtggtaggagtcgtgagtcttttcaccatgactctgccaccctgcactactttaagaaaagtcaaagcatgtgaaccctgtggtacccattagtcagtccatgtggagctctctgcccttctctgccctgaccacgtcaacgtaaggttttttgcatgcacaaaggcaaagtacttttaattgaaaagtttcttatttctttagagtgagaatgtgcatactaaataataatcaaaataagtcaaatagctttgttctgtacaaatggaaatttgagaagaagacctcttagaaaatgctaaaccaaaaaaggtgcatttgatttgaataatgacagagaaacactgacctctcttttcctgggctgaactaaaaactggcaggacatgctcagccttcttagcacaagaattagattaaagtcactgcagttttttattagatggctaaggggaaaatatcatccacgctaaatctcactcttagctggtttctctatattttagtccatttacttgaaactggatcttcactctatccactctatggttagctttttgtaagtgaccattcatttagcctgtctgctgtcttaggatgggctcttcagcagt

SEQ ID NO: 5973 - DNA, 1009 bp, Homo sapiens
attggatggggaattttaaattcattaatttatcatttaagaaaaccagtgagggattacccatttgttttactaggtttttcctctctttgagcagtttcatttagaaactaagactcttttttttccatgttgtcagaagagctaaaaagaaagtattttcagctccacggatttcaacagggaggcttttaacagttatgctgcacgtatccaattagcttgtgaaatcttatctcttctaccagtaaaaagggctcaaaaagaaaacattgaaattccaaaaagagcaagagagtgtttttggcaacagggtaactcaactgaaagagagcttactagttaaaaatggtaatttgggcattttgttttcctttaaagaggtgtgtcgatatgcagaagtaggaaccaaatgtgcgtatgtacaaatgctgctgagggaacatctcttatgatgcccagggctggaatttactccttttttcttttttcacacttaacaactagctccataaaaggaattagacaagagtctttctagtgatagatactatgttttccttcttgttgcgtctgtcccccttatttttatacctttcatcctttttaaagtcctttgatttgctaatttctctattccatctaaagcaagcaaagactgcttatttttggagtagaagaacttcaaagtctctaccaattttgagatgtaaattgctcttctgtgacctaatatatgattaatacagcacaactactaacacagtgttttttggtccagtagtaaattggtattctcttaatcagaaaatgtattccctacgtaataaaatagatcttttctgttgacattcagagcactcaaagatccagtccttaatttacattgcttattacacctcagcttgacccctctgcccagccaaaccagtctacaaactgttttacagggcttccctctcctttctgattatagtgttttgctgattttatttccttttgtagaaat

SEQ ID NO: 5974 - DNA, 1033 bp, Homo sapiens
gaaaaaaatcttagaaatgagatagtctctatgattctaaaagtgagattatatacctggagatttcgaagcccaaggctcgtgtttcttcagctgaaaatcactgccgtaatgcacaataaatgcctgccaataggaggcgctcataatcttttttttcattagaagcgactgtttctgaatggagtgtcttattctgttgggcttctataagaagaataccatagactaggtggcttataaacaatagaaattcatttttcacagttgaggagacttggaagtccaagatcaaggcattgacagattcagtgtctggtgaaggcccacttccttgttcataggtggcgccttgtcactgtgtcctcatatggcaggaggggtgagggaggtctctggggcctctgttataccatctcactgggaagtaggtttcaacatatgaatttggaggagaaacaaacactcagcctatagtagggagtatctcatctctttcatgtctggaaggtaaacaaaggttgaacaccatcaatttagaagatcttcatctgacagaggggctgtagggtgtagaagagttagtaattccccaaggctgtacagcttcttggttgcacagcaagaactggaatccaggtctcttggttggcagtccagtgctgtttgcttagcatcacactatccaattaatagctcctctccatcctttgactggccttacaactctcaccacctttattaaatagagggatttccaagtcagtttttgcaagaagctttaggaccatgtgtcccctatgcaccttatgctctacgacatcatctctgagagaaaaagaacgcccatgaaaaatatccatctacactaaagacatttatgtataccaaaatgtggaagcccagctaaaatgggatagcctgaataacaatcaaatatgagtttattgtttacttttttctttcttgtactaactctagcaagccagctcaagccactcagttttggagtgattgctgccttctggtgttt

SEQ ID NO: 5975 - DNA, 1041 bp, Homo sapiens
ttcttttgcttatattttgtttaggattttttaacttatgttcgtgacagagagtttactgatgttttctttttcttgtaatgtctctgacaggtttaaggatcagggttattttagcatcttaaaatatggctctaaaggctaccattatgtctatccatccatccatcgattcactaatcacacaaatattttttgagaggcaatatagcatagtggtttaaaatagagattctagacttcctacatttgaataaaaaaacttactgtaactatatgttatctatttctgtataacaaattttcacaaacttagcaacatgaagcaacacaaagttattatttcacagtttctgtggatccagaatctggaaatcaagaatctgagccctctgcttctgggtctctcagaaaactgcaagtaaggcatcagccagggatagagtctcacctaaggtttgataaggaggtgctatgattcaaatgtgtcctctccaaaattcaggtgtttcttttttaaaaaataaaattagttccagggtacatgtgcgggatgtgcaggtttgttacatagataaacgtgtgccatggtggtttgctgcaccaatcagcctgttacctagatattacgcctggcatgccttagctatatttcccgatgctctccgccaccccctaccctcccctgacagtccctagtatgtgttgttcccttaatcaacccaaatgcccatcaatgatagactggatttttaaaaatgtggtacatacacaccacagaatactatgcagccataaaaagaaacaagatcatgtcctttgcaggaacatggatgaagctggaggccattatcatcagcaaactaacgcaggtgtttcttttctttcttttttttctttatccatgctgtctcttttcgttttttaaaaaattatactttggctgggcatggtggctcacgcctgtaatcccagcactttgggaggccgaggcaggtgtatcatgaggtcaggagttcaagaccagcctggctaacatgg

SEQ ID NO: 5976 - DNA, 1033 bp, Homo sapiens
catgtatgcaaaacactactctgtagaaattgttgcagaaaatttgcaaaccgacaagaggttatgctcaacagagacagtaaaaagttaatctagaatcttggattaagctgagtgatgccttgggtatttatccaaatttgggttgagttaaatccagctgcagcaaatgctactacaacaatggaccaataaaagcagttgaaaaccccttttcttttctaaactattcataattcaattaattaaacatgaaatcatcccaaagcttaatttgtttttccttctagcttacattttttacagtttatacatagttccaatcacaatacagttgtgtctctttctcttttctcagtgtttcattagagaaatatattgttaccaataattattagggattcatttttaatgattaaatctttcaccatattggtatatcaaaaatacttggtcttattctcctgagcagtttggttatttttatcttgtttgctattgaaaaaaattggatgctgttaacacttctgagataatacctttttttgtattttaaattagttttagaataaattctcaagggtgggttacttttccaaaggacattaacattttatgaagcccatttatttcaagtcacatttactagggttttgtttgttttcttgtttttctttgttgttgttttttgtttgtttgtttttgagagagttttgctcttgtagcccaggctggagtgcaagggtgcgatctcggctcactgcaacctccacctcctgcgttcaagtgattctcctgcctcagcctcccgagtagctgggattacaggcacctgccacaacgctcagctaattttgtattttttttagtggagaaaaggtttcaccatgttggccagactgtttttgaactcctgacctcaggtgatccgtctgcctgggactcccaaactgctgggagtacagtcgtgagccactgcgcctggccagtccatttttaatggtaacagaaatatcaccatcaattggtgata

SEQ ID NO: 5977 - DNA, 1026 bp, Homo sapiens
aggtatttgataatatttatcagtgtttgattcttcaaggaggggcctagctgccatggctaatgcctgtaatctccgcactttagtagactgaagtgggtggatcgcttgaggccaggagtttgagatcagcctgggtttcatagtgagaccgtatctctatcaaaaaagaaaagaaaagaaaaggtgtaattaactgggcgtggtgacatgtgcctgtagttgtagccactcaggagactgaggcaggaggattacttgagaccaggcatttgaggttacggtgatcgcataactacattccagcttgggcaacagagtaaaaaactgtcactgaaaaaaaaaaagagagagaaagggatacaagttgtattggatcatttctattaatttagtacccaagtaagtaaaactaaaagaagttccttcaagagtattaaaacatgttgccctggacaatgaaaagcagttttccttagaagaaactcgttagatctttcagtgatggttagcgctgtggaccactgagtctaaccacagggagttgaatccaggcttgaccacagtctggcttttctgagttaccttcaccaaggagctccaggatgctcagctgaaaaacgggaaagtaacattcacgtggagatgttgtcagagtgaaatcgataatctgtataattctttttgcaaattatagtattttcacaagtgtggctaacaataacattttgaactgttagaagtagtttgattccagagggtatgtagtagggcgggtactggggtgaactgagtgaaacaccttgggtggaaaatttaagggggtgccaaagactcaatattcaagataaataatattttaatgcaatattttaaaaatcactacaaaataagtccatgaaaagaaaatatcaatattttaattacaggcaggatctgactctgcctcattcgcctagtttcaataaagcttattttacgaaagcaggcagccagcccatgaatcggagttgctgttttgatttt

SEQ ID NO: 5978 - DNA, 1045 bp, Homo sapiens
aggagcttgaactacaggtgtgcaccaccacgcttggctaattatttgaatttttagtagagatgaggtttcaccatgttggccaggctggtctcaaactcctgacctcaagtgatcagcctacctcggcctcccaaagtgctgggattacaggcctgagccacggcaagtggcctacaagttaattttgaatgctagataattaaatttgacagggtttaatcaactcgtttaatggtatgataaggaatgtttaggtaaggacaggaaacttacagaatgaagttacaggaagttaaaagaaaagttacataatgttaaattcacgtttctacccactgcttttggtatgtgtcaatttgtatgtgcatctgcccgtgtgtgggagaataacggataatggcagggggacgaggtggagagtaacatgaagcagagagaaaggttcctctaagactcagcatcattcctgtctgtatctgatgatgccctgcactttaggtaaagcttagcagtttctcagcaagcttcaagttgtaactttgatctcttttctgtccgtttttgctttagactctgatcaaaattacttatatttttccttcagccagaacagagcaaagcccttcacccatatgctcctcttgaatattttatgactatatttatggcaatgcgtcagtacaaagttgctattggggatcattgtgcttctgaatgaaggacatggatttaaaaccaactagaggattgtggctggaaaacacattgctttggggaggaaaagtaacggcagcactgaaataaaataaaaccatagcatgaggtataatatttagatttgatttagaattaacttattttcccacacttaaacagaaaagtgtctcattatctgatattagtatctatgaataatgtgtaattaaattgacaatatttctcttatctttcatcacattatgaaatactcccatacatggattctaccaggttaaacttaactatgaaatattttttatttaagggaccaagctgattaaag

SEQ ID NO: 5979 - DNA, 1032 bp, Homo sapiens
acaagtctttgttgaagaaacagtatttccacctggctgccatgtgctgcagctatggcactctgtgccttttatttcttgtttgtttgtttgtttgtttgttttagaaacagggtcttgttctgtcacccaggttggagggcagtggcatgattatagctcctggcagctttgaactcctggcctcaagcaattttcccacctcagcctcccaagtatttaatactatgaggcacatgtcaccatgcctagctaattttttaaaaattgttttttgtagagatgttatcttgctatgttggccaggctggtctcaaacacctggcctcaagtgatcctcctgccttggcctcctagagtgctgggattacaagagtgaggcactgtgcctggccccgataccttttagataggtcataatctctccaggtcaaccctgcctggagagacactttccccagttcctcgtttttcttcatggcaacttttcaggctctcagagccctggtaagtagatgaactgaactcgcctttttgttatctatcctccatgtctgtctcctgcacacttgctttggtgccctctccagagcatcatgtcataatgtctcctcttggatgaatgatttgtaatgtattcttcctttaagttcttgactcacacagggcaaagatactgaattgttagtttgagttatgttgcccactcattctaagatccctattgaaacactgatatggaaaaatacttgtgtaggagtcaggagctagcctgtttctgctacttactgctatattgatactgaacaagtcacttaacctctctgaatcttagttttccacatttgtaaaatcatacaatttggagattggaccaaatgtcttttgaagatgcgaagacagcatcagccaccattactcattcacttcacaagctctatttatagagtgtttgcttactctgtgccaggcacccttgagtggagaagagataatgaaaaggcaagttcagttcatctacttaccagggct

SEQ ID NO: 5980 - DNA, 1049 bp, Homo sapiens
aacttgtggcaaattctattaactgaggtaatttaggaatatcactaatcctggcaatctcaaaaagcctcaatgagttaactcttattccctggtcttgtttctcattcttttgccaaagtttagcttcttggaaagttgaattttaatatcatttatggcttcactaaatcttgatgaagccatgaaaaagaagtatagggatttctagaatgatggagggaggggcttggcaagccctccacccaaaaataaatttcaaaaaccctccaaatatttgataaaacaaccatttcattactctggaaattggccataggcatacaaaaatttgagaaacatttattaagaaaaacggctgaaccctgggtaagggcactatgagtctatagcatttttgcctggggcttcttttattatttccaaatacttcactgtggtaagtctaccaggaaagggcatactgtgaaaaccagtactcagttgctaaagaggactggtttggtttggagcagaaagtgaaaaaaacgcatgcccctgtgcattgtcagacacaatagtgatctgggtgacaaaccaacagactagtatgctacagctagcctgacagcatggtcctggttgggacaaacaaaaggacagtagattcaccaaaaattaaacagggagatctagtgaataagacagccattgtgtgcattgagggctcatacatccctatagttcttaaagtctgtacacatgtgcaaatttgcactcacagtcagaagagactacagagctatctatacatcccttgctggacatgagactatgttccagtgcagaaacacaacagggtccagtgtgatttaaactgcctgaactttgttccctaactgacacacagatccattgggaaaagtaagagcttattggctcaacatgtttgagcacaacctctggtcaatcactggttgaccactaggctattctgacacagcaataatcactaagaagccaaattttaaaataaaaataagattttttaaaaactgagcagagacata

SEQ ID NO: 5981 - DNA, 1028 bp, Homo sapiens
aaaaaaaaaccctgcatatttgctcactaaagttcactttttacattttgtgattattgtgaaatagaaagtattcactaatcaatcacttaaagttggagcaccttgtctaaaatcaaacttttcctggaagttccagtttttgaaacaattcttatttaagtgctgtatctttgtcaattctaaaacattaaatatttttaatactaacttactcaaaattttggttttaatttttttaaagcaaatcaaattctatttagaatttgtctaatttaatcatttagctaatttatgatggcagttctgtttcaaaattagtactataatagttttttagtgactctatcctacctccctcatttgtaatagattcagatatggctacaacataaatgacaatttttcagcatatctctgttcttatacaacaaatgtgactgaatttatcaatgacagttaagatgagtgaagaagagtgtataatctgaagatacatttttaatggatttactcagtatagtcattgtacttataggtggcctagacatgtggattaaaataaatgaggctaatctatgaattttagaaaaaatacattcctttcactaattgaggggagtgaaaaagcatgtcttcatttattgacaaacttctattcaactaaaagcatttactttaatagaaaaagtgtcattggtccacaaccaaaaccaaaaatttctctttatgctgtagcatagccaacctcttagtggcctagaacaagtcattatctctaacagttctgtgggttacctggattcgggtgtttcttgtgtgggatctttcctgtggtttcagtcagatggcaactaggcatagagttacctggatacttagacagaaagcagaagctgccaggccagcaccatttccattgtattctattggtcaaagccgttgtagtgcctgagcagatttaaggatgttgagaagtacctcttgaaggggacattgtttaagagcatgcagcatgagatatattg

SEQ ID NO: 5982 - DNA, 1690 bp, Homo sapiens
taatagcctcaaattttctttattaactgtgatctgaaaatgaccactttgtatctttccaatcacaaacattcccaatggcatggggatggggaaagaatcgcttgttatagttggtttccacagtaccaattaatgttttcagtattgtttgatttttttaatattttatctaaatattttgaaattgtatagtgaaaggagttttgccatccgttttcaaccccacaggggcaagaatgtctcacatgttgtttgaataccccttacttactcagttcccacacctggaagcagatcattatcacgttttcctaaagtgtcactcccgggtgtgatttcacttttactaccctcacagctatagcaatatcaatttgcacttaccctgggccttgcttctgtgcccaaagttcttcaaaataacaaaaatggagaagttgaagttactggaaacttaaaaggaaaaggcgtttcatttacaatgagagggattcagtgacacatgttgaactcagagtacttttgcctgtaaacattaaattgaagccctacttctcttactttgagtttcagctctcagtgcctccagacctttggtcatgtactattcaaatggtctcattcaactaaactccaatgaaacccaataaaaagcacttttcaggaaaacatcttggtgcctggtcaatataatcaccacagaaagttatctacaaagaacgtctatggtgggtgtggtagatattttatgacattacttgggcaaaatatctgactaattatttctccttaaattgttaataacaagtatttaatttttttctttattaaaatacttcattattaatgccaaagagcctaaaaagcctacaagaaatctgacaaattgatgactttaataatgttgggtaaaaaactatttttctgccttggtttgaatctttttaagtttacatacttaaactttcctaggatattagtaaaggggaagttgactaattaagatattttactaagtgtcatagatgttttaagagcaaagtttaaaggtctggagttttgtgtttatttttgtttttaaaataaatttgagtctatgtagtgaaatgtctttacattcccttgcagctgttttaagcattacattattcaaactgtatcagaaaaatctgctgactgtcgaaaacctaaatgatgaatgagaattaagtaataggagattcaactgaattttttgctgtaaatacttttacatgctataaaaataatgcctatacctaatacatatgatctatatctcattcatccacactatgctttttattggtaaaggaacaaaagacaagaatgccaatttttactgttaatgaaaaggagtcattgatgaagttcttataatagctgcaaacctgggaaatttcttaagatgcctaaaccaagaagtaagcaatcagatacttttttagaaaatatcattgtagagcaccatgaagtattagatttatgataaagacacatccacatgtgaaaatgaagcaacactgtccatcagcacaaacaattgctagaataccattattcctgggttttcatgagcacaagtacccaggtactgtcatgcttgctgtgctatagcaaaagagcagaagagataactgggctaatgagacagtctctgttctgcctt

SEQ ID NO: 5983 - DNA, 1031 bp, Homo sapiens
agttaaacaattaggcccatgttcataactagtgagaaggaggaccataagtctgacactactttgctatattgctctactatcacaagcttttaaattttgcctgcaatgtttcattttgcttttaagcaccagtgtatctgtaagactacttctattggtctgaggactccgctttcacaaaaacttatacagcatgttatggtttcgaaaatttttaaatattagcacttggacccatgttaagtacatctgttgtaaaaagatgaattctgtaacataatgatgagaaggtcataagtttaatgccttagagacatacaatgggcaatcagaacctattgcaggatctactttttgtaatgcattgaaacccttatggatgtttcatgagatgaaacttcatggttcagtgtttgagacattactaagtagctacatttttttacataaaatatgttagttaataaatttcttcaaaggaggaattaggaaaatttaaacagcagctaaagacaatgaatgaagactgggaaaaaattattatgttttgttatataacaaaataaaaggataagctgagtcatgacaagtgtgtttgccttcattttccccttcaatttcctctgactactgaggaaatgtaaccttagcacttcgttggtgaatctgaaaagactgctttgcttatgagatgttctttgttgactaaatttctaagtcatcatgataataatgctttataatttacaaactgtcatcccatgcagtcatcccatgcattatgtaatgtaatcttcaaaatacctcaatctagtagatgaaagaggttgtccctgattttccagttgagaaaatgcaggccaggatcatgaagtgcattagtgtagttcattaacagagtctctgatgcaaatttaggtagcagtaatttaaagcccttgctataagcacctctcctttactccttctgctccctacctctatgtgtggactcctgaataaggctcttaatatgcctactacccata

SEQ ID NO: 5984 - DNA, 1035 bp, Homo sapiens
ctttacctgagccctattagcagtttccgcgtaataaaagcaatcattgtctttactaaaggccatcgactttcttccctgtaatctcaaagagaaatcccacatttatttactttttaaaagacattttatcttatttttaaattttgatctatgtatttatgcattttgggaccgggtcataagactgactaatttttgtatttttggtacagaagggattgcaacatgttgccaaggctggtctcaaactcctaggctcaagcgatccacttgcctcggcctcccaaagtgctgggattatagacataagctgcagcgcctggcccccacatttattgtcattgagcatttttaatgtatactctgtttcaatcaaagttttattgagcacctactatctccaagcccccacgtgagactcaccacttaaggcagacttcctctactagttaaccctagagtgctaagaatgtgccctgtaaacatgttctttaatttgactcaacaaaaaattgctttttaaatctgaattgttatgcctgagtattttttgctttgtacagaaagtcacagtcagctttttccttcttagaaatacttgtgttgctgctgttgttgttctgttaagtacgtccagattctatctggcaatatttcttctttcttttaaagatagagataattagcactgattagcaaagagatatatgtactaataatcttaactaggtagttgcaaaatccaaaacattgaatactagggaaatttgagcttcaggctgttccaggttgttaaggaatagggccagaagtttttttcaacaaatagaaaatctaatacaagccttttgctcaacattttaaatgaagttgagtttcttaatactgaggtaccttttgggccatattagtaaatgccaattaccttttatttttattttttaataaagagtatgcagtgtcctggttatcctctttacattcttggttaactgtagttacattgataagtatctgaatcaattcctttgg

SEQ ID NO: 5985 - DNA, 1051 bp, Homo sapiens
tgctggtgatggtttcacaattgtatacttactccaaagtcatcaagttgcatgtattagatatatacaacttttagtatgtcagtcttaccttaataaagtggcttttaaaatacactaaactttgccaaaggtttgattggagtgtggcatttccattctttctggcttttgaatggctacatgtgaatagccctccacctattttgagtaatctcaaaatcaaaatagctttttggaggaaaatcttccattccgtactatttgagtttctcatttaaggactggcaaagctttaacttttcaagcgactgctgagtaagaaaatattgagctttcttagtatactttaccatcattaacaatttagggttcattggcttgaaataatattttgcttatctcacaaaaggattttaccttctaaatcatttaactcaattcaccagtgcttgctatattgtcactctgtaattcctaatttctacagtgcggtagttattttttctgaaggatattgtccttcaagaggtgatctgttgtcaaattccaattaatattcagattgccacaggcttttttctctctctttcacatttgttaaagggcatcactagatcttgagagggtattaaagagcatttgctagatgtaaagagtgcatacaccaataacttgacttagtaggttgaaaggggaaaaagcaaagtgtagagttaaaagtacgtaaaccttataaatactgccaagccagtaacacctgttcaagacattaaaagaaaatcttataatattgagaatgtaaacccttaaagcttagaagttttaagcttctgcatcttgcaattaagaaaataagaatacatgtttaaaatatgaatattaatctgacatatttctgctagaggagattatattaataatttaccaggatattttgagttagtatttttttgagtgggtactcttggtatttaacatttactaatatataagcatcttgaaaaccagaattgtatttacaagtatgaactctatagtcaaataaata

SEQ ID NO: 5986 - DNA, 1609 bp, Homo sapiens
acccctcttcctatcttttggccccacttttagggatggccactggaaacttttctttgaagaacacttaaaatgtaagtgttcctcccatacaagtgatcagtttcatttctaaacaagatgaaacagttgtttaggtatttgtctctggtatccagacacaattatatcagagtatttcctctggtcttgaatcagaattccctttacagctctgactgatttgaacaaagttacatgtatagcagagaggattttctttatggtgtaagcaataattttattatttttctgactaaaataaaaacaaataggaaattatttaccaattcttctggtgattccacatttgtggttcttgcatttataggtaaacacttatttattacatttactaatatgtatttagcacgtactataatgcagcaacataagtgaaaattatctcatgcatactttaaatatgtaataccagattaggatgatgatgaaacaggattcaagaatcactgtgttctcaacatctattgaactctcttatgcatcagtctctttgttcagtactttacatgcattattacttaatcctcaaagctcatactagtgttttttatttcaataaagatttgagattatagaggttaactagcctgtcactcctaataaggagctgagactatttgagcttcagaacagtgtgacaagaaagcaaagagaaatactgtccgtttttcatagatcgttctgaaaaagaacttcaagaccatgttaatacaggtgcagagagatatgagctctcacatattcttggtgtgaatataaggtgatatagtttttcaggaaagcaaccgggctatatctatctagatggaagcataaaagtgtccatattgtttgatttagaaacctcatttctgggatttctaggaaactagtttatggaaataatttgagatgcatcaaagaaacatgtattctgatgtttttcagaaacacttgaaatggaagaaagggtttggatagaaaggaacaccccaatatgaaaagtgaggccctacatcagtggcatcatgggactccttctaggtgatttcatagaactaggttctcacttttcatgttggcgtgcttctgcctatccaaacccttgagatccaggaagactttgatatgtataatagggtcattaagtcaaggataaatctgatgaatctccttgaatcatcaacttaagttgatgatttggagtgaggttgattttatattacacatagatgttgtattagtagaattaggaagtatataaatgttatgacaaagtgatggacttcaaaaaactttccaaccactttgagatacactactgtcagacctcctaaaggaattttctctcctttgctattaagcatggcagatacctcagatggaaaatttgacaggtgtgaatttaaatgaataaatgttgttattaataaaacaataacatttccaagaattaaaaagtagagttataaaaataatacctacggaagccacagagtcatcaaacccatttgacagatgaaggagctgagagctagggaaagtcagtgacttattcaaggcgtta

SEQ ID NO: 5987 - DNA, 1048 bp, Homo sapiens
ttaaagtaagtcatcactattatcataataatgtgtgacaaaacaattatactgcatatgatgacattttttccatttctattgccagaaaatattttttagctattgactgatttttttagatgttgactaaacagacacaacatactataacttaatctgctgctctgctttgagagaataaatgagtcaagattcttcgcttggattgatagtggttccactggcaattgtaggaaatgcaatggaattttagtgaaggaaaaaattgaaattgtttgtcagcatgtcaagtttcagctgctccacacgattcaaaattggagctttgaccctgcctaagaccatgatgaacagtcatttcttatttgtgccctgttttacctactagaattcaaattctattagagaatatatcatcatttgctcattaaatagttaaatgaatggtccattgtgagaaaactgaggattccttccaagagtttgaaataaacctctggagagctaattcagaattacagggactatagatttcaggttcttaggcatgggcaagcaactttgaatcagataggaatggacaccagttcatactgtagctattttttctacttaaaattgtcttacctgtgcttatatattgattgattttttaatttattatttgttattctctttttagagttggggtcttgctctgtctcccaggttggagtgcactggcagaatcatagctcactgcacccttgaactgggctcaagagatccttccaccccactctctcagttcactgggattacagacctgaggcacagcactcagctctatagctttgatttagtcttagagaaacacagaaaaactagagtgatttcaaatccattgttctattttctcttgaaaggacacatttttctgcacagtgtattctaaatagttgatgatgcaaaagaaaaagaaaaaggagctcattttaaaaaatgggtaactattgccagtatctgttaactactggtaaaattgtctttcaacagagaaaactga

SEQ ID NO: 5988 - DNA, 1672 bp, Homo sapiens
gtagataacatttaatgccctttacttcaaagggtatgacttcttttcccaaggtgctcactgagtcattgttgatcagaaacgcctcagtgttcagaccattactgatggccatcttcatccaaatggtctattttctcaggcctttgttttctgtaagtgtcataattagtaataatgctcatattgataaataatatttttgagtgctgtgtgttttgggttagtaaaaccctgttaaattctcactggttcccagttctggaatcactttgaagctatattctgagttgtcttgtcataacaaattaacagatgtaatctaatcattctacgcaccttctaaaagtaagaatttttgaaatgaaatgtaacttaatatttccttcattctaaactgattcctgtttattttagcaaaatgacttcaataagttaaatgggcctgtcgtcgtttatcagaatgagccatttgcttgtatttgaaaacatgtacttacggaaagatcatttgaatgagagctctgagttttagacccacatacagtactagctagttgtgataactacattaagtcaattcacctttctgaactttagtttcattattgggataaaataaagggttttctttgatcatcagttttcttaaatttacaactaattcttaccttacaactttagttgacttaacatagttatctttcctctttagattttctttcttaacagtccttggacacccaatacttttcccgtgaatcatccatccaatcatttgataaacactaattgagcacctattatgtttcaagcactgcatgagatgctaaggtcacaacagtggaaaaaaataagtggcccttctgcagcttgtagtctagtgggagaaaaaaagattaatgaaaaaaatcagactatttaatgtgaaattacaaatgtgatgcatgctgcaattagagaagagtgtggtcgcatgataatgaatacagagaaattttcaaaaaagaaaggtaattgctaaggcaagtgttaaccagtgatgtgtctgatggatgtgtctgtgttgatatttctgacaaagagcaaataggagcaaggtgtgcaaatagattagagatcaggtaggagtcttgtaaagtatcagttttatgatcctgtctattctctgcagaaatgttgatttagtgtttgggacaaaatctaactctcacgggacttataatttagaggagcaatctaattaacccaaatttggttatccatggctttctgtgagctctttcaattacatttagaagaatagtatgggaggaaaatccacaaattctaggcatggttccatctggatgtgtttgtgtgtagagattatttctggtgccatattagtatctactaatatgtattagtatgtatggctacctgtccttatctctcaagtctgattctgttcagcataggtaagcctttttctgaacctcaaggagtgctttaagcagtgggacgctaggagtttcttgttcatgggttagtgctaatcagtttaacaaatatttggagaacctattcggtgtcaagcactgtgctggcaataaaggctatgtagatgattaaggatatgtgaagttcataatttagtaacttcctaatttaataagctcaaagtctaatt

SEQ ID NO: 5989 - DNA, 1052 bp, Homo sapiens
ggtgtctataatccctgagtaaataacatacataagtgaagcaagttttttgtccctggaagttttggttgaatgagtaaatctcttaagtgggtgaggaagtgcactaaatccgaatgtactgaggttgacttgggtctccgttctctgaatactcttcttctgcattacagcagtagatggttctcttacctaatactctttcttcatgtttttttcctaaccttctttagctatcatttcttaaatctatttacccttactctgtcagaaaaaaaaaaaagccagcacatatacacaaggaaaacatcttcttgcccccagtagagtagacctgacctgtcttagaggaaactagtcatgactctgttctgtcaagctctgacctaagaggtaaagtgagaagaatgttaatttataatattgaaacaacagttttgcatactttttcaggtaaggaggctttggttcctgtaagtcaaaccaaagagacataacttaagaacactctatgagattcctctgggagttgggacaagagctctgagtacatgcagaaggggtcagtgctgtggtcaaagatacttggccttctagaagaggcagctgtgcaactctatgagtgtagaagagaactacaggtatagccaatacttggcattaccataggatgtgtcaggattaactagaaggcactctcaaagccttccagtaaaataaccaaaacatcaggagaaaataagcgtaagaaagatgttgatgagaggcactcagaaaagggaaagatattttgcacattataattgagttttaaatcatctagtggaattaccccttaaaagggaattttatatcatgtaattttatctaattatctacttaaacatgggagccaaattcacttatccacagcctctaatgttcattttaagtgtgaaaataggcaacaaaaaagtaagcatatgagtacaaactaaacaatttccccgtaatattttggtagtacacatcactgtgagccaagtgtggtggctcaggcctgtaatcccagc

SEQ ID NO: 5990 - DNA, 1289 bp, Homo sapiens
cagcgtacgcaacataaagaaatcccgtctctacaaaaaatttaaaactattttttaaaacaatgaaacattagttgggcttgttgatatgtgcttgtagtccagctactcagaggctgaggcaggagaatcacttgaacccaggaagtcgaggctgcagtgagccaggatcatgccactacattccagcccaggtgacagagtgagaacctgtctctaaaataaaaagaaaagaaaacaacaacaaccagcaacaaacaaaaacataatcttgggcacatggaagatctctctttctttctaattatattcctgctcaaatattatgttaaggattcaatatttatttttttattgttcatgaaagtgttttttattgttctaagattagatgtatccaagtttattctttcttcagcatttgctttttcttgacttcatgtcagaaattaaatacatctgctttcctagtagcagagaggatttgaatgaagatcgacatttctggctgtcctttctgaataatgtttccacttgaacttggcagtttaacaatacttccaataaatagtgccatagaataattcacttactgtttaatgccactgttttaaaatctcctgctaccacctttctccatatatggtcttccctggatcatattttgtatttgtgagcactctgattgaaagttagtgtgcggaaaatcttgagctattcaataaatacagtttagttaccaaaaacttaggttcaggtatcagacattagattgtagtcccagtttctaccaatatccaggcttgcttagagcttttcacacactgcatgaaccttatattggggctgatagtattatatagagcctggttatctttcaagtgatccccaccctatctccctgggggaaatctctgcatttattctgttgttctggctaccaaaatcccctttctctgttttgattcagcatttctccctttacattggctcacttcatgtggtcctggaggagctatcaattaaggtgttgccatccccaaagggtaggcacaggactcaagcttggccacttggattctcttacttctcaatttggttcttaaagtgacacacaaggatgaaaacaattggagctgcatttttctttaaagtgactgtccattgatttattaggttgatgcaaaagtaattgtgttttttgccattattttagtggcaaaaaagacaggacccagggaagttctgagcgctacgtttcacattattttggttcaaaagtaattgca

SEQ ID NO: 5991 - DNA, 1024 bp, Homo sapiens
ttaaagtgcttggactgaatctagatcataatttcgaagttcagggagaagaaggtttctgcgggtatctgctggatacttttcatcttgggtaggctatgcaacctgctggatggattcctgtagaacatcttccactgtagctggcatgtgtcttgtctaatgggagtgctatgctgacatccaagctctctccatctgtgcttctccatgaatctctcctttgtttatttctattgtaccagccatgtttgtgctggctccttgtccatttcccaatttagtgaaattttcaggatagcttacatagtatttgttatttggcaaaagggcttggcattcctttagaactgatgttattaacactttggcaaaactccctttctttattcaagagggcagaacagagtactctttatgtgcaagcaaattcacccaactttagtttctttttttttttttttttttgtcagttttggctcttctcaagcatctatacaaagttatatcttgaccaaatatgggcacagatgttcttttactgtacagcaaaactgctgatcgtgataagaaggtatctgtgggtaggttgtgtaggtccaggaattctttgtgatttcatgcagcatttgatgtggcatatacttttataaaaagagtcagatattatgagattttcaatgtttaataaataaaaacaatttaaaccacaaataaacaaaaaaatacttaaaaacttgacttttctattaggctatggaatatttaatgtctgaatccgtattaggaatgaatgaatctctatccaggcctgaggtcattccaaatttgttagaatagaagtgggcagccatattccgagggataacatgctggatctctgttatgccaccaatttaaatacatgccagggaggtgtagaaaagtttcctggggcactcagaataatcctatccctggtgtcactcaactgcctttggaggcattgcagcataggttcttgtgctcagtttcatcaagtgcc

SEQ ID NO: 5992 - DNA, 2369 bp, Homo sapiens
ttcaccatggaatactatgcagccataaaaaaggattagttcatgtcctttgtagggacatggatgaagctggaaaccatcattctcagcaaactagtgcaaggacaaaacaccaaacaccacatgttctcactcataggtgggaattgaacaatgagaacacatgaagacaggaaggggaacatcacacacctcggcctgttgtggagtagggggaggggggagggatagcattaggagatatacctaatgttaaatgacaagttaatgggtgtggcacagcaacatggcacatgtatacatatgtaacaaacctgcactttgtgcacatgtaccctaaaacttaaagtataaaaaaaaataaaaataaaaataaataaaaaagaattcagaattgggtgaaaaagatatgtcaggtctttttctattcccaaatagttggctaaatgagctatctgaagaaaacgtgtgtgggaatttgtgcttgtattcttgctcataattctgcttgtgtgtataactcaataatcttagctagctgtaaaattatttcatatttggttggcttgctttgtatcatgagtacagtgtttcagagatggaaagtccttagttgcagttaaagattttgtaagtaccactccctaggacactgattaaacttttacactaggtttgttaaggaggtaatccttctgcgggtcatgagtgacctggttgagagaaaagagctgactgggcacaaatccacttcccaccccagtactctccacacagtgaagatgactggaatagccaaactgatgtcgatggagcactttggaaaaggaaggctagagctctttcaattacaccatcgaagatgttctccctgaccattaaatgcttttgacagtttccatgtctatagcttacagtttattctgcttttctaataatgaactcttctttctgttttaggaaatacaaaggtaaacagttaaacatgtgtaattttttttaaacttaaataactccatgtctaaaacaaggaattgtgaatatactattgagagacagcaatttaatgattaagtgtatgggctgtggagtctgatagtccagattcaagtcctagctttgtcatttactgtgtgactttatgttacctcatctgtaaaatgcagatgacttatagataccccatagagctagaacaaagattaaatgagacggtacatgtaaagcatttaaacaggacctggcaaagtgttaatgctcaagaaagttagttattgatattgtcagtataaatgtatcacaagaagtgcaattgccacacaatatacctatttatcattaggttttactttctatgtgaaagaatatacgcatggtctgccttggtaattagggactttcatgataatatttttaaaaataactacagttacttaagctggaaagaaccctgggcaagggtgtggctatgccatgcattaatgacaaactatcaaggaatatgtgcagcattctattaattttaatggcatagatatataaaattagcagattgccttgaaatattttttaaagcagtcacttttatcttgtgagaatgactttttttaaaaaaaaaaccttaaatcttttgctacagccaaataatctaatcactcttgtggatatggccaacagacataaatttttctcataatagatctttctcaaatgacagaaaactgtctcagtacttccatactgctattattttagctctcttcattcccttccaattctgttctgttaattcaatgtgattgaaaagcattgacatttattcttacagatctctttacccaaactgaccaaattagaaggcatttaatctaccttgtataaaagtggaagcaatagaagggggaaatgagttgtttttaaatcccattttattattacattattacaacggtattgctattagctatattgatcacagctgacttcatggctgtgtgttgaccacaaaatgtaatctaaagggcatttcagatttcaaatgactttctagagtatctgagttaaaattgttaacactacatgacaactgctattatttcagtgtcagccaaatataaaagaacattaatattcattagtaatgttacagctggtgactccttaacaacattgtaatgatttgaatagttatttcaaacagtgtgttggaatatacacacaataagccctgattgacacaatgcattaaaaaacaacccagtaatgtcaaggaaaaaaattaatatgtatgcctgtatattaggctaagtaactaaatgctttagaaatacacttcagctgataagacctaccagtatgcaaggagtgac

SEQ ID NO: 5993 - DNA, 1044 bp, Homo sapiens
tcctataacatttacgacattcactcttcttggataaaataaggcttgttgcgggggatcaggcctgaatgcatcatcaaatatacaccaagattcaggaatttatgaaacacccagctaattccactggattttactgatcaaaaacacaacttaaaggaaagactgaaacattagactacattaaaattaaggacttctattatcagaagtcacaattaaaatgaaggtacaacccacagattgggaggagctatttgagtgacttacttcccacaaaggatcatatacagaatatttaatgaagccctgcaagttggtatatgaaaatgataatatgatacaaatgaacaataaacttgagtaaatactcataaaaaaagaatatccatatgctcagttaacatatgaaatgtgggttaaccttattagtcatagtggaaatgtatattaaacttataatgaaatatcagtaacactacaatggttaaaatgagaaagactggctctaccaactgctggtgagccactggaactcacatccattgcttaggagaatgtaaattgttaccctctcttttagaagccatttggcagtatctattaaagctgaacacataccaacagaaatgcatataggtagcaacgatcatagtcaagaatattcaaagcatatctgtttataatagtcataaagtagaaacaattcaaatcagtgatggtcgaatatataaattaactgtggtgtattcatacactgaaatactgcacagcaatgaaaataagcaaattgctatgcatgacaactcaaatgaactaaaaaatagatattgagcaaaactgtcagtcataaaatagtatatgtcatgtgattccatttatacaaagtaccaacattggcaaaactataatccagtagtcagaataggagttattttctttgggaaagagggtggtggtaggactgtgaggggacacagagagtacttctctcattctaattaattttttttttttttttagtttttttttttttattatact

SEQ ID NO: 5994 - DNA, 1089 bp, Homo sapiens
tttctcctcctctgttgaattttaatattgccatttttcgtcacagtcttttgcttagcccaattcttcacacacaatgagtacccaatcaagttccaatcaacgcaggatattttcttgactcctttgtgaaactcgcaacaggggtcccctgtttatttagcctggcccactcaaccccttgcaggagggagtacaggagcaaatgagggcaggaaccggccgaccactttggtgcctgcaggagcaaactccatgtgggccccgtggcagtgtccaggtgggatgctaaggccccggagggtgtgttaaaatgctctcttagctccactgtccacagacagcattgtgttatcagctcagtgggccctttgccttgtcatgtggggcagctgccttctgccagggaggtcaaagggccagtgtgacagtctttttgggtacctgcacttggtgcaacctgaattcttgtctggtgcccaagaggaatggggtcacgtggatgaattgaaggacggtgaatgcagagaattttattgatctgtgaaagtggctctcaggagagaagggagctggaatgctggaatggggatgggaagggaaggtcgctctcccctgaagtcaagccacctctctgcctctctcttctgaagccaggttgcctctttccaatgtctagctgctgtctccgaagtcaagttgcctctcctcaatgtctagccatttctcctctctactgaacctgcagtctttataggcacaggatgggaggtggagtgggccatagactgttttggaaaagaaaacattcaattggaaaaaaaaaaattcaaaaagaacaatcgggagagagcaggcacacagggatagaagttcccactttgggccatgggtttcaagctttttggcttgaaggtggggttttgccagggacccactgctttctgcctagaatttctctgcctcctgtcgctatcacagtgacactgcattatggaaggataaataagaaggaaaaagacacaaaggaatgaatacctggtgggtacagactgggtcttgggactgaaacaccttctagctgcaaat

SEQ ID NO: 5995 - DNA, 1053 bp, Homo sapiens
ctgacccagatgatacaatgactagatgagttcacagctggctgtaatcttatctcagaaagaaacaggaaatttaccagttactgtatttctactctgttctaggcacttagtatttaactatctcatttaatttttacaacaaacctataaggtgcatgctatatttatagatgatttagttgatatccagagaagtcaaatgacttgcctactatattaacaaatcctggtaaggagtagttcattctcaaactaatggtaaaatcttttgagcctaaagaactccaatatcttggttaacatagatttagacaagtcactagtgagacactgtactgaatttttaatactacattatttatataatatatacaaattaaatgtatattgtgtatatacatatatggatatacatatagagttatatatatgcatatatatgaaatatatattaaattaaatagttggcttttgcaatacatattacatatttttatatattatatgtatatttaaattatataggataatgaatgtaaaatagaatgaagactctagattatataaagtataaattaatctctaaatttcatcaacatgggagaaacaatcactacgccagtctgtaaattgcatgaggaacgcagggcagtctgtactgtatacagttatcatcaatgtctagcagagtgcctgacacaaaaatgcataataaacatttttagatgaacaaataattgatatgattaaaacccaagcaaaactcccagattatctagaaattcacaatgatagctagaggaaacctggtatccaaagaaaagaaagttggaaataaattaaataatatagataatactctacaatcctatgaatgatttttgcatattgacctcatgtttttcatattcatgaaatagccggcaaaaagaattagagggaattgtagaatgaattatgtcatacatggaagaattttctgtacattgaaagtggttagtacttggatgtattacttatgaaaaacatgcagtcttctttagacatata

SEQ ID NO: 5996 - DNA, 1029 bp, Homo sapiens
taccatctttaacattttcatcatgttcaaatacttccttcttaaatgatgttttggggacagtgaggggtgtatgtgaatgagggtgtgtagaaatcaggtgaaaataataaaaatgtgttcattgtgaatcagtttaagtctgagatttcactttaattgattgaaatcatttcctttagcctcatctccaaacaaaatattggtacaatgaaaaatctacctgcttttttttaaagaatattatgtcagtgtcaatcataggcaattctgaaatgtgttgttgctaagatgatacattcttactcatattatttacttagagactttaatgctcttaaggtgtgaaggcttttagattattactgtatttattaaaaaccaagggagacaacaaattacttgggtccttacagtcttatttaagtgatcctatcctttattgatacatttgaatattcaaaacaatgtccttattgtgaaatatttctgaacagttttgtccggtaactctgtccacggtgttaggatttcttcagattatgcaacaccagatactgcgaggttgaagatgattttttttttaacatggcagttgcttagatgtctttaaaatagcaatgttaggaatcagagggtgagattcagcatttcaatcaacatggcaacaattctgcagtcattttgtcaagggaccctgtgcttgcttggggagcatctctacttgtcaaaacagtgacttctctacctcaatctctgtgagtccatgagaacggtaataagatggctgtgtccatgatttttgcagttcagctcaggaaatgtattttctatttaagttggttagtccatactaagcagtcctccaatacattatctcattgaacatacagcaaatttgttaagttgttgacaaagtctacaaacatgaagcccagtgcttcatgacctagttatgacctagttaacttcagtgtctctaggataatattttttactgtttctctcttaacaaattttctccataat

SEQ ID NO: 5997 - DNA, 1050 bp, Homo sapiens
gctcaatatactaacactatgttttctcttaacagattcctacttaaaatacttttttggtacgaaggctcacacaaaagctgctcgttatttttcaaccattaacttttgttttccaattacatttttaatgaacagttttttcaagaatgcctatttaaaataatgtcattaaatgggagaaaataggttcatatttaattgaatttgttttgtgccaagtaaacaagaacaatgttccctaagggctttaagcagattcaagaaacatatctgaatcacctataatcagtataaagcacatcacacaaaggatgagagaatgtggtgcatgtgcacacgagagagacagagacagagagagagagagaaggaggaggaggaggaagagaaggaagaggaggagggagagtaggaggaggaagagaagaaagggaaggaaagaaaagaagaaagggaaggaaagaaaagaagaaagggaaggaaggaaaaaaaggaaggaaggaaggaaggaaaaccttaacatctagaattttagagaacaagaacgtgtttatttgaaagtaggctctaaatgttaaggtatcttcccttgcacttcaaaataatatggcgtgcatgcaataaataagaaatgcagccgggtgcagtggctcacgcctgtaatcccagcactttgggaggtcgaggcaggcagatcacgaggtcaggaaatcgagaccatcctgactaacatggtgaaaccttgtctctactaaaaatacaaaaaattagccgggtgtggtggcgggggcctgtagtcccggctactcgggaggctgaggcaggagaatggcgtgaacccaggaggcagagcttgcagtgatctgagattgcaccactgccctccagcctgggcaacagagtgagactctgtctcaaaaaataaaaagaaaaaaaagaaaagaaatgtgcagcttatgaaatgataaaataaactcccatatacctaccaccaaccttaatgtttaaaaatgtactatccaagtagagtagccatcactcttagca

SEQ ID NO: 5998 - DNA, 2266 bp, Homo sapiens
ctgtgctgattctgtttctcttaccagttctgtaagtgctctaaatctccttatgggcccggggtttggaaacacaaagccagagtgaattgcaataaatttctattttctgtcctgccagatctctccgttgagtcagtgagcacagggccaattttctgatggaatgggggtaagaagaaatcataaatacaaagaggagaaaaacataggttaatagcacaaaattgaaacctccataatggttttcaattttactcctcagtataaaaatcaatatagatcacaaaaatcacaattactgctgttgagcatctgccttgtaaatggtcctattatagccctcaatggttttactccttcctttttgtttgcctttaaattgaagtatgcaataagcttgtaaaagtcacaaatttaaaggaactatggtaactttttaagataatcttgacggtaacaatcagcattttcatggcactgtataactgtattcattaagtaacaaaataaaacactgaacataataggtacataatactgaagctccggttgtagaatttctgcttcattgaatctcatgtgtggtttcactctgcagaaataagaatacctggaataaaaaatagagaccttcacccttttcaaactgacctattattttaaactctatatttaatgtaatgtatatatttttatactagagcaaagttgccacttgtcaaagtccttcaagtttaacctttgtgaatagagacattgtttcggactacaaaaagaattcttttttttttttttttttttttttttgagaccgtctcactcttgtcctccaggctggagtgcaatggcacaatctcagctcactgcaacctccacctcctgggttcgagtgattctcctgcctcagcctcctgagtagctgggattacaggctcccgacactgtgcccggctaatttttgtatttttagtagacacggggttttaccatgttgaccaggctggtcttgaacccctgacctcgtgatttgcccgccttggcctcccaaagtgctggaattacaggcatgagctaccgtgccctgccaaagaatttttttaaaaaaatgacagtcaggacactcgatttctgctagtcccagtctgctagaaagaatgtacttttacaaaaaccagttcatctcaattttgctcactatgttagcagagtatgtctcacttgtctactttcttgtttgtttcttgagctacctgttacctctctcagtgagggaagttaaagctgcagcaggagcttggagagctttttcaactggttgacagctcttattgtcacaccttagttcatacgctatctataggcgactattgtttcagtgggttgtggtttataaagtgctaacaaggcttgagacataaagatactattatttcaggtgacactacttgttatgaatctgcagcttctcacatccctgactcttgtgaaaatactccatatacaattttccggtctgtttcagctatatcatttgacttccctgaagtatgggacttcatgaaagcgtgattccctttcattccaactcctgatgtgatttccaagtgaatttacattattttactgtatcattttacattattttaatatcttagtgagtttttaaatcagcagtcatgcctcagctgaatctcaagggacattatatggccaccaggaaaagctagtgctaattaagtttttctctggatttctcattactgacaaacagctcttgacttcacaaaaacaccagtggcttcacagaagtagcatccagtagttggtcaatgttatttctgtggttgctataaccacataaggcagctctttgacccctgaggatcttatccctggccattcctgtttgagtcagggatatacacttttcccaaatttattgactttattaagtggacaaccacctaaatcaatatctctctctccttctccctctttcccctctccccttctccctttctttatcctctctctttttttcaaatttgagagtccatgattgggtattgatgagcaggatagcttgggggcaagaaacctatttattagcaatgacctaatgtatgagcatagaaagaaaagactgaggaaagccaaagatggagaacctgacagttccgagaaaatatgactgacctcaacctgtgaggctttcatgttctcaaatgacacagaaatgactaattttcttctgttgaattta

SEQ ID NO: 5999 - DNA, 1022 bp, Homo sapiens
cctatcatactgcctctgttgggagtgttgctatttttaagaatgggctctaaagacagatcactttatcctggttgtatatttaaattactcagagaggccaggcgtggtggctcacgcctgtaatcccagcattttgggaggccaaggcaggcggatcacaagatcaggagttggagaccagcctgacaacatggtgaaacccgtctctgctaaaaatacaaaaattagctaggcgtggtggcatgcacctgtatcccagctactctggaggctgaggcaggagaatcacttgaacccaggaggcagaggttgcagtgagccaagattgcaccgctgtactctagcctatgtgacagagcaagagtctgtctcaaaaaaaaaaaaaaaaaaaaattactcggggagcttttaaaacatgccagtgccttatctccacccatggggagtattctttaattgttcagggcctgcttctagggacaggtaatatttaaatctcttcgggtaacaaacaagaacagtacactttgagaactactgatttatatgaaagctccatgagtgtctcacatccaaagataaattaatcttagctttaagctagacaaatgtataaaaatattctgctttaatgtcttcattttccaaatgagataactcaatatcagacaggttaaattatgtatctactagtaaacattgagtaagtgtcaaagctaggactgaaattcaggccttccctagtccaaggcccatttccctgtactacactgcaccatttctctcatgatcttagtagcaactgttcaaacaataatgtgtttgtccgtgtagcttaatcatgtgcataatttcaacaattgaagacaaagaagtagcattttattatttttgatgttcagtacaaaagatactcctcccaaatatttgcagcttatgtaatgcaattcgctgaaaattattaatatataatgtgatgaacattatgtatattatgatatatgatgtataatatatga

SEQ ID NO: 6000 - DNA, 1494 bp, Homo sapiens
tgtacaaatgagtttctttatagctagcttttactgtattcttaaaatattacaaacatatatagtccacgctagcaataggaaatcaatggatagttacaagaaagaatgacttcataatgatttttgacctcccaagtcaccagaagatttcaatatgagagtcccttccccctacacccccacccagcaccccctgtttctctccttctctttttttctctgaactagctttagctgcatggctcccatttatcttaatagaagttacttaatgaaggttatgcatatcgcttagtaactcagtggttaaattattctgttttgtgctttctgatctacaggtatttttttttttttgcttcaaacattcaccaatatatttcacaattgctatttgtgtttctagccagataattcatgagtttattttaaagtataattatgcttatgcaatttctgcaagacatgatattgacaacagtggcataagttccatcaaaatgtagaatctggtataaacattgttatatgtgtgtatgcggtaaatataagcacacaaaatacttctttaattttttttctgagtgactaagtagtcgtcatagaggtttagtctgaaaatggactaatagctgttgcaattgtctttttcagttcaaaaatgatagttaaaaactacactaatttgtattaattcttaccagaaaacggtttatcctcttgtacgtaatacttttaattctaaatatgtgtgtgtgtcctgtaaacttgcttgaaatactggtttgaaaatgtaattggtctttatttaaactgagacaagcctgtatatgctacaaatagtttattttagcaagtatagtctttgataatttgaactaatctttaaattcagttcaccttctacttaaaaactttaatggttttctacgtacttccttctcataaacctctgaagatttttatgcataatgaataaattttatattctaaacctagaattcagccccttgcacagaaatctcatcctacttatccacagttttatctgtgactctccaagacagaacttctcttatggctagaaaggcttcatgggcatccccacacatttgcttcttcttccctcaaacttatatcaaaaaatgcctccactttatactttgcctgcaaattttactcatagatgaagacaaggttaagttctgccttttccatgaaagttgaattattattgaatcttattaaaacccaaactgagcagttctagttgaacctcctatgggtgcaagactttgtgaccaatagcattgcttattatagatatgtaggtgttggcctctaccagtggggcagtaaccaccctgaaaacaagagcctcatcacagacaggttttatattcaccctaatatatacatacagacatggaataaatgacttttataaatttggaagtcttcaaacttgaaagtgttcagctaggtcaaagc

SEQ ID NO: 6001 - DNA, 1061 bp, Homo sapiens
gtacaatattacattcctcactgtgtgctaggtgcccagggctgtccttggatacatgtagtgggtcctccatgagcaaacatttgttaaatccatgaatggtaaagagttctatattcaaaccaaggctctgacaatacttcactgtaaagcctcaaaaaaattttttttaatataaggctagagattcttgcctcaagtgggttgttgtaactgttaagggcagtgtaaaagttccttgaaatttcaaaagaaaaaagatacaaagatgatagcattattgttaaacatgctctttatgcagcaaaggtgtttgttaaggttcatgattggttgagaatagtaagggagaaaaactgaagttatgaatcttttctttttcacttgtttttctgaagtccctaggattacttttttgctacaggaatacaagggggttgtcacgtttttctttctatgctttatggctctccagttccaagtgctgagtaggaaagatgactctttcactgtaagaaatagtaataacattttcaactcaaaactcactaatcagattgattagctgtccacaaaaataaaatcctgcaacaacacattcctatttttaaaacattttttggcattttgtattttttcattatttaatagagtgaaattttattgcttggggatgctcagttcacttgagaaaccaaacttaagaaaaagacaactagaaattgtctttattgaagaaaaaatacagagataaaactaaagagaaaaaatggctttaaatgtgttgtaacacagaaagtcaacttagttatttgggaagccacaaaaactatcatctcccaggccatagtttcagaagtttctctgctttatcgggttttacacactaaactgaaagaacagaagcctaattctgaaagaagcaccaatgaaacactaagtatgttccttcttcctgttggcaggtagctgttaaggtagatgttgaggacaaaatcaagtgtatcggaaagtttagtaaacagaaagccagaaaaactaattctacttcttgacttggt

SEQ ID NO: 6002 - DNA, 1077 bp, Homo sapiens
caggaatcaagaaaaattaagtcacaaatgtgctattcaaatagaaaacctttgtgatcaaatgaggaccatacttggttaaaaaaaattaatttatttattcctatttccataagttgcattatatctacactattcccaggatggccccaatagaagtgttcttgccgggaagacatgaattcctcgttctatacctgtgaatatgcatgggatgtcatcaatggtaaagtgagtcttcctaaatgctaaatgccaagtagaataagagcaaatgttgggcttagttgatttagctataaaaatactcagtgataaataagaatggtttcatgatacaactatgtttggtttaagaaaaacaagtacttgttcctattcgaagagacaacagctgaaatgaaaaagatttgacaaagaaagcatagtaatggaatgatttcttaaactgacgtgtagacaagcaggtagataaaaatctctgtcttgtcttcagcatggtattttagacagatcaatgaactgaaggtgtgaacagagtggaatgaatacagtagtcctctcttatccaaggtttcactttctatagtttcagttacccaggctcaacccatgtcattgtgttgtatcaacagtgcagtaagatattttgagagagaaaaagagaacagaagagacgacattcacataacttatattatatggttatagtggttctcttttattattagttgttaacctcttactatgcctaatttataaattaaactatcacagatatacatatatatatggcttggtactactcagtttcaggcatccactgagggtattagaaagtatcccttgcagataaagggggacttctgcaaaacagtaagaattggaaagcacagcatgtattacttcatcagggaaaatgccttatacattgctataacacaagaaatgataccgacgggacagaaaaacaagcaggctccattgattttccctggctcctcatattccttactaatgcacttgaggaagtaaataatgcatacaactgattgcattagaggtgactgtctcctt

SEQ ID NO: 6003 - DNA, 1070 bp, Homo sapiens
tgttatggaaaagaactaacttcttctgttaattggcaatcctactctttaggtaactgcttcccagtaaattaagaccaatcagtaagctttctttgatcaggtcagctaagagaatcaggggcatcatttttcttaggaaaaaactatttttaattatattctgttttcatcataatctcatatacctttggggcatcaggaaatcattattgcatacctactacgtgctgggtacttttttatgtactaaggagacagtaatgaaaaaataaacaggcaaaacaaaacaaaacaaaacaaaaaaaccctttttctcacatatgtactaatgggaaaaagctagacaattgataaaatatataaggagattgtattctattctttgttataatagatagtggtaaatgctatagagagaaataaaaaggcctagagtttgggggcagtggttaagattacagcttttaaggatgaaatcagggatgtatcactgaagagggacagttggataaaagttttaaggagatgagggagtgagctttgcagatattgaagacaggagcatccaggtgggaggaagcgtgtgtaaaggccctgagaatggcacgtttggaagtttaagacatgacagacgaccttgcacataggaggaatgcagagcatatttcattaaatcaatagtaggcttcaagatattaagtgtttttccgtacattatggtctaattcaatgacattctttctttacgcacaggtaataggattgaatttgacaagaatattcaaatatggttcacaaactgaaaacagtttgcttcgtatgtaggatttcatataatttcaagccttgttttttcattcactcttcatattaatgctttaaacagttgtaactttctctcataattgtgaattggtttttccaggagtgtaattggctgtgaaattggactctttttttcttctgtaaactgtcttcatgctttgtggagaatagcattctccaatttctcttccttcctttatttttgctttgttgaatagtttcacccagaagagaaagagaaa

SEQ ID NO: 6004 - DNA, 1045 bp, Homo sapiens
tgtggttagtttaaattttgtacatcagggcattcgagggagaccacattacccagtgggagtttacttggcaaagtacatccttctacaggagaatgtaagagttttacattacaggattcagccagatatggtgcaaaatgcaattaactggttatttttaaaaaccatactgtttttttgagacagagtctccctctatcacccaggctggaagacagtgagttgatctcggctcactggaacctccacctcctgggttcaaacaattattgtgcctcagtctcccaagtagctgaaactactggcctgcaccaccacgcccagctaatttttgtattttttgtagagatgggtttttgccatgttggccaggctgttctcaaactcctgacctcaggtgatctgcccacctcagcctctcaaagtgctgggattacaggtgtcagccaccatgcttggccttaaagcatttcatttgaagttttgtcagaactggcaaatattggaccctaagtttgatggagaaaggtattctgggctgctttcttgcctttcagcttgttggcagtatcattatcagaataacttcttccctgttcatggaaaaaatgtcaatggctgctaatctggaaagagaatgtgtaatttaaatgggaaggtgaatcatggtttgtcctcccaagaaaaaaaaaatgcttcactagagttgcaaagtggacttaggtattttcatttctttcccatgttgaacaatcttcacccttatgtattttcagagtattgtccgaatgagtgaaataagatgacattttattggcagatttttcggattcaaatgcatatatagtgcagggaatacatttcttaatttgattgatgaggatccgatacactcactgtctcctctgaggagcaattggttacatgtagagcataacgtaaataatttgaatccattttttcatatattttttaattgttgttttattttttttcatagagatggagtcttgctatgttgcccagctgttcttgaactcct

SEQ ID NO: 6005 - DNA, 1068 bp, Homo sapiens
ccaatgtaaaacaacaaaattaaccaacttccagagcagtataagaattctaaaagcatcattacaccccctggctttacattttacactccatatactgcaaaaaaagaaaaaaaaggaagattgtaagatgctagtataactgataattaagcgaccattggtcaacttgtaatgatcagggatggtttggaagtgggcatagaaccaatattgttgtagtaagaagtggtggctatgaggatagggaggtagtgatgctgggtgtgggccgagtagactagattatttcaggtgcatatctgtagtcaagcacataaaatgtgtaattcagaaactattacaatataatatgacttgccagtttttatgagctgttaaccctataccaaattccaatatacttagcagagttttgatttcttctttcttcttgttcaagcccatatgtgtttatgtcaggagtaaaccaaatacttggaggatataaccacctaccatgggttaagactagaagacagtagagactgaaaggcaagataaggttgtgttttctccagcaaacctttgtatttaaataactttatagcaagtattgactgtcaaaggttgcctgactaggacagcttcttaaatattgatgggtttgatacggtttgtcttagcttcttaagacatcaaaacataggagaaaggatgctgaactttggagtatttgtcttcattaaatacatgagtgacaggttaggtgatctgcttctgtgccaggttaaataatgaactataatattatagtagtaataataatatctgccttttgtaaaatgctttgtgtactaagcactcggatgagtactttatatactttatcttctttaatctaaattaccatgcatgagacagctgctgttatttacagagaagaaaacccacaacaggaaagttgtggcagaaacttgccagggtcactaagctaggaaatggaggagccaggtttcatacagagcagtttgagcatcagaaaccaaccagaactacagttacctggcattgggtaaaccatgtcat

SEQ ID NO: 6006 - DNA, 1044 bp, Homo sapiens
tgtatttaaacttaaaagttttaaagatagattatatacaaataatacatattcattgttatgaaaataatacaataaagaaaaatacaaacatattataacaattaatattcacttaggtcttactgtgtgccaggaacttggctaagatattacatcatgaggtaggctttgtttttcccatatcacagataataaaatggcagcttcaagaggtgaagtaacttgcccatggtcacgcactttgtagtgaagctggaatttgaagttaggtaccctgattacagaattgtgattctcaaccactatattacaaatccaacccaatttataactctttattagcatacttcgaaacagttatgtgtatgaatatgtgtatgcccatacatgtatagtgacataaaattatatataatgatatcttactttccatgttgttatgtacactaccttttgttcaacaatgtatcatgggctttctcctctatataaaaggattgatatacatacataatattatattctatatctcaaaaatagcagggcccttttgatgaatatgtgttatgtcctatttcacaaatagagaggtatagataatttccctagaatatccttttacagatcctttatacactgatgatttgtttccttggagtaaatcctaataatgggaatagtgggacaaaggacatacccattttatgttgtggcacatccatctaagcaaccaaacaggaaggctttgcaaatgtatcttcccagcaacaaggtaagagagcaatatcccattcctaagtgttattttcaaaattagattatatcaatatttttaaactttgctaactgtaattgtttgaggatggaattattttcttttttttaactgaattctaaatgtgatagtaatttttttcattttctattgtcatttgcgtctacttggggaattaatgaacttgtgcttttaaatagccttatgatccaaataaatatttttacaagcttaaactattagaatcccataatattagcaaaatg

SEQ ID NO: 6007 - DNA, 1019 bp, Homo sapiens
cccgcctgacctattcttagttgtcaacatttatggagtgtctgggggaaagaagaaggggcagagagaggaataacaaaacaaattgtttctgagtacctaataaatttcagttacttatgtctacatgttttatcatttaatcttaataattatctggcaaaataggtttatttgtgcacgatttacagttcagaaaattgaggctcagagaagggaaagaacttacaccagatagttcagttaggaagacttaggcttctctttaccaagctactttctttctgcagcatcatataacctaccagttaaaacaaacaaacaaaactctataatagcaattcagtacaaagaagaattactgtaggtgttttgagaggatttggttagtttcttttcattagtttcctttatgatttacccccgataagtttaagaataacaagtgatagaataggtcttattagcaaaatgcatgataaaatggagtaatcaaatcaccattcaataggactcctggtctcttctgtcaagaaattcataaacttaacatgagatgtagataaacataatgaattataaaacagggagcatcaacagtaaaatttaagagtgaatcttctctttctgtgactactgtcttcttcataatcacttaaattctttctcaaaagggtagtttgatcaaggaaaataaaactggaaagataaggtaggatcatgctcctttgcataatttataaaagaataatattaatattcaaagctgattctggttgctaaaatattttggtgatttacacaatattgcagtaagaatatgtttcccatatgacgttacactttctcaaggagtaacaacttggtgcattattttattcattcaaaactaaactaattgtcttaattttaatattacctacagatggcttaaagttatctaagaaacttttataatatgtttataacataaatacttgcccattttctgcgaattccaggagctttctcaatgaact

SEQ ID NO: 6008 - DNA, 1062 bp, Homo sapiens
aatgaatagcagcagttttattcttccttaaggtgtatttgcatagttgtaaattacgcatgtcaaacaccaaacaaatcctcattccgtgtcaggattttaactccttacccaaagccaagtgtacattacagtgagtccatagagagtctatgtttttaagttaatccttacattaaattaaaggatgaagtggaaaggtttaaagcagtttcctctgctattgaattccaatacattaatatctaaaaattaagcacaatatttgtatagtgttactttagtattaaatattgtatagcttcacatggtaggattactctctagagcaaatgtacacatatatagcttgcttttcatttaaataccaatccattggcagcatagtacaagagaaatggttttgaagtaagttggctttgctaatcctggctccagaaactttggatttgacctggacgagtttcaaagtatctctgagcctcaatcttctcatctgaaaatgggaataataaatatctacttcagagaatgatgttttgggattatgtaagagacaatggacatactaagagattactcataaactgttcatacttttctataccatacaaaacatatctggattaaaacagatgcagaaccttcactttattccctggtgtatcattgttgctcagccttactttccccaaggtaaccaatcattaggaagtcaaagacagaatggttcagagatgctgatcgaagcaagtgcaaagttcattggccatatcctggagggactgtctcttgacaaacttatcagagattagaacatgctcattcatttaaaccagaaaacacattttgaatcctaatgtatgttagccattgccccaggcattgagtatacagtgcacatttttttttagcatcatcacactttggttttggtacatcttggaaaacactatcatccatacctttgacatgatcgtatcagtttcatttgttcctttggataaaagcacctaaaatcttttatctagaacagagatttggaaatttaaatataaaaag

SEQ ID NO: 6009 - DNA, 1082 bp, Homo sapiens
ttaagacggagtctcggtctgtcacccaggctggagggcaatgatgtgatcttggctcactgcaacctctgcctcccaggttcaagtgattctcctgcctcatcctccagagtagctgggattacaggcatccactaccacacccaactaatttttgtatttttagtagagatggagtttcaccatgttgaccaggctgatcttgaactcctgacctcaggtaatctacccgcccttggcctcccaaagtgttgtgattacaggtgtgggccaccgtgcctgtaccccccatttttttttaagaattagggtcttactctgttggctaggctgtgagacagtagtgtaatcatagctcactgcagtctcaaactcctgggctcaagtcatcttccctgtcagcctcccaaggaggtaggactagaggtgtatgccaacatgcccatctaattttttaatttttaattttgtagagatggggtcttgtatattgctcaggctgatcttgaactcctggccacaattcatcttcccacctcggcctctaaaagcactgggattacagaattgagccaccatgcccggccaaggcagtttcatcactaaatacctgtaaagcctaagacatttgatcatgttctgcaggtagccataaagtctagaaacagttgaatatacataataaatggtttgttgatattacatcacaataaatgttatattcaatatgttgtctcatattaccactgcatagtttagtgcaatgtgcaaaattacaaggaacatcatgtgtgagcactccatttacatcaatctctgcatgtgtatctgtgatatgttgataaggttcctcaaatttcactaaataaacttttgatatgtttcctcaaatttcactaaataaactcttttcctttagcctaacacaaactcttaaatcatcaatccagttttgcagattatcactcagtcatttctatatcacagtggcctgggggatgtggtgtgctgtgctactggaaccactcagatggctttctttagcacataaaatggggcattatttgatcacttgaattagc

SEQ ID NO: 6010 - DNA, 1104 bp, Homo sapiens
gctgtgtgaggagaaccttatccaaaacgatttcacagaaaagagcatttgttttgctgatacgggagagtttctttattccaatcacaaggcatgtgacaggggtgtggctcacttcttcggtgcccactgctcaaaaccctagggggagcatgcagacaggcaggtgcagaggccttggggagtgcttttgggatctggcccatggcagtgtccaggactcccaaagcccaagtgggcgtgtgttacagtgcgctctttcagctatgccatctgcagatgcctgtgttagtcagctcaatagaccctctgccttattgcaaggacagggggccattgtgacagcctgagttcttgcccaatgtactggaagaatcagaccacatatgggctggaaggttgagagcaaggtttgattgagtagtggaggtggctctcagtgagatggattgggagccagaagaggggatggaatgggaaggtggtcctcccctggagtcgggccgcccaaggctatactcccctcggcatctgcgttgttctgccatcactggtctggtggtgtctgttggtgtccgcaggtctgctcctctgctcctctcaacatccagctgcttgtgtctgtgtcctcttaagatctcaggtttatatgggcacaggatgggggggcatggtggaccagagtagtcttggaaaatgcaacatttgggcatgaaaacaggagttcctgttctcacttaggtccgtaggcacaggcccgagggtggggccctcattagggctccctgcccttctctacctagcacttccctgccccactctcgtatcactgttacacaccttacattgcaaaggtggttgctttctgccttatcctgggaaacagacatatgtgcttgctgagcccttcgctaaatttacaagagtatatacactgaataggaggcagagaaacaaacataatactttactcattctcagatttcctcccattccaaggaatgtaacatatactgctctgggtacaagagagtgtaaccattccatctaataccatcctgcaaagtgctttagaaagtagaatgacaatagagccggcctttg

SEQ ID NO: 6011 - DNA, 2678 bp, Homo sapiens
cttttatttctttatcttgcctgatgcactggctacaacatccggtactttcttgagtaagagtggtgaaaatgtgcatccttgtcttgtttcagtttaaaaggagagtctttcagattttccccatgatgatgtttgctgttggtttatcatatagggcctttattatttttatgtatgttgtttttatgcctcatttggtgatagtttttatcatgaaggaatgttgaattttatcaaatgatttttctgtatctattgagatgatcatatgctttttgtccttcattctgttgatataatatgtcacatttattgatttgtatatgttgagccatccttgcgtacctggtataatcccacttgatcatgacgtattatctttttgatgtgatgttggatttggtttgctagtgttttgttgaaggattttgtgtgtatgttcattacggtattggcctgtagttttattttaaggaggattgatattagtacttctttatacatttgatagaattacactgtgaatccatccagtcctgggctcttctttgtttgaaaactttttattactgattcaatctcattactcactattggtctgttcaaattttctgtttcttcctgattcaatcttggtaggttgtatgtttttaggaatttatcagtttcctctagattttccagtttgttagtgtatagttatttataatagtttctggtggtcttttgtatttctatggtaccagttgcaatgtctgctttttcatttctgattttgtttatatgggtcttctctcttcttggttgatctagctagtggtttatcaattttgtttatctttttgaagatccaacttttcattttattgattctttgtaatttttttagtccctatttcacttagttctgttctgatctttattatttctttccttctgctaattttgggtttggtttgttcttgcttttctagtttatttgaaatttttctactttcttgattcagcatttatttctgtaatgttccctcttagcagtggttttgctgtgtctcacaagttttggtatgttgtttccatttttatttgttttaatttttttattttcatataaattttttcattaacccaatggtcactcaagaacatgttgtttaattttaatatatttgtgtactttccaaagtgcattttggtgttaacttctagttttattcccttgtggtctgagaagatacttgatatgatttcaatatttttaaaatttgtttagacttcttttctttttttggcctaacatatggtctatcctggagaatattccatgtgttcatgagaagaatgtgtattctgcagttgttggataaaatgttctgtagttgtctgttaggtccctttcgtctaaagtccagtttaagtctaatattttgttgttgctttttttgtctaaatgatttgtctaatgctgagagtgggctgtagaaatacccaactattactgtattagagtctctttctttagatctagtaatatttgctttatatatctaggtgctcttgtgtttggtgcatacatattttgaattgttatatcctcttggaagactgatctctttatcattataaaatgacaatcttcatctattttttactgttttgccttaaagtctgttttacctgatataagcagagctactcctgctagtttttggtttccatttgtgttgaaagtctttttccatccctttactttcaatttatatgtgtctttacaggtgaggtgagtttcttgaaggcagcatatagttgtatctttaaaaaaaaaaattagcacagggtcagtattcaaggatcatttttttaaatgtattccgccagtctatactttttaagtggagaatttaatctatttatattcaaggttattattgatgtatgagattttgtttctatcatattgttaattgtttgttgcttgtttaatgtgttccttgtttctttctttttcttttattgtttgtcattgtggtttggtggtttactgtagtggtggtatttgagttctttctctttctcatctgtgtgtttgctttaccagtgcatttcatacttttgtgttttcatgatggtaaatgtcattcttttagatttaggattctcttgagcatttctgccaaagctgacctagtggtcatgcattttctcaagttttgcttgtctgggaaatgctttatttctctctcatttatgaaggatactttttctgattatagtattcttggctagcagtatttttttctctttcatctttgaatatatccatctttgaatatattcaactttgaatatatccatctttgaatatattcaactttgaatatatccatctttgaatatattcaactttgaatatatccatctttgaatatattcaactttgaatatatccatctttgaatatattcaactttgaatatatccatctttgaatatattcaactttgaatatatccatctttgaatatattcaactttgaatatatcccattatctcctggcctataaggtttctgctaataaatctgctgttaggctgatgggttttttaaggcattgatgctttactcttgcatctagtcttttttagaataattcctttgtctttgagtttagac

SEQ ID NO: 6012 - DNA, 1022 bp, Homo sapiens
ttaaatttttagtgttcagggctctttttttgttcattattcattagttcattcattcactcaaccagccaatgtttatgaaaacctaccatagtgccaggtactgaaagtatggaaatgagagacataatctctaccacaagagattctctaacaaaccaactgacagtaaaaatataagttctattatggagaaaaggaagcaaggtagggcacttaacacattggaaaaaggagtcacggtgactttctacatagtctttcaattaagccttgaagaaataaatcagttggaggagagagagaaggaaacagaaagaaatgcttatgccaagttgtagatacacaaaataacatggtgggttttagaaactcaaggtagttcagcttactaggaatgggatacatggaaaaaaaatgatattggtgaaagcttgggcaggttgtgtaaactgtttcttccttatcaataaagtggagacagtggatacaggttgcttaacagagtacagacatataatacatgcttcaggtttctttagtggtgaaagtaagagtttcatataaggactaaggaaaacctcccaattaattttcaatcttttcatgaaattctaaagcctgacaatttggactcagatagatgtatgcttcttgttaatgttttgaagtgtttactaattatgaggggtctttgttcatttttttgtttgtttgttttctggaatcattaggatatagcaattacagttggaaggcagaacaccattagtggttgataggtcaggcttttgaagtcagacttgcaaatttcttgtttctaatctgcaaaatggggataataatagtatatctaactcactgtttttctgagacttgaaagtgcttggcagagtaccaagcacctagaaagccttctgaaatggtagaatggtagctgaaagtcacaatcttcctctcctttcctttcctttcctttctccttccttccttccttcccttcccttcccttccttcccttc

SEQ ID NO: 6013 - DNA, 1033 bp, Homo sapiens
gtgactcattaatcttctctaccagttgtgcctcagtatcctctgctattcatcaaatcgtctagttatgttgctagccgaaagaggaacgtgtgctatctttcgaactgcagcctctcctaaaagttcatgacaaatgtccttagcagcaggcaggatcatctgtttaccaacagtaaagggcttcggagcttcagcgctgtggttagccactgaatgatgctgtcagtgcagacacatttgatgaagtggtggccttcaatgatttcttctgttctttgtgttcacgtgtttttctattgaaaaactccaaaggcttgtcttttaattcagcatgcttggtctccatgtggcaaagcagttttgaaggcttcatggcttcttcgttggatagccggtcaccacatattatacaaaaagggcttggagaatgtaaatcacctgttgtgctgaacccataatttaagtagtattcttggtattttattttaaatgcaactttccttttgttggcattcttagagtcttctgctgtctcatcattgggtctttccccctcttcaaagaaactctccagttacatttgttttcactcatttgtgctagggttagcttgtgggcttaccaaaactctgactgagacaaatgtgcagtgcagggaaagaggcatggatggagtggtaaataaactaataaactaaataaactaataggtgggccatgcatggactaaaattagtgtcggattctgacttaaatcctgccaccagatgcagctgtacaattgaagtacatcaacccacttgccactataaagcctgccaccagatgcagcttaattgtcacttaccattcactgatagggttttgatatgagtctacaagcagttgatttgttatggtctctatgcagtcaaagctctctgctaaggttaatctgtatttgaagccactcccctcagtgttggcatcactgctgcagttccacctctgatcatcaggcattagattctcataaggagcatgcaaccta

SEQ ID NO: 6014 - DNA, 1004 bp, Homo sapiens
tgcttgcttgcctgttactcacctcatgctgtgtgtgaggaacatgtttgtaaccagtacctctccatggcccaggaatagaggacccctgctgtaaaggatagaaaagcaggttacaagtttctcccttatttgcattattatcccagattgcagtaacatctaaatgaagcttgtccaacctgcggctggtgaaccacatgcagcccaggacagctgtgaatgtggcccaacacaaatttgtaaactttcttgaaacattatgagatttttttttttgcaatttttcttttaagcttatcagcaatcgttagtattaatgtactatatgtgtggcccaagacagttcttcttcttctaatatggcccagggaagccaaagattggatacccctgatcctagcagattagaaaacagtaaagaaagagtttgttataaacagtgacccccatgtgattttaaagaatatactgtacaggttgttttggggatgcaacgggaaaaatgctgtcattcaactgtctgctggaaactcagaaactcttggtatttggaattatgtaaataggactttgaaaaataggctgaattttttccaatgattttatgagcttgtgcacgtgcacacccatcgcagtcaagtacagatagctttaggagtgggaagctcaggaagcaaactttgcttttcccctctgttcttacattagcatccattctaattgttgcttatttggggcagctaggttaatcgtatctatctgttgtcccctactgagctgatattttctttcactgtaaggtgtttcctaattactttgtgaataaaattttttagattgagtataaaattgagcccaaagttatgcttgtagctaaaaatatgctctatttaatggttcagttggggccagttgttttatgtaaggaactctgattgggctgtggtaaaactgcacttactgacgcatgcctctccttgctggtgaaattaatttggaat

SEQ ID NO: 6015 - DNA, 1745 bp, Homo sapiens
gatgtagaatcaatgtaaaggttgatcaatgatagactagataaagaaaatgttgtatatatacaccatggaataccttgcagccgttaaaaggaacgagattatgtcctctgaagagacatggatggagttggaagccattatcctcagcaaactaatgcaggaacagaaaaccaaatactgcatgttctcacttacaagtgggagctgaatgatgagaacacatagacacatggggggaaactacacacactggggcctgttgggcagggggtggaaggagtgagagcatcaggaataatggctaatggatgctgggcttaatacttaggtgatgggatgatctgtgcagcaaaccaccatggcacatgttagcctatgtaacaaacctgcacatcctgcatgtgtatccctgaacttaaaatagaagttgaagacaaaaagtgattgtcagcctgggcccttggaaatatgaaataatgaaagtagctaagtgcagttgagtgagaaaggaaacaagacgagagatccccaatttgcctagatataagtaagcattgtaggtctttcaccaattaaatgatcttaacaatttagagttatgattgaaaattctattggctagtactaataaactttttacaaaagtaaaaattttacaggagaaatcatatggtctggctgaatctctttttctgtgaagtttctgaaaaattgactagcagttttattattttagataagtatactccattttggaatctcatcttaaaatagtaatggaagtcttattttgaagtcacagccgtaaagacacactccaagcaattctcacagtgctgagtctcccaaatgagtgagcatgtggtgtgtgtagcttggtggtgagcagatgagcagaaacgtaacttagctgctctaagcaatcacaaggaaagatatattataaatattcaatatttgatatgcagttgaattttattatgcattcatcaaatcattgctgtgccaaatgctccagtttggaaaccacaaagagaaataagacattgattctttgtcgcaagctgtctctgatgttcatgtactttgactgccgtcttcaaaaggcatatagataaccaagaaattctttgttataatatggaatataaagcacaagagttacaatgggaataatatgtgcaggagagcctgtctcttcagtggaatcatggaggagaaggaagcaggaagtaatcatttgtcggttcagctagttaatttgaaataatgacacattgaaaccattatttcccaattaactaagacttgaaagaagaaagtcaactaactaattaaggttaagaataaaaaggatatactcattattaatgaatgaaaatgaaataccttaaatggcccatagggacagacaaggacatgcctcttcaaagaagattgtaagttctacataagaacagccactatctttatacactacagaattaagaaggaagactgtggattgaccttaaacactgtaatgttttttaaggaattgctttggatttttttttcagcagttttaaaataatttttatgtatcttagaatagaagaggtgaggattgaggctatttataagtcatatataaaacaagacatgagaggctgggcacggtggctcacacctgtaatctcagcactttgtgaggcagaggtgggcggataacgaggtgaggagatcgagaccatcctggctaa

SEQ ID NO: 6016 - DNA, 1081 bp, Homo sapiens
atattaaaaaaaaatcactgcccagatcaatgtcaagaaactttttgcctatgttttcttctagaggttttataattttaggttttatatctaagtctttaatccattttgaattaatatttgtatatggtgtaagacaaggatccaatttcattcttctgcttctggatattcaatttccccaatatcatttattgaaaagactgtccttttctagttgtgtgttcttggtaccttttcaaagtttaattgactgtaaatatgtggatttagttctgagctctcgattctattcctttcatctatgttctgctttcatgccagttctattttgtattggttactgtagcttcgtcatgtatcttcaaagaaggtagtgtgataccttcagcttagtgcattttgctgaagattcctttggttattcatggtcttctatggttttttattagttttgagatttatttaaggaaagaaaaacacacacacacacacaaccaaactcaggaggctgcttattaatagaatctaccatatctttaaaataaggttttccttgtgtcatctctgtgaatttaaacctattttaatagctaaaaatggacagttggataacatattcttcatactttttatatttttaaaagttaataaatcacctatttattcttttactcagatttggataattccaaattttttgattaatgtttaaactttaattatttcggtttctcatctctgttcactgttctaaatttctctgcacattttaagcatgaggaagctgacagtgtacacaaataccctcctactgggtgcatgtcttcttgttagaaacaaaacaatcaagagatttcaataagcttttcaatcttttgtgaggaaattatttcagcccagtttagaatttctgtatttttcctcccatcttgggttacttgttagactctatacaagtgtgtaaatcttgattggagaagacactgctgatggtgcacatgatttattataaccgtgaaattaagtcctgggccacatgcccagtatctaaactaaatcaaggagggcttaattgaaa

SEQ ID NO: 6017 - DNA, 1032 bp, Homo sapiens
ccacccatagtcaacattttatttaagacaaatgtattgtgtcaatcccttttctcttttgtaagccaagattctattttgtacctaattgtacattttaagacaacatgtttatggtcaggatatgaaggaaaaagagattaacaactgaattttgtggtttttgaaatgttgtttcaacagtttttatttttattttttttttgtctttctactcatccctccttctatttcttgatctccttcttccttcattttttaaaatgtatgctgctctgtaaaagaaattatactaatctcaagtctaaggagaatattaagatataagagatattgtcatcgacctcaacggatttttattttggtagaagagaaaaaaaattataggttgattgctaaatagaggtagagagagctagaggtatttatgaatatgtgtgtgtgtgtgtgtgtttgtgtgtttgtgtgtgtgaaacaacacaagggaaagcaatgtcctgggaaactgtgattttagcaacacatttattattaaaaaagaaatgtaaatgagctttaaatgatcaatagccttagagaaattaatggaaatcaaggtgttgacaaatgaaaccttatgtttgtatgtaccatataacaggaagatttcattctacatggaagaaatgtggtgacatccgtattatgtgtcctgtgactccagccctagctcccctttattctgacaagcattgctagggcacaatctctgctgctaaaatgtagatgtcaatagaaatcaagtatatctttggctgcctctccaaccacaagcccgacactaagttggccccttgatggtttttgacacatgaaagaatataagcaaacttacataaggagcagatgacactggctgggaattaaattggaatgattcctttgtaagattctctagtggtttgagaactaaaagtgagtgaatccttgtgacacaagtttgatgtaaacaagtggccttttccttattccattatgcttaatttactccat

SEQ ID NO: 6018 - DNA, 1049 bp, Homo sapiens
ttaaagtataataaaaaaaaaaaagaatacttaaaccccaaaatctttgtaaaggaggcccttgagccccttgctcgggcccactcccgccctgtggggtgctttcttgctttaataaatccttgctttcgcttctttgttcctgggtttcattcctctgttactttgtgcattttgtccaattattttttcaaaaccccaaggatctggacaattcacactcaaggcctgccttctgataacaatagcagcatgctagtttattccaacatcttgtctcatacaagtcctctgtctagctctcactaactactctcaattttcaaaactcggttctgtttcaagaaaacttccatgatgacttatgaattcagattctctttaattgtgttcctatagtactatggtgctacagtactctgtactttcctttaatttggggactaagtctttctagacggtctagccttcttcagaacaaagcatatgctcagaggaactgggacaaagtagatattgaataaatacaaaaatcagtgggagcaggatccgttctggttttgctgaatcctcattgcttgtaacatggtggcattagacaaatgttggctaaaagaaagatgagtaaaatgagctagttgtgcttttatttcttgttttctgagcacttcttattatgtaaggatctattaaaaacgaggtgcattcatttatacaagtacacacgtactaccagttgactacctgttttaataatattaatgctacaaatcagtgatgacattagttagttgatccatttatggttttgaaccattacccaaaatgttatctagtcataagataacttgtgtcctttttatctgtgctagtcaatctgggagctgttgcaatgaattaattaaatttgagtaaattttaaaatgtatctattcaatttcattagtgacaggctaagttctcaatagctttatgtagatagtggctgccaaaccagaaacacaaatacagaatattaaattttatatagaatattaaatttaaatcaa

SEQ ID NO: 6019 - DNA, 1021 bp, Homo sapiens
accatggccaactaatgaactaatttttgtatactttatagagacagggtttcaccatgctgctcaggctggtctcaaactcctggacacaagcgatcctccagccttgggctcccaaacagctgggattgcaggcgtgagataccttgtctggccttgagcaagtttttctatgctacatttgtcaaactagacactaatattgatccaatctaataattatgtttttatactgagtaaaagcaggagttgtaagctcgaaggctaggaggaggttaggcttgtggccaaattggagaatataagctgcttctacaggcatttaagttcaaaattttcaagaaaattgactggtcaaataaaacatatctgtaggctcaattggtccacagatcaccaatttgaggtttcttgtccaaagatatttaaaacttttagggaacaaaacttgaataacattgacaataattctacaagtttcaatagtgtaatttctctgatgcttaaaatagatgaggatcttttcctctgatgattgataagcataaaaagatgaaatcattttggatataggcttagccaaagataggaaatatattgtattaatagttgatggttgtatttactctcccatacaaggtttgtgtctggcaatgtttttagtcctgatttatgtcactatattgattaacatgagaacaagagtgatatttccgatatggagtatgatttaataaatgttaaggcaccaagcaagccctatattggcctttttaaaaaaaaaaaatcacattatgaattcaactataccatttctctgtcacccaggctggagtgcagtggcgcgatctcggctcactgcaagttccgcctcctgggttcatgccattctcctgcctcagcctcccaagtagctgggactacaggtgcccaccaccacgcccctggctaatttttttgtatttttagtagagacggattttcaccattagccaggatggtctgaatctcctgaccatgt

SEQ ID NO: 6020 - DNA, 1031 bp, Homo sapiens
ttaaacattttttcatctgtaactagatattggtttttcttctccatagtaagatcacctgatatttgataatttatgcttttattactacttgttttatgataccaacatttatgttcacatcctcaaggctttattttcaagaaaaaataaagtcgtagtagcacaatgtgataagctccatcttccaaccaatttttaattgtctcattggtatgtatattaggactaaatggctgtattccatgcaaaaagtaaaatgagcagtaagtcaagtgagtattcaggctatataaaaacttctacctacctgggccttgattattcctggtaagatgattaatgatagaaaagtagattatgaaataagaaaactaaaaggcatgttaaatgctctttaaaggtttttaactcctgtctggtggagcaaatggacaccatctgtataagaaagccagataccaagaaactgagagttttacttagtgaaaccttccactacttatgaaaagtcaaatatcatgtataactcatccagatcaactagtccctagacactgatttttgggaaggatgtaagagaattactgactcagatttagggtttaaagactattgagaaataggaaggtattgagagattattgggtttcatcagagcagacttaagtagcctggttgattttagatttgtcacagcaaaatcatgcttggatgctcgaggcctggcagaaccttgctggtctctgtagggtgggataagtgaagcaacattaaaccaggtgcagtccttaatttctcaggtaacataactttagaaaaaacaattctaatacaagttaactcctgtctggttgagcaaatggacaccatctgtatacaaacgtcagataccaagaaactcagatctttacttagtgaaaccttccactacttatgaaaagtcaaataccatttataactcatctagatcaaccagtccctagacactgatttttgggaaggatttttagagaattactgactcagat

SEQ ID NO: 6021 - DNA, 1035 bp, Homo sapiens
tctgcctcctgagctcaagcaattctcctgccttagcctcccgagtaaagactacaggcgtgtgccactactcatggctaattttttgtgcgttttgtagagacggggtttcaccgtgttggccaggctggtcttgaactcctgagctcaagcgatctgcttgcctcagtctcccaaagagttggcattacaggcatgagccattgcacctggcctcagactgatttttgaacttctaccctgaaattgctttgggccttcatttataagtcatactagaaaatcggtacattaactgaaaagtatactttatttttaacaaagaacaggattatgcaacaaaatcacccaacttcctgaccagatttggcaaaaatatcatgcttagctaattccaaatatcaaaccttacatcagaatacaaaaattctatacactttgaaggaattttttaaaaaaagattcactatagagtgtaaggaaaaaagaaaagattcactattgattcagtagacaaattccaaagacaagaactacaaatattttgagtaatgacagtcatttttgaaataagtgtacgggtccttcaaggaatagctcaaataaactactccacaaagctttctatgacctttctaccctttcccctaggttagaagtaattttgtttttctttggatataaaccttgatataccttgtacctttctgattatagtaactcctttacctttcagcaaaattgtgattttccttctaaactgtaaaatcattatatatccccctttatcagttaactaagtgcctcaaatttattatttcattccatcaatatttatttcaagcactgacaatacagcagtgaaaacaatagtctgccagaaaagaaggtctgtaaatgtggtccttggttcagtggcatcagcatcaccaggaaacatcttagaaattaaaagtttggggccctactccaaatctattgcatcagaaacagagaaatctttgaacaagttttccaggtaattctaatgcaagc

SEQ ID NO: 6022 - DNA, 1062 bp, Homo sapiens
tatatttatttgttttatattatgttgatacttattaagtatctactgttttataagtgtctttacatggaaaatttattcatcttttgcaataaccttatgatctaaacagagctgtgcctattttatgtattacaccaacattcagagaggcaaaatatttcacctctatggcaaagaaagcatttaaacctagtttatctctggctctaaggcatctattcttactggaaaaccatagtttgttttcatggaacaagtagagcagtaagaaagcatacaaatacatatatttatatttagaattctatctacatttttcaatgttgatagtcaaggattataaaagcatttatagatacaagagagagttatctcactgctaaaggactgattaaatgttaaatctcagtctcgcagaaaagttcataatccatgtaaaataaacaggtagaattcttctgcctacttgatctctctccaagtggaaggatttacccaaatgaacgtgttctctgtggctcatccagccctttgtttagaagttttctttcatgaaagtatgataacatcaggttttggctcttttatcttcttttgttattgagaaaattatgttaacctgtttaaactgaatttgatgtttttgtcataagtggtcaccataccactttctgtctgaaaggtagatatgtcaaggtattataataatcctgattaattgagtttattgcagcactgttcacaataagaaagacttggaatcaacccaaatgcccatgaatgatagactggataaagaaaatgtggcacatatacaccatggaatactatgcagccataaaaaggacgagttcatgtcttttgcagggacatggatgaagctggaaaccatcattctcagcaaactaatacacgaatagaaaaccaaacaccacatgttctcactcataagtgggaattgaacaacaagagcacatgaacacagggaagagaacatcacacaacagggcctgtcagtgggtaggaggctaggggagggatagcattaggagaaatgcc

SEQ ID NO: 6023 - DNA, 1079 bp, Homo sapiens
aaaaagtgttatataagtatcagctattgtaattacagagtgacaaataaaaggtcggagtgctatggttatggaatagaatgatgagaaaggaaacttccaggagcttaggtgtactttaagtgcaggtatcaaatattgatgcttcattatggcaagggggctaacaagttgccagtgtgtcacaagtcaacatgcaggcaaagatggaaacattttccagatctaaaatgtagttaaatatgttgtactttggaatcgtatatgaactttattcccctttcagaattacaaatctcttagaaagccattttatttctttctgaaactaagttatgatcatctactatttagcacagaaataaaagggagggataaaatctaccaacccagcaaagacacatcttgctttgcatatcttgaggaaggccatcagcaaaatggaaagatgactctctgttgattactctatgttgagaaccttaagattcagatggtataggattccagctaggcagttgtgaactgtccatttgtcttatgcaagaaagtctcttcagctttctgaacttttctgtatttcacatactcattctagttcatgctcatgttcaaagcttggctagaatagcatgaaaaagtttccaaagtaaactcagcataactcaaacatttttctagggtttattatctctagtggaaaggtgaaaagatagcttgccttttatttttaaacactttacctgagtgataaaataacccaaaagccactgtcaagaatgagaaaaattgactgggcacggtggctcacacctataatcccagcactttgggaggccaaggcgggctcaggagttcgagaccagcctgaccaacatggtgaaaccctgtctctactaaaaatacaaaaattagctgggcatagtggcgggcacctgtaatcccagctgctcaggaggctgaggcaggagaattgcttgaacccaggaggcggagtttgcagtgagccgaggtcatgcaactgcactccagcctgggcaacagagtgagactccatctcaaaaaaaaaaaaaaaaaaa

SEQ ID NO: 6024 - DNA, 1048 bp, Homo sapiens
gaaatggaaaccacgcaaaaacaaattgctcacttccagacagattagctatctttatgtattgtttgctacatgtgtttcttttatgaagaatactttctagggtcaatgtggagaagtgaaaattccttgcgcagagttcagtttctaagtccttggtttagaactgaaatcaggaattgtcatttgagcttgatgtatgttttatttatgggtaatgcattaggatttattaacaaggagtaaatggtaattttctatgccaattagttttgccttttgtgggaagaaatggattttcctcatcttaatgtgtgaaactctacagtatcctgtttttcatggttcccagaagggaatgaggacatttggataccaataattgaggaatcatgccttaaagaaacacaagaaatatacaggcattcctcagtatttgtggggggattattccaagactgtccttggataccaaatccactcaagtccctgatataaaatggcataaatttgcccataacttatgccaacccttctgtatactttaaattatctcgagtagttataatacctaatacaaaatgtaaatagttgttatactgcattatttaggaataatgacaagggaaagtctatatgtgtttggtacagaggcaatttttttttcaaatgttttctatccctggttgtgtaacccatggatatggggcagggggcctgactgcatatatatatatatatatatatatatgtatatttatttatttatttatttatttttccctccaactttaagttgtcttttttttttttttttttttttggagtgcacgactcactgcagcctcgaccttctgggctcccacaatgctcccacctcagcctcctgagtaactaggaccacaggtgtgtgccactatgcccagctaatttttgtatttttgtagctatggggttttgccatgttggccaggcaggtctccaactcctgggctcgaacgatccacctgccttggcttcctgaagtgctgagattactgccgtgagt

SEQ ID NO: 6025 - DNA, 1093 bp, Homo sapiens
tcagcttacatattattaactagattattaacaacttttaaagattatttacaaacaggtatatttgaagtttattatcaagtacactttcagcctaaaaaccaccacaaatttgaccactgtgtacctaaaggaactactatttgaataaagaagtctgggagccttctggctaccttgagaaatcagttatggtcttttcatcttcccccactcccacattcttcccctgccaattgtttttccatatagctactgcttcacatgcccactagacactgatgtagctcaaacgctttcttaccgttcatggtatgattctaaagagcgtgtctctgcttcttcttgttctttcaacccatccttcttgaaaatgcctattatctactcaaaacagattggagagagttaaagcactgattttgttgttgcctggtttattgctttcaatctaattgagagacgttaaatggcagggagtcacattgttgtatttcccattacataaaggggtaggtttcactggtgtcgaaggaatgactggatgttgtcggacagggactctcactgcagttcattgactgttgcttgcctggtttgtgcaagtcatctacagagctattagaaaagtttctggttcctgccctgatctcaagaaatctggacttctggtctggtagggagcctaggactctatatttttatttatttatttatttatttatttatttattaattattattattattattattattattattattattttctgagatggagtttcactcttgttgcccaggctggagtgcaatggcaccatctcggctcactgcaaccttcatctcccaggttcaagcgattctcctgcctcagcctcctgagtagctgggattacaggcacatgccaccacgcctggctaatttttttttgtttgtttgttttttgttttagtagagacagggttttgccatgttggccaggctggtctcgaactcctgacgcccacctccacctcccaaagtgctgggattacaggcatgagtcactgcacccggctgaattctgtattttttaaaagctcccaggat

SEQ ID NO: 6026 - DNA, 1026 bp, Homo sapiens
tagggacctgccaccacatccagctaatttttttgtatttttagtagagagagggtttcacaatgttggccaggctagtctcgaactcctgacctcaagtgatcagcctgccttggcctcccaaagtgctggggttacaggtgtgagccaccgctcccagcccctcagtggcctactttaaaaagaagtaagaaataatgagtatagataagactggaacaaattatagataaaaggctttgaaggtagtttgccctaggatcattgaggaaatatgtaatgctttcaatactaagggaagacactactttacaattttgtttaaaataatgtagagttgagttgtccaatatggtagcagctagccacaagtggttactgagcacttgaaatgtgactagtctgaattgagatgtgttataagtataaaatgcatactggatttcaaaaatttaattagaaaaaaagtaaaataacttctaatacttgttatggtgactatattttaaaatgatatgttctggatatattgtgttaaaaaaattacaattaatttcacctgtttctcctttttatatggctaatagaaaagataaaattaaacctttggcttatattgtttttctgttgggtagcactactataaaaagtgtcagtctcttatttttagttgtatgctacctgagtctatcagttgcagcctaggagataaccgagaaactcagatggtaattttgatctggcatttgttcctttatatgtaagttttgtagatactactgtttactctgcaactgtctataaattcaaagtaaagtagcgtgctaagaaaattacacaatttatcacatatgaagttttcaaaagcctaggatgtaggaaacagtctagaaaaaaaaatttaaactatgtgcttatgtgatattattgtttaattgtccgtgtacgtacagtctattactgcagttatttctcaacagactgttccaatggtgggtggagagtaaaattgacagttcttctaat

SEQ ID NO: 6027 - DNA, 1050 bp, Homo sapiens
ggttatataggaagcatatatataacttttatagatagtgctatataattttgcacagtggttgaactaatttatgctcctaaaaaatataaaaaaagaggtttgttccagatcctaacagtatttagtattgtcaatcttaatttatttggttaaaatattttaatcaaataaaataccacatagtctgcaaatattttgagtgtacaccccattaacaatatttttagcacgttgacctatatatttatatttagcacattgacctatatatattttagcacattgacctgtattgacctatatatattgaccttatatatttaagacattaaatacttaaatgtctgaactaatacatatacaaaataagatttatgaaaagataagatattaaatagaattgagagcccagaaataaactcatgcatatggtcagttgatcttcagggaatctttatgcactgttgatgggaatgtaaattgttacagtcattatggaaaacagtatggagcttcctcaaaaaattaaaaatagaactaccatatgttcaagtaatcccatttctgaatacatagccagaggaaatcaaatcagtatggtgaagagatatctgcactccatatttactacagtgtattcacaatagacagggcatggaattaatctgtgtccatctacaagatgaatgaataaagaatatgtatatatatacacacatatatatatacacacatatatataacatatgtatgtatgtcatatgtatatatgtatatatacatatgtcatttatgtgtgtgtatatggtgtgtgtatttatatgtgtgtatacacacacaatgaaatattattgagccttaaaaagagaaaatactgccattcgcaacatggatgagcattgaggacattgtgctaagtgagataaagccaggcacagaaagataaatactgcataatcctacttaagtgtagaaactaaaaaaagtagaactcctaaaaacaagagcgtgaactgggggtttatagggctaggaattggggaaata

SEQ ID NO: 6028 - DNA, 1044 bp, Homo sapiens
atgaaatctcactctgttgcccaggctggagtgtagtggtgcgatctcagctcactgcaaccttcatcgccccgtttcaagagatttttgtgcctcagtctcccgagtagctgggattacgggtgtgtgcctccatacctgattaatttttgtatttttagtagagacagggttttgccatattggccaggctggtcttgaacgcctgacctcaggtgatccgcccgccttggcctcacaaagtgctgggattacaggcgtgagccacggcgcccacccaatttctattttagatacaggggtacatgaacaggtttgttacacgaggatattgcatgatgctgagctttagggaatggatcttgtcacccaggtagtgagcataagtatccaataagtagtttttcaacccccacgccctatcctcctctagtagttcacagtgtctgttgtcctcatttttatgtccatgtgcactcaatgtttagctgtcacttataagtgagaacatgtagtaatttaatgaacctttttctctttcctttatataacatactagaacaatttcctttgtatagtgaatcactccttcttcaagaacaaatgagagttttctctagtctctttgaaaagttgtgtatacttacaggtatagagtttcttggtcaaaaatctgtccagaccaaacacagtaatctcaatattttcctaggctgtgttttgaaagacaagttcaagtaatttacttgactttctaagtgttcactgttattgtcactgtagtatactctacttatcccatatttgactcaaatcgagacaataaatattagagattattttaggactcagatttattttgatagagaagccatttttagtttgtaaaataggagttttaggtgcaagtatggaacagaaaactctgactttataaactggttgcattaatctctatactatcccatatagtactgtgaaaatatgtatttgaattaattgaatgtatttgagtctattctgagagtctaggatgtacctggg

SEQ ID NO: 6029 - DNA, 1050 bp, Homo sapiens
ctaacaggcacttgagttttctacccttgagctaattcaaccttctcattgactagatgtgaaactgggttagtttaacagactttggaaacaaggtatgaaggagggaaaaaacaggagcagtagttatacaacaaaatagttgcataacttatataaactataataattataagactataaaaatatttatgggagtaagatacttttaaacaagatgggatattttttcctgccccctccccaccacaccccccaccaaaaataaccgttttctattttttctgttcatgtagtgtcacattgattctatatcgttacccacagtgccacctattggtaaaataaagacgacgtaaccagtttttctgtaacccatatttggtaccagagtcttaagaaatctgccctggattttcgcaggcagatgttagaaagcagattgtctgtgatccaactgaaatgggagatgaatcacgtgttttatgcagagatgctcaagcttgtcatttagaagaactccaaataggatctcaaaagcatgatatccgacttccccagttcgtggttctgccaacaaagagcctgtgaaactgcttagggattctaagaatttagattgttcccacatattgggatgcaaattgttttatatgccatgctactcaggcgtgattgttgctttttagcgacagcaagttgaagtattgagctcatttgatatgtgttctgccagtcttcatgttatcacacaggctattaagtgccaaaaaaggcattagtttcactgaatatatttaatttttaaaagttagttttataaggttagtgaatgtaattttctctttcttcattataagcttttctagagaaggatattatttctacagaactaacataataccaaatacagttgtcttgatattgtggggggaggattggtttcaggatccccttaaatactaaaatccatgcatgctcaagtcccacagtgggttctgctgaaccacagatatgaaaagttgaccctcgtgtccacgggttttgcat

SEQ ID NO: 6030 - DNA, 1027 bp, Homo sapiens
gctctatgtttatattaatatcttcaaaatgtttgaggctacaaggaatttaatcggtgagatgagtgggggaaatgtgaattattatggagtaggtttatcttaactattttgtgtggaaaacagaagctgagaaatctttctagtttgagtttatcaagaaaggctggatgctctcagtgtagttttgtcatttatcatagtagaaatgtacacctgcttatttattttatgttttggcacaaactttttttttgcaatgaattctttctgtagcaaaaaggtaaaaaaaattaactggcggatttctaaaaatttgataatgaatgtgtaacttgcatacagcattcattagtatttactatttactgtggatgtattgaaatcactagctacatggcaacgaggagacccaaatctgctgaagattcaaaaataggcagttgaattctccacttcaaaagttgatagttattttaagaagactgttcattaagatgatgatttagcacgtgctaaagaagcacatgctaaagctacaaaagatgtgtttttatattactgtgaagcagttttcatttagatctagtgtcttattttaaattaatttcattcatttttatttttatttatttattattattttttaagagagagtcttgctctgtcacccaggctagagtgcagtggcaagatcctgggtcactgcaacttttacctcctgggttcaagtgattcttcctgcctcagccacccgagtagctgggaccaccatgcccggctaatttttgtatttttagtagagatggggtttcaccatgttggccaggctggtctcgaactcctagcctcaagagatccacccactccagcctccccacatgctgggattacaggcgtgaggcactgcgccagcctcacttatttttaagtttccttgtgcacataagaaaaattaggtaaaatcttcaaaacactgtcccttctggcaaaagataaactttgcaaacattcaaatgattctgat

SEQ ID NO: 6031 - DNA, 1029 bp, Homo sapiens
ggctgaggcaggcagatcacgaggtcaagagttcgagaccagcctgaccaatatggtgaaactctgtgtctactgaaaatacaaaaaaattagctgggtgtggtggcaggtgcttataatcccagctactcaggaggctgaggcaggataatcgcttaaatccaggaggcggaggttgcagtgagccaagatcatgccactgcactccagcctgagcgacagagcaaaactccatcaaaaaaaaaaaaaaaaagaaaaaagaaaaaaatagtaataattaaaaattgttcatcccaaattatgaaaacagaatctgcacttcaatgagaacactagataactcatacatataataaaatttgagaggtattttctaaagtagtggtttttaaagaactgttgtgtgaaatcactttaatgattctaaaacagcagcaatgacaataaaatggattaaaatagaatacatagaaaatatcagggtatgattaaaaaacatggtaaatgttaacattggtttgggaatttttcagtaatatttgtgtgtgctcaattatgatataaagtaaatttcttacttgggtaaaaatggttggtaaatctcatctagacaatttttcagtagcaaatgcaaaaccaggctgaagaagtctactcaatttctggcatctcttgtcaatcctgccttcatttctccctagaaatcttaatcatcatcatgcctcataactttgtgagaaagaaaaggtggaactgtgattcattcaagtgagattcacacaaaacccatcagagtacagataaaagtactacccattggtctaaagtagaatttctaagtcttttctgagaattattcctcagagaataaggatatataactcaagccttttccctgtaattttggagtttctttgaaaccactttattttcctttaaaatttatgcaaagtcatatgaaagaacttttacaaatcaataagaaaaagacaatcctatagaaaaatagcaaaaagtctcaaagtgtta

SEQ ID NO: 6032 - DNA, 1024 bp, Homo sapiens
ttgtcaaaatattttgagcactccaatataaaagaataaatgttaagagttttattcactgtctttacagctatatgagtaattacttcagtctactgttgataaaaatgttgatatatctatcttttgttaatggatcaagttgctcttgttatacagtgaactgaatggctctttacctcttacacaatctcacaggaacacttcatcctaatgtacacttcattttattatagcaccttgtcatgtgcagtaaaaatattcattttgtcatagagttgctgattgagtgttcagccttgaaaaaatatttgctattaaaatgaactgtgcaagtcagtcttaaaaattaagtactatttcacacatgcaataacacagtttgtaggcatccaggaatccactatctagatataacgcattttaccattttgccaatttgctgcagatctttgttaaattaaattaaatgaagttatatctacagattctttcaaagctttctgtttcctgtcttattctccataaatgtcttctctcttcttccctccctccaagtacaattctcctgaagttagtgcatgtttttacaattatgttcttacccttttatgatatgtatgagcatgtgtaataatatgtttcatatgtttaacattttttacataaatggtcctatactttgtgtgtatatatatataatcttttgcatttactttttgcacatcttatatttgggatcagatagtttaaaagtattctgtttgataaatatgcaataattaacttaaccattcccatattatcagttgttaaccactgtgtgctattgcagcaatgctgttcttgagctgagtggttattgcactgcggtcatacctctggtcatatactgaaggtgagattgctatgctgaatcatgtcaaatccaccttatttctttactagctcttacctgatggctaagaagtgtaccaatttatacttataacacgtggtaaatggaagttctcatttccctaca

SEQ ID NO: 6033 - DNA, 1004 bp, Homo sapiens
gatttctctgtgaatgttttgtatttctccttgtagagatttttcacctcactagttagctgtattcctaggcgttttatttttttactgtcatttggggatgggactgcattcctgatttggctcccaggttgactgttgttcatgtacaaaaatgctagtgattttttgtatgttgattttgtttcctgagactttgctgaagttgttcattagatcaaggagatttgggctgagactatgggttttctaggtataggattatgtcatctgcaaacaaggatagcttgacttcctttctttctatttggatgtgctttatttctttctcttgcctgattgctctggccaggtcttctgatattatgttgaattggagtggtgagagacagcatctttgtcttgtgctggttttcaaagggaatgtttttagctttttcccattcagcataatgttgtctgcgggattgtcatagatggctcttattgttttgaggtatgttccttcagtgcctagtttattgagagttttgaacgtgaagagatatttaattttatccaaaggcttttcagcatctattgagatcatgtagtttttgtctcttgttctatttatatgatgaatcacagttattgatttgcatatgttgaaccaaccttgaatcttagggataaagcctacttgaatgtgatggatacgctttttgatgtgctgctggatttggtttgacagtattttgttgaggatttttgcttcaatattcatcatggatattggtctgttttttttttttttttttttttttctgttttgtctctgccaggttttggtatcaggatgacgctggcctcatagaatgagttagggaggggtccttcctttcaatttttggaaatagtttcagtaggaatggtatcaactctcaactcttctcctttgtatatctgatagagttcaactctgaatccatctggtcctgggcttttttttttttttttttttt

SEQ ID NO: 6034 - DNA, 1042 bp, Homo sapiens
gactctgtctcaataaataaataaataaatagcaaaaaataaaaaaaagaatatttaatactggcccccaatctcttctggcttgtagggttctgctgagtggtcccctgttagtcttatgggcttccttttgtcgcttatctgacatttttctttagctgcctcaagagttttttctttcatttcaaccttggagaatctgatgactgtgtgtcttggggatgatcttctcgtgaagtattttagtgaggttatctgcatttccagaatttgaatgttggcctctctagctgggttggagaagttctcatggatgatatcctaaaacatgttttccaagttgcttacactctccctgtctccttcagggacaccagtgagttgtggatttggtctctttccatgatctcatatatcttagaggttttattcattcctttttatttttttctctatttttgtctgactgtcttatttcagagagccagtcttaaagctctgagattttttcctcagcttggtctattctgctattaatacttgtgattgcattataaaattcttgtagcatgttttcagctctatcaggttgattacattcttttctatactggctattttgtctgtcagctcctgtatcattttattgtgatttgtatcttccttggattgagtttcagtgtattcctgcatctcaatgatgttcattcctatccatattctgaattttatttctgtcatttcagccacctcatcctggttcacaacttttgccggaggggtagcgcagtcatttgaaggaaagaagacactcaggctttctgagttgtcagagttcttgagctggttctttcttatctttatgggctgatgtttcttcatgctttgaagtcgctgacgttttgatttattttcttttatcctatttgatgacctcgactgtttgatggtgctataaggtgggttcagccaactggctttatttctggagtattttaggggacaaacactcagctcccaactcctggattgtgttctgtaa

SEQ ID NO: 6035 - DNA, 1065 bp, Homo sapiens
acaccgtctctactaaaaaatacaaaaaattagccgggcacgtggtggcgcatgcctgtagtcccagctactcaggaggctttgacaggagaatcgcttgaacccgggcagtggaggttgcagtgagctgagatagcaccatggcactccagcctaggtgacagagtgagactccatctcaaaaaaaaaaaaaaaaaaaaaaaaaaaagataacctacagaatgggaaaaatatctgcaatccacatatcagatgagggattaatatccaaaatgtataaacaactcaactcaatagtaataaagcaaataacctgattaaagaatgggcaaaaggcctgaataaccatttctcaatagaagacctaaaattagccaaaaggtatatgaaatgaatgcttaactactaattactaataatcagagaaatgaaattcaaagcataatgaaacatcacctcccaactgctagactggctgttatcaaaaagatgatgataataagtattggcaaagatgcatagaaaagggaacccttggacactgtttgtgagaatgtaaattagtacatccattgtgaaaaaaagtatggaagttcctcaaaaaattagaaatggaacccccatataatataacaatcttagtactgagtatatatccaaaggaaacgaaatcagtatttcaaggagatatctgcactcccatgtacattgtggcataattcataatagccaagatatagaatcaacctgaatgttcatcaagggatgaatgaagaaagaaaatgtggcatatatacaaaattcagccataaaaaaggagaaattctgttatttgtgataaaatgaaggagcctgaaggttattaagtgaaataagcctggcacagaaaaaagtaccatatgacttcactcagatgtggaacctaaaagagttgatctcatgaaaatagagagcaagaatgttgattaccagaggctgggatgcttggggggtagagggcatgatggaaagatgttggtcaatggatccaaaattttagttagataagagaaataaagctgggcg

SEQ ID NO: 6036 - DNA, 1047 bp, Homo sapiens
agacccacctcatatacaataacattcttaggctccaaataacaggatgaagaaaaatatacaaagcaaagaaaacacagaataaagcagagattgtaactgtaatttcacacaaaatagactttaaaccaacaaagaccaaaaagacagtgaacagcattatataatggtaaagggctgaattcaacaagaagacctaactatctaaatatatgtgcacccaatataggaacacccagattcacaaagcacattcttagagacttatgaagagatgtgaattcctgcacaacaatagtggaagtcttcaacactccactgacagtattaaacatatcatggaggcagaaaattaacaaaaatattcaggacttgaactcaatacttgcccaaatggacctaatagacatctacagaactctccacctaaaagcaacagaatatacattcttttcatcacatggtacatattctaaaatggtacacactctaaaatcagacataaaatagtactcagcaaatgtggaaaaacaaaaatcacaccaaacacagtcttgggctacagtgcagtaaaaattgaaatcaataccaagaaaatccctcaaaataacacaattacatggaaattaaacaatctgctcctgtatgacttttggaaaataatgtaattaaggcagaaatcaagaaaatctttgaaactaataagaacaaagatacaacataccagaatctctgggacacagctaaatcagtattaagagagaagtttctagtactaaacacccatatcaaaaagttagaaagatctcaaattaacaacctaacattactagcagaagaactggagaagcaagagcaaaccaacctcaaagctagcagaagacaagaaataatcaaaatcagagctgaactgaaggaaattgaaacgtgtaaaaccacataatacatcaacagatgtaggtgttggttttttgaaaaaattaataagatagacgactagttagactaataaagagaagaagagagaagattcaaataagcaccatt

SEQ ID NO: 6037 - DNA, 1208 bp, Homo sapiens
ccattcatgactgctacataaagaataaaatacctaagaatacagctaaccaggaaggtgaaagatctctacaatggtaattacaaaacactgctcaaacaaatcagaaatggcataaacaaatggaaaaacatttcatgcctagggataggaagaataacatcattaaaatggccatactgcccaaaggaagtgtacagattcaatgctatttctatcaaactaccaatgacattcttcacagaattagaaaaactattttaaaattcatatggaaccaaaaaaagaggccacataggcaaggcaatcataaggaaaaagaacaaatctggaggcataacatactcaacttcaaactgtagtacaggcaacagtaaccaaaacagcatagtactggttcataaacaaataaatagaacagtggaacagagtagacagcacagaagtaatgttgcacacctacaaccatctgatgtttgactgagatgatgaaaacaagcaatggggaaaggactccctattcaataaatggtgctgggataactggctagccatatatggaagattgaaactggacctctagcttccatcttatatcaaaaatcaactcaagattgattaaaaagttaaatgtaaaacctaaaactataaaactcatggaagataacctaggaagtagcattctggacaaaagaatgggcaaagatttcatgacaaagacacaaaaagcaattgcaaaaaaatcaaaaattggcaactggtatctaattaaactaaacagcttctccacagcaaaatagactatcaacagagtaaacacacagcttacagagtaggagaaaatacttgcaaactatgcatctgacaaatgtctaatttccagaatctgtaaggaactttataagcaaaaacaacaaacaatcacattaaaaagtgggcaaaggacataaacagacacttctcaaaagaaaacaaaggatataaacagacacttttcaaaagaaaacatgcatgcagccaatacgcatataaaaaatgctcaagatcactaatcattacttaaaccaggggtgttgaaaaactaactgctgagtactatactcatcatctgggtgataggatctttcatatttcaaacttcagtgtcatgtaatacacccatgtaacaaacctgcacatgaacaccctgaatgtaaaataaaagttaa

SEQ ID NO: 6038 - DNA, 1028 bp, Homo sapiens
attttacacattaatttgagaagatctggaggcaagtttttattctgcccaagaaatgtggggaagtgttggatgtaaataaatagagtgtcccgagtggaagatgagatgtagcgcttaaatagaaaatctctatagtatgagagatgcgtaattcctcatacataattcccgattatcccagatgtccagtaggttgggacagggtggtgatggtatgaggaaggaaaattagaaaaagtgttccaggatttatttattcttttgatatcttggttaatttgtggatgatgatatgaggaacaaaaattttcttttagaggataggaaggagagcatattaaaattatagcctgaatgaagttatctgttatccaagaaaacagttcatagcagaacaaatcctttcgacaatggtttttccatgagtgagaaatggcccatttatgacaacttttgtgcactgaaaaatattgctgcactacttctgtgatgaaatctgtggtgaccatggattggagatcagagtgagaagaacttctggtttacagatgtgatagctaactggctccagaatagattttacctaaaaccttatattccaaaccaccaaaatctaaggatagcaatggtgagaattttatgctgttatgaatagctttcagtcgttcttggcatctctagataatctaggaccagtcatatctaatggacagagctttaacaaacacaaaagtccacagtcaagaaatgtcttgctggttgcctaccttactagcatggtttttgattaatcaagctgtttgatgattcagttctacatgaaaaggtcttgcctttggagtaaatctgggatattagggagaggtaagaatttcctttgaggaactgactgattttggccccaaaaaggcagatcccaatattttaaataatgttcttcatcttaatataggactcttcttctgagatatatcttctgaaagaataaggtacaaaccatgacccaagatcatattgattaatct

SEQ ID NO: 6039 - DNA, 1031 bp, Homo sapiens
tgatatactaaattcctcattttctttaagtcttggttcaaatatcactctctcaatgagaactactctgacaccttatttaattctgctcccttctcccacatgcccagtgcccttatccctaattattttatcctggtctctatattgtttccatagtacttatactttgatatattatgtaatatgtttatttattttagttgttcattttcacctcctaactgtgccctccctgaaccaccaaacatatgcaaaatagaatgtaagcaccatgagggttgaaggcagggatctttgtctcctttgtttattgttaggtcccaaatttctataaccatgcctaacagtagccatttaataaatatgctttaacaatattaagtgaatttatgtatttaatattgagccagttgctagatgcagaaatgaaatctacagccccatcatcctaaggagtgtgtagcctagaaacaaagacaagcaaacaaatggcatctattgattgcatatgatctgtgagtactttggagatacattgttgagcaaaacccaaggaggttatagctttcatgttgctcaaatttagctagtgatcaggtttactacgaatgtaatgtactttctaactagtgatacgttagtgatatgttagccttgatatgcaaggtgctgtgggaccatagctgtgagtggttgaagtagtcagagagtgattccccagacaggtagccctgggaagtgagcagtctgtaaggcaggcaattaagtgaggagtctgtgaacaaggagtctgggggagagcattccagagggagcaacatctgtacttagaggctgtagggtctctgtatctattcccaatttagtgccttacttcttggctcctgtcactgatacgttttgtactctctggtgctacatcttctaagaattcctctttaaacaaaggtctcagactgtaggctttagatgtgtttttgtaatcaacctaatgtttataagcgttaaaaccaaaatttaaacatcta

SEQ ID NO: 6040 - DNA, 1217 bp, Homo sapiens
tttgttattgggacagtctaggaagtagagaccaagaactagcccagagtaaatgcagtgtgatagagcataaaaattatgaaattaggaggaaatgtcaagcatgagattgtagggcattgcaagtagcaatctctgaaactgagatatctctagatatcagggaagtctgggttaccatgtttcaagtttttgacctccccaaactatagtcacctgatatattcatgccatatatttaaaaatgtaccaagactctcaccataattggggagcaactcataagatcaaggttgatcccaaggtccataaataataaagtagcaaatatattactgaagaggattagacacagagaaaaacgtcactggagttggcaaactaaagactattccttgacacccagactggagcctaagtattaaaactgggtatgttttaatagatttggcattagagctagactaggcaatttttatatttatttatagagaaagataacaaggaatgtctgattcctgtgtcaggtactgggatactgagatgaacaagacacaaattcaaaataggtttgaaaactgaatatatgtatagaaccagctcaattagagacaaattggtgtctgtattaaaatggttttttgttcctttaccagtactagtaggaaaacctcagtgccttccacatgtagcctctgtttagaactcgtttgtaactctttagccacaacagcatcagtccccaaggatacagcttctgatgctggtctctatctcaatctcctcccagccgcattgcttacggtgagtttgtgtcttcctccatttcctgttactgcgtttattcagatattcaactccaagttccaggggcaaagaaacagaaatactgaatccatgctctgggataggaagatcacacagtgaaccagccatgcaggaacctgcatggccattggaacccagagtgccaaatgggatagaaatatgtggagaaaatagtatttatgtaactcttctcagggaggtgctattggtgtttctgataagcaacttgggattggggggtaaagctcaccaaggtgcatactcaaggtagaataggtgatcactaaactgcctggtaggttgcattaagtgtgggagttttatcttctgagtggggtctccaggcatgactctattatagaactacatgactcggacaaggggttggc

SEQ ID NO: 6041 - DNA, 1058 bp, Homo sapiens
gtaaatcaggacctaggtctgcattgtttagtaacatcttctgaaatgcctcagggtcagctagcttctagcaaacaggaagtttctaaatgcacacttgagtacacaggggttgctgttttgaacatgctgactgaaatttggggctatcttattggtgtgttttttttttttttggttttgtttttttttttgcctgacattttcaagtgaagattctagtattcccataatcttatcaacaatttacttaagacaacttggtcttgatctaagcaattctcagggaaatgatcctggaaaattgttttcccctatggaacgaattcaagtgagcaatatcctcttccaaaatgggaacgatatgtcaattaaatagacaaaacactgagaatggcattgtgaaatagccctcaaaccagaattagaacttgctgactatctgcagggtgagtggtcagaaggcagccccattttctcagcaataaaaaatattttctattttattgcagggcaaaatataggggacgaaaatatttctgcagttggccctgaactaatatgctggctttcagtctttcaagagctgtttttgttttaaattctagtacatgtaatcagactaggcagaagtatacaatggtttctaaggccaccaatgctgatagattaatacttcagcaggatttgtgactgcagagaatatcaaaatccaatgctctttcaagtgcagtgagactgattcagttgcttttttaaaaaaaaatgattttcaggacaaaactactcggccttgaatagaagtatttttcttttatcaaaatttttttttttttttttttttttttttgagacggagtctcgctctgtcgcccaggtcggactgcggactgcagtggcgcaatctcggctcactgcaagctccgcttcccgggttcacgccattctcctgcctcagcctcccgagtagctgggactacaggcgcccgccaccgcgcccggctaattttttgtatttttagtagaggcggggtttcaccttgttagccaggatggtc

SEQ ID NO: 6042 - DNA, 1049 bp, Homo sapiens
cttatcaagatgtgattaccgtacttcaaattttaaaaaaccaaagagatagtataaaactatagcattaaaaataattgcattatatgggttgtgtctctattgctcatgtttttggctatttatttcattcataagccacactaggaaatcataaaaattaagtaaaaatgcttcctcctccaagaagcacacatattcccagcgacatgtatttccaaataatgaagcacatatattcctagataatgttcaaaaatagtatgaccaaaggcaagacatatctgctttatatgattttatttttatctacattgttatatcaatgcatctttatttttaattgatatatataactgttcatatgtacggggtatataatgatgttccaatacatataatgtatagtgatctgatcagggcgattagcatattcatcatctcaaacatttatgatttctctgtgttgggaacattcaatatcaccctttagctatttgaaactatcattaactgtgtcatcctacaatgatatagaacattagaatatattcctcctatctagctgcaattctgtgtcctttaacaactctccttgtccgccattttctcctaatttttccagctcctagtttcctttgtttgactttttaattctatgtgatcaattttgttttcagcctccacatatgagtgagaacatgcagtgtacaactttctgtttctggcttatttcacttaacataatgtccttcagttccatctatatcgccacaaacaacagaattccattttcatgactgaataatattctattttgtatatataccacattttctatatccattcatctgtttttgaatccatatcaacacccaggttgattccatatcttggctattgtgaatagtactgcaataaacatggggagacagatgtctcttcaatatactgatttccttttctttggttaaatgcccagtagtgggattgctggatcatatagtcattttctttttagtttttttcgtggaacttcatactgttct

SEQ ID NO: 6043 - DNA, 1038 bp, Homo sapiens
ctaattttctctatatcacaaagcggcagcaccatccatccccttctccctcatcacccatctcaaatccatcagcaaatatgcatgcctgttccttctaggagtccctggctgccaccacctattcataccaacactctctctcacctgaaccaccacgttaattcccagttgacctcccctccctgtgaccctctcctcagcaacaatccatctttagcaacgtatcttgagtaaccatttgcaaatcagaaatctgatgattgtacacatactagctgcaatcttagccaagttaatgcggtaccttaagattccatttcctcttctgtaaatggaaggagcaattatccatgcttctgatttgatgtgaagattaaatggctaatgttaaacatttagatgatgcctattctgcaatccctatttgatgaactagggcccataagatggtagctactatcatcattagtattgtcatcatcattgtcactctcctaattaaaacggattgctgttagaataaaatcaaaacgtgtcatctcttaggtcttgcagaagctatctgcctctccttgcctgccttatgtttgaagcttgttaagtctcggccactagatcttattttagtttctcatgcactccaacctctccaggaccgtcacagctgcaccctcctattcctgtcactggattcttaatgtaaatgtcacttcctcagagaagccttccctgaccactcatttaaaaaatattttccacaaactcacaccctatgcaatcatagaattctgctcgtttcttttataacaattctcacggtaggttatttgttaatgcctttatttctatatttttattagaatatagcttccaggagaaagataagcatgcctcctccatcactgtgtgcaaatattggtcttctataaacatttatggaataaaacaaagaaaaatgaaatctcagagatatctgctaattttattcaaattctgatacagtcatttaaattcatcaaactctaagtggtcaat

SEQ ID NO: 6044 - DNA, 1049 bp, Homo sapiens
ttcctttttatagcatccacaatattatagaagtagcttctcaaatccttactcatctacttgttagcactgaggtgggttgcagtcggaacaaagaaaacactttgtttgatacataacacttttatttagttttcacaggtaatctgtcaggatatccccatatgatagatgaggaaatgaaagcagagagagtttgagtaatttgtccaagagaacaagcaaaaaaacaaaaaaaaaggttgagattgaaaaaaaattagtcaaatgtcacactagtcacactctcaaccagtgcattagcctgtacacctaggagattaggacagtcttcaaaggaagacaaatctgaggaacatgcataactatctaggctagtccttggcaagaggcagaagaaaaatatgcactcctgttctccttttttgctggctgatctctttctctactcgaaagtaatttcatagctctaaccaacttgctaaaaaatcatcatcatcatcatcatcatcatcatcatcttaaatggacacaagtggactttgtataattaatttagacaacaggaaaaataaaaagcaaactaaatgtcaccttacaattcatcatggattaggtttgttaaaatatttttataataaaacctagtatcttaggctcaacaaatacaaattgctataactgactcagagtttactttaaaaaaaatttttgtggccagccctgtaagaaggtaatagtgtggttcagccccagacctcaataggttgttatgctctgtacaatttctcaatatctttgcattcatggaattctagttgaatcagaatcaattagaaagattcagacaataataataaatagctattacaatttaaaagagacttgcaagttttttcatgatgagagttttacttttactcattgtaaaagcaaggtatgaggattgttcaaaagttaagcaattcaaaaagtaaaaagaagtaaaaatcaactaaaaatctccctaaggaaaaatcattgttaacgtattgatgaacacatttctg

SEQ ID NO: 6045 - DNA, 1075 bp, Homo sapiens
cacgaagtcaggatcatatctcaactcttctgtaaactccacaatgcatagcatagtgttactcatgggaagaatcaaatacttgtgattgaaatgggttaacattcttctcacgttaaggaacatacttcttttattgtacctgttgttacgcagggtgtaagatttattcttttccccagagttgatatcaatactttaaaaatatgtaaaaattgaagataaatggggaaacaaacaatttatgaaggtcaaaactatgaagtaaatttcagttcatggttatttggcagaaatactaggttggagagtatggttcacatatgagaccaaattaaatattatttaatagatttatttcatacttagttgaaggaaagcaagaagtaaaaacttagcttgaccaaaaacctgacttgcttttggcaaaaattgtggtggagagagaagagagagagagagagagagagagagagagagagagagaatgaagaaagagaatgaataacctctaccctgtgagaaagtctttccattccaaatgacacaaatagagaatctaatgaatctgagtctaggaaagtcaaaaaggaagcagattggtatccaatcattgaagacaataaacctgaacactaagaagacatgactaaataaatgtcaggttctaaacaattaaactggttacttctcttacactgaagtaaacagagactggaaatctctgtctcaactctccctatcaactcaataccttggagtcgaacatagttttccaaataaaaagataatgaggcagaatatgacaccttgattactaaatgttctagttcatattgaatatttccatctgaacttgaaagccaaggtctcggggacccatttttaatgtgcttttcaaaaaattcatattaattactttatatgtaattaacaaataattagatatgaggctcataaatgaaatatttatgttcatataatatggctaatgtatggtaacaatagtattaaatctatagatctatgatgggagatttactagaaaaacaatagtaggtctcccaacccatga

SEQ ID NO: 6046 - DNA, 1031 bp, Homo sapiens
gaatgcaagaagaatgggatttaatgactaggagagattattttcacttatcatgatgagtttcatgtagaaattcctatagtattctctttttaggtcatgaaacaaattaaccaatactaaccaattgtagttctttggatctcaggactgtttgcaatatgcaggtgccatcaaacaaatatgttatgaagtactttataattcacctaaaaagtaaagtgtaactaaaatcgacagcattaaggaagttgcgttattttagtcttttgggatattgcccccctttaagtttgtactaaagatgatgttcagcaaatgttgtggtgcatatactatgcaaagcagcattttcgcccattttgtgataggtacattagctattcagagtggctttccattagctaagaagtggattgctacagctcctggcataggaaatgttttctcaagaaagttccatggtaaataacattagaaaggaagatcatgaatctagccagaagtcatagcaaaattgtagacctgcttggaataaccacagggtaataccatgaagcagcactaaagttggagataaatctacacataatgtgtacctacttaaaaaatgtcttctgatgaggccaaaggtttgaagctgtcaggtgatatattaacttaacttgtcttctcagtcatgcaggacctgggaaagacgaaacattagtgtttattagggaattatagcaagaaagaatgataatgctacgggaaggaaaacagtataaattaatttgttaagaaaaatactaccgtggttgaaaataaaatccaaggaacacattaattagaaagtgaggataaaccggaagaggcagaaattatgctctcttacgagatgagcaaaatgcaggaataagttagataaagtctaaattattaaataaactagaaaagaagaccaagatacaagagactgagaatgatcctttatattacagttttagaagattaagctccagttttatgtaaggtactattaggtatgg

SEQ ID NO: 6047 - DNA, 1035 bp, Homo sapiens
caaccaaccaacaaaactgctatccaagtcagcttgttttaaaccagtgtgcacatggtgtatcatacataactggggagatatgtggtacttggttatttcaaatctggccagtgctctgggagaaagctgctataaagacaactaaagtttctagtgtttgtcagcctggaagtcctggtgattgcccttggggcaatgtggggacaacaatcatggaattctaagtcagacttaaaatcagatccctgatctgcccctcattatttgagatcttgaagaaattattctttctaatggttaattttatgttgcaatttgacagggctacaaggtgcccagatatttgttcagacattcttctgggtgtttctgtgagtggttttggatgagattaacatttaaatcagtagacaaagtaaagcagattaccgtccctaacatgggtgggcctcattcaatcctttaaaggcttcaataaagcaaaaatgttgtccttctccaggaagagagaattcttcctgcttgactactttgaactgaaataaggaatcttcctggatctcaagcctgcctactttcagactaaaactataacatctgctctcctgtgtctccagcttgctgactcaccctgcagatcttgtcagcctccgtaatcacgtgaaccaattcctaataatctctctccatcctatttacttttttatcatgtaaaagggagattgtccttacccttcaagcattagagataatgaatttaaatatctatcacagtatctcgcacataatatagactagcttagcctccttagcctaaaatcatgtcacttgctaaaagtagtacaatgattcagagttgtttcctacataattttaatatggagaaatgattgaacattggcaaacttgttaacctcctaaaacaattttggaaaaagaaaatttttagaacttttatgcatgagagaaaaaatgaccattttatagtaatttctacaaataattattgttggcttaaagaaagaaactgag

SEQ ID NO: 6048 - DNA, 1051 bp, Homo sapiens
ctgacaaagttttgtatgactttactttttattttgcttttaagcttggctgtaatattattactgaacctgtgacacttcacttaaaatgtcaaatcctttagtggagagagtgttatttccttgtcttaatctttttatatgccaatgattgtgccccctaggatagcaaataaaatctgtcaataaactgactgaacaatgctatccaatagaaatacaatgtgagctacattttaattttaaatttcctagtagccacgtttttaaaacgggaagtagaagcaagcaaaattaaatttaatgtgtcttatgtaattccatattcttaaccacttcagtacatagcttctcttatccacatgaactcgtatctattgtacttaaactggaagacatagagtcaaatgggtttatgggatataagtgctttgcaaactggaatgttctatacaaatgtaaagtggtgttataattaagaccttggcatatttgatcattttcactgacacattgctcaaatgtgttgattgtgcttcgcaaatctctgctccaaagtaacacatgctgagatcgtttaacattgtaaatcagtaatataactttgatcatctttgtttcatcactttgaatttctctcctccaaaaggattttgaaacattggttgtagttcataaatgctctgtcaaaagtatcattgcattgtgaagtttttatttgagataactttttgaattgacagagtcatttagttcctgtagtggttttgagtagtaaactgttcatattatgagattaaatccaagactccagttctttctagaaagaatgatacaacttaaagaagcacggtatttatgcattttgggataaatggttttccttgagatgagagcgagatagtgttctttctctaataagccacgatgtaaatttttttttaaatctttgtaattaagctcagtctttcttttgtccttgatactgtatttttctttcttcatcgcaatagaggtataaaaaaatgaggtaacctatgacagttaaaaa

SEQ ID NO: 6049 - DNA, 1029 bp, Homo sapiens
tcccagaactttgggagaccgaggcagaagaaacacttgagcccaggagtttgagaccatcctgggcaacatagtgagatcccatttattttaaaaaaaaaattaaaaaatagctcagcatcgtggcacgtgcctgtagtctcagctacttgggaggctgaggtgggaggatcacttgagcccaggaattcaagattacagtgagctgtgattgtgccactgcacttcagcttgtatgacagcaagaccctgtctcaaaagattcaagttaatgcatttatcaaacaccttctgatacaaggcatatattaaatgcagtaaggagatgctagttatgtagaaaaacaggtatcaccattatctaagaaatttaaaattaataagtgtaagaaaagtcctgtaacaactagatggatttaggaaagtaccaaacagaaaatacaatatatttaaacaggaagggagtcaaagatgggagaggccaaatttatttgggaaaatcaggaaaaactgtggagaagatggaatttgatataggttgggaagactggatagcattttgaaagacttaggggagccaggcttgtagaggaagctacggaaatgaagacactagaatatgcttggcttatttgggaaggagcagataatcctgcttttgggaatcgttcagaaacagtagaccataaagcttcatattgtagacaaccttgaaggcctgtgctgagaaatatgtacttaatgcagaagattggggaagccattgaaggtttttgagtaataggagctaatactttttttttttttttttttagacggagtctcactctgtcacccaggctggagtgcagtggtacaatctttgctcactgcaacctctgcctcccaggttcaagcaattttcctgcctcagcctcccaagtagctgggactacaggcgtgcaccaccatgcccggctaatttttgtattttttagtagagactgggtttcaccatgttggtcaggctggtctcgaacccctgacctc

SEQ ID NO: 6050 - DNA, 1070 bp, Homo sapiens
attttggcagcagtgtataggtagaaaaataggaggacagtaggtaagttaagatattgcacttaagtgagatccaaagagggtctaagctacagtgttagcagaggacattgaaaagagggatatatgacaaaaattacagggtgtttgtaccacctggcccttttgagttggtgtgatccatctatgcctacaccttcttggcctttcaagtcaagtatcacaggctccctggtctaggcaatctcttcagattcctccttctgttatccagtctggtcccagatattaagattgtctgcctggctggaacctttgggttcttatcctaaactacctctcctctggcttatatcagactcttctacacgttggacctcagctgtcctatttgatgggccttctgggaccctttcagagggagggatctagacagaaggagaatctgaacaatttggtacttttcaaattgtgaaggagtgggatgtgaagagaagaattagatggtaactccaaggtttagagtttgaattactagaacgaataaatgcatttttactgtaagccttcataaaacagattcaaatacagcttttacttggctactttggatttgtctaaaatcgatttttatttatgtaattcctctgatggaaatattatatgtagagagtgtgatcaagagtccgccatctaaacaggaagccatgtttgaaagtagaggcaagatagcattttgggaaattgaatcattatgcctggtgcagagaaaactgggggaaagtggttgagatgtgaggcactgagtaaataatgtctgtaattctgacctcaagcttttattctaaattacactcttttttttttttttttttttgccccgagacggagttttgctctttttgcccaggctggagtgcaatggcacaatctcggcttgctgcaacctccgcctcctgggttcaagcgattcttctgcctcagcctctcaagtagctgggattacagacatgtgccaccaagcctggctaattttttatatttttagtagagacgagatttcaccatgt

SEQ ID NO: 6051 - DNA, 1050 bp, Homo sapiens
aggactggaagttgttctgggtaagtcagcgagtaagtggtgagtgaatgtgaaggccttgggcattactgtacactgccgtagactttataaacactgtacatacacttagtatatacacatttatatgaaaaatatttttctttcttcaataataaattaaacttagcttactgtaactctttgtttataaactttatttttttaactttttgactcttttgtaatagcactttgcttaaaacacaaaacacattatatggctatataaaaatatttcctttttaatatccttgttctataagcttctattttaatttttttcacatttttttcactttttaagcttttttgttaaaaactaagacacaaacccacacattagcctaggcttacacagggtcaggatactcagtatcactgtcttccacctctacacctccacattttgtcccactggaaggtcttcagggacagcatggagttgtcgtctcctctgataacagtcccttcttctggaatatctactgaagaacctgcctgagtctgttttaccgttctttttttattttataagtagaaagagtacatgctgacataatgattaaaagtacaatgtagtaaatacatgaaccagtaacatagttgtggattatcactgtcatttattatgcaccatacacagttgtatgtgctatacttttataggactggtaacacagtagatttgtttacaccagcatcactaaagcatatgagtaagacattgcagtgcgatgttaggatggctacaaggtcattaggtgataggaatttttcatctccattataattttatgtgaccactatatatgcaatcagttgattgagacattatgtggcacgtaactgtatattatttgaggtagggggatcaaggttgttttttcctcatatggatacctaattgacccagcaccatctattgaaaaaaaactttccctctactagaaatgtcattgttttcactttttaatttttgagttctgggtttcacatttcttttttttc

SEQ ID NO: 6052 - DNA, 1065 bp, Homo sapiens
ttcctccctcagtcatttaaactattttaataattgtattctgctgctagagaattggaaggctgtcagttccctttatttgaatgcttactatgtgccagagactgtgctgtacacttgacatgtatcatttcacttggttgtcatagaaactgtggatggaggtagtgccacttgaaaactgagctttggagagagaaaaaaagatttttcccaagatcatgtgggaagtgagtggtggcacccagacttgaacttcaaagccttgctgcttttacccagcatagttaagtcaaagtctgaaatctgtttccttattgctttttctttttctttttttttttaaatgcggtcttgctctgtcacccaggctggagtgcagaggcccaatcatagtttactgcagcctcgaactcctgggttcaggcgaccctcctgcctcagcctcccaagtaattggaattacaggcatgaatcagcctgcttggtccgttattgcttaactgtaacatggaccaaagaagcagctaaccctgttagttaattcttactaggaagagaaaccgcaccagctatttaaaaaaaaaaaaaaaaaaagcaaaacaaaaatgaaaataccaaggtatactggaaaataacattgagcttagaaggagacctgagtttgtacctggctcagtcacccagctcatttatcactttcttaggaaggcctttccctgtcacaccctccttcttgtttgtctctattagagcactgaactcattgccataattaccttattgcagtgattctaaggtggacatctttcacattttaacttttctaaagtgtggatgcattttacaattgatggtgttttaaaataaattggcagcattttttcttaattattggtacttaaaataaggatgtgctgtacagttgatgacatcttagatttgattaagtgcatatttatttttgtgtgttcccacaaaaatgtttacatcattctcatggttttaaatatcagatatatgcaatgattttccaatttctatccttttttaaggtccacccct

SEQ ID NO: 6053 - DNA, 1026 bp, Homo sapiens
catctaccacttctatcttgttgccacttctccaatctaagcccccatttttcttgcctatgcagcaactaatattgtagcttctcctctttcccatgtctaatccagtcacaaccatccattaaatcagaacatgccacttcttaagacctccctcaccccctacctaatgcatttggtataaaacaccacatcattaatgtggtctgtatggttgtctgtttcctgcctggcttctgcccacatttccagcctcatcctctgccactctgcctcccagtatcactcttttcctccaaaagtaactcctactcatcctttagatttcagcttaaatgtcacttcctcagagatgattattgatcttccaaactaaattaagttcttcagttatagtcctttatattgaatgtatgcctttcttctttgggatgatcagtttctcccaaactgtggctaaagaagtgaagtaacttccacaaggccaaagagtgagatctattagaactggaattctctctgttagaggaaaaaaaaaaatccaaaaaagagaaaagaagaaaaatggaaagaactggaattacaacccaggggcggggtgaactctaaagctgtgtcctttctgtgatctttgctgccttgagggcaggaaacagggtatgaatcaatgttctaagtttcaaaacatggcctgactgctgctcgtttatttcccatttcaagttgtccttaaatgagctgggtgcagtggctcatgcctgtaattcaatactttgggaggccgaggcaggtggatcacttgagcacaggagttggagaacaacctgttcaacatggcgagaccccatctctacaaataaaattagccgggtgtgctggcacatgcctgtagtgccagctactcggggtaggagtgggggcctgaggtgggaggatcgcttaggcccaggaggttgaggctgcagtgagctttcgtgccactgcactccatcctgggcgacaaagtgagatcctgtctcaaaaaaa

SEQ ID NO: 6054 - DNA, 1047 bp, Homo sapiens
tctgtttgttcacttaggttttttttttttttttgtacttaccaataattcaccctcaaactcctcggtattcaccagcttttagtaaatttaggatgtgtttttctttcagtttaactctgaaaactggggtttgttccagtgtgactgttgccttctaatcctagtatacagctaacatcttgagattgccttcattatccttgtggtgctgcttttgcttctgttgtttacttttttggtttactctgattcttgtatagcatctttcccagtaaaggtgcatgggagattaaatttttgagttttgcatgtctgaaaatgtctgtatcctcacattcacttgttagactgggcatagaattctagtttggaaaacatatttcttcaaaatgtaaaaattccttttcttctaccttattgtactgcttttgagaaatctaaaactgttttgattattggtcctttaaatgtgatctggtgctttttttttcctcccctttagaactcctgctacatgtatatgcatcttctgagctggtccttattttcttatttttttccgtactgttttcctttagtcttctttcctttttttttgttttgttttgttttgtttttcctgaactgctggatacattttaacttaatctctctgcttttagtatggtaccatttccctcaactgtacctgtacctggttttcacagagtgacactattttactctctagagaggataaatgtcctaaaatttgccatggtagaaatttaacctcttttttttttttgagacaggcagcctgttatacaggctggagtgcggtggcactatctcagctcactgcagcctctgccttccgggctcaagcaattttcccacctcaacctcttgagtagccaggtctacagtcatgtgccaccaagcctggctaattttttgggtattttgtagagacggggtctcatcatattaccccaggctggtcttgaactcctgagctcaggtgatccacccacctcagcctctcaaagtgctgggattaca

SEQ ID NO: 6055 - DNA, 1026 bp, Homo sapiens
gagtgacagagtgagaccttgtctcaaaaaaaaaaaaaaaattctatccctttaattttataaatgaagagccaagcccaagggaggtaaagtgaccttttccaggtcatataattaagttcaactaagtagacttactggacttgtgctgtattgttcttattactgcatctaaacactgaagcacagattttcaaataaaacctaaagctacagggaaggaataaaaacagactttgaagttagtttatgacaacacatagattatacctgaatattaatatttccgaatcaaaaatatgtaccttcattcagttcatttttgtaaattgtaacagtttgatagtttttgtttagagagaaaagatgttaagaattgatgaggctttgcctgtaattcttggtatcttgagtttttgttggaatgaataataaaggtcactgaagtccccatatctaccttaacttaaacatatattgttttacaggaaaagctgaagactgtaaaggaaaactggaaaaatctgtctgactctgaaaaggaagtgagtattacggttgttagtctcaagtgtctacttaggatatctgtgagagaatgtattagggcaaggcttgattcatgtgaagacaaccttgtattactaataatacaagtattctaaaattattttcatattctcagaaccagtttggcatttttctcttggtagtttttgtctgcaaataaaattggtatttgaaaccacagcactcataagcctgagtgtccacttattcagtggcagtgataccctgctgctgcccccttcctgcacctcaagatctgaacttgtaacaatttcattcaaagagataacagtctatctcttacattttcatcatctaacttttatctcatgaaaatatttcttctccagtctgcctttatacatgtagaatggtaatgtaatttctaaagtatatacagaagcattccagaaattaattgctattttaaataatcattttatctcaaaaaataag

SEQ ID NO: 6056 - DNA, 1003 bp, Homo sapiens
ccatggtctatagtatagtgtgatatgactactgttccaatgtattgaagtgttgggatagttttttcaaatgttttcagatgttcttgttttagaatcattgtcacctttaagaggaaaaaggtcatcactagataatctaaacaaattgttgcttctcagtgttagcaaggaaaataatctagtttcaaattacattgcagtataatgaaaaagatccatatactgtggaatgatattcttttaaaattatttgctatggcttggtaaaaatgtactttttccagtagcacatatcacaagaacctcactgtagttgaaagccatctttctttagtatttgtttatccttttaggagagtcaagcaaaggttttcaccacctgtttgagcagaataattctcatcagttcacagatataggataactcaatttatatgcactttatgcgttatgcaaaatatttagaaattgtagattctagatctccagaaagactttgaagactttgatgtcacaaaaagatgacttgttatatgctgagcttgacaaaggtaggaatgggagagaaaaatagtagcttatgaggaaatatgaggctttaaatatataaagttggatattttaaaataacttttccctgtgggagcttctcactctgggtgcagacaggacagtgttggccattggtgaaatagataggatgggtttgaggccagagcagtctgggagtagggggaaagagaaggaggtgtgctagtgtctatcacaggctttctcaattaggtttgcaggagaaaaagccctaagtccctgtgtcatctagaatggtactaattatgtacagtccctaggagaatggagaaaatcataactcaaatcatcgactcaattctgttctcttcagatgagctcagagagcacataggagtgtttgtaatgaggggtatgtaatgattgagatagaggaatgagttacataaacatctcgggacaaatgcag

SEQ ID NO: 6057 - DNA, 1033 bp, Homo sapiens
tactgtctcacatgatggataaagatttcaaaacactagaaagcaaatacttgccaagtctttttttcttttttcttctaattgcatgtgaatcctttgtgtatgtgtgtgttgggggggggggggtgtgtttgatgtgttttagtgaaagtcttcctcaaaaaattagaaaagtttgttatgacaatttatttgatccagagagcatagttgcaattaaaattgctttatagattaagtgaaaaaacacatcagaggttgtatagcttggcagtaaagagcccaggagctgctttcagactaacttggattgaggaggtcctcactttgcttctcgtagagttccgtgaggatgcactgagaggggcagtaaaacctcacgctcacgggcatggagcaagcactctcagtcacttatctctatgaagacttggagggttttggtgaagttgatcattgataaatacatagctagagaggtttgttataccaatgacttttacaggcaagaatgtatttggctgcgactaacaggaaacctgacacagagtggcttaaacaagccaggggtttgtccttctcacctaatgagaagtctggggctaagcagtccaggctccaagagctgctcaagggcatcaggagccccgtgtcttccctcttccctgcctccaccatcttcagcctgtggctttttgccttatttttgcactgtggctgtggctgtgttttgaggtgtgtctggtttatgcaggaaaaaggcggaagaagaaaaattattttctcttagagattttgcatttttatgtgacaaagaattctctctcctggaacttctgtctgtacttctttggccaccttttgctgcaaaagactctgggaatgtatcttctttttccagcctcactagtggaagtaggcaaagaagaagggggtcagaatggatgctgaatgttttaccccatattttcctcacagtgggcaaagtggaggagcattaggactcaaaattgcaaattgtgactgaagtcaa

SEQ ID NO: 6058 - DNA, 1030 bp, Homo sapiens
aaagtctcaggttacaaaattaatatacataaatcagtagcaatgctatatgcactgagaaccaagctgagtatgaaattgagaactcaattccttttacaatagttatacaaaaatatttaggaatatatataaccaaggaagtgaaacatctgtacaaggagaactacaaaatactgctaaataaatcacaggtgacacaaacaaatggaaatacaccttatgctcatggattggaagaatcaatatcgtgaaaatgaccatactgcccaaagcaatttacagattcaatgtaattcctatcaaaataaccaacatcgttttttcagataattagaaaaaaaatcataaaattcacatggaaccaaaatagagcccaaatagccaaagcaatcctaagcaaaaagaacaaatctgaaggtgacatcacattacctaacttcaaaatacactacagggctatagttaccaaaacagtatggtactggtaaaaaagtagttacatagaccgtggaacaaaatagagaaccaagaaataaagccgaatacttacaaccaactgatctttggcaaagcgtacaaaaacataaattggggaaaggacatcccattaaataaatggtgatgggaaaattgaatagccacatgtagaagaatgaaactggattcctacctgtcaccatatacaaaaattaagatagattaaagacttaaatctaagacctgaaaccatgaaaattctagaagaaaaacttttctggacattggcctaagcaaagaatttatgaataagacatcaaaagcaaatgcagcaaaagcaaaaataaataaatgggacctaattaaacaaaagcttctgcacagcaaaagaaataaccattaaatagacaacctacagaatgagagaaaaaatctgcgaattttgcatctgacaacatacacggaactcaaatcactaagaaaaaacaaataatcccattaaagagtgggcaaaggacatgaatagacagttttcaaaggatgatttgca

SEQ ID NO: 6059 - DNA, 1030 bp, Homo sapiens
attatcattatgtaaatatttgctgtggaatcaagtagtatacttggagtgattaagaagaaaacaatcttaaattactaagtatgcagttcaaaaggtaatggcctaggcatcaaagtccgaaagagtgtcagttttgtccttttgtctgtttcttctcagtcatatgaggcttccatttaaaaagaattctcatatgtttttcttgcattactattttttattctagtgtaacatctttttaagtggtttcttcatatgaggtgtgtggttagtagaattatggcccctaaaggatgtctacattctcattccaggaattcatgaatgttacctcgcgttgtaaaagggactttgcagatgtgattaaggatcttgagatgcaggattgtccttgatagttattttttctctgtctgaaggatttcctttaacatttcttatcctttaatattctcattttgcctttatttttgaaagatgttttcgttgagtaaataattctaggttgacggtgttttaaaattgcttttaagatgttctactcttttctggcttgcattgtttctgatgagaaattggccatcaacattgtctttgttgccttgtagataatgtgtattttttttctctagctgttttaaagattgtctttaacattggttttaagcaatttagtgatatatgacagcgtctttttttttttcatgtgttcagtggagttcattgagcttcttggatttatagctttattgttttcattagatttggaataattttaaccattatttattcaaatatcctttctgtttctccttcattgggaactccaattacacatatattcgactgcttgatgttgttccacagcttattgatgttctattcaattttttccagtattttaaaaatcaccatttaactttagataatttctgttgctatgactgtaaatccaatctcacatttttttctcacatagactaatgtgctattaatactttcagtgcttttttaccccaaagatgta

SEQ ID NO: 6060 - DNA, 1052 bp, Homo sapiens
tgccaatccttaggaaacagtgggaaatgttttactttaaaaatgtagggttttgcttttacaaaactgatctttgaccaccggttctctcaggctttgccttttctagttcaatgatcttttctactagttcccccctcccttccctcaaaggcctgaatagacacttcccagtttgggaaatagaccttcattagttacacctggctcagcatttttttttcttttctgcacatctgcttagcatcatgtatttgaaggtgccacatacatgtttgctaacgttgctttagatgctgttgagtcataagaagataagcagtgctagggaggattcagtccagcttgatattcttctccacaagtgtgacttgggtagggaaagggggacactttctttggtcaagacggaaaaacagattcatgttacctgtcattagcatagtaaaaactatgggaaatgtcttagtccattccggctgctataacaaaataccatcaactgggtggtctataatgaacaaaaattcccacttctggaggctgggaagtcaaagatcaagcgtctggccttcaaagatgtgccttctctgtaacctcacatgatggaaggggcaaaggacctctctaggttctcttttataagggcactaatcccactcttgaatgcttcctcacatgacctaaccacctcctgaagaccccacctattgataagtatcattaccttgggagttaggttttcaacatatgaattttgggagatacaggcattcagaccacagtggaaaattaagcttaactgatggggagatttaggagatgcagtgagagagctttgttgtgctgtgtgctctgttctctcaatattatgattttaggaaggccattgccttctcaagagtttaggtatgtgctgcaagcactcagctttttataatttacatccttcctctacggatggttgaatgaatgaattgctctgaattcttgtacctatttctatttctggcctgtgcaattgagtttaatgttcgctaaccacatataaa

SEQ ID NO: 6061 - DNA, 1040 bp, Homo sapiens
gtaactgaaacagcatgttactggtaccaaaacagagatatggaccaatggaacagaacagaggcctcagaaataatactgcacatctacaaccatctgatctttgacaaacctaacacaaacaagcaatggggaaaagattccctatttaataaatgttgttgggaaaactggctagccatatgcagaaaactgaaactggaccccttctttacacctatacaaaaatcaactcaagctgggtcagagacttaactgtaagacctaggaccataaaaatcctagaagaaaacctgggcaataccattcaggacataggcatgggcaaagacttcatgactaaaacaccaaaagcgatggcaacaaaagccagaatttacaaatgggatctaattaaattaaagagcttctgcacagcaaaagaaactatcatcagagtgaacaggcaacctacagaatgggagaaaatttttacactctatgcattgacaaagggctaatactcagaatctacaaagagcttaaacaaatttacaagaaaaaaacaaccccataaaaaaatgggcaaaagatatgaacagacacttctcaaaataagacatttatgcggccaacagacatatgaaaaaatgctcatcattactggtcattagagaaatgcaaatcaaaaccataatgagataccatctcacaccagttagaatggcgatcgttaaaaagtcaggcaacaacagatgctggagaggatgtggagaaataacccttttacactgttggtggacgtgtaaattagttcaaccattgtggaagacagtgtagcaattcctcaaggatatagaaccagaaataccatctggcccaacaatcccattactgggtatatacccagaggattataaatcattctactataaagacacatgcacacatatgtttattgtggcactgttcacaatagcaaaaacttggaaccaacccaaatgtacctcaataatagactggataaagaaaatgtggcacatatacaccatggaatacta

SEQ ID NO: 6062 - DNA, 1044 bp, Homo sapiens
atagaccaatggaacagaacagaggcctctgaaataggtccacatgtctacaaccatctgatctttgacaaacctgacaaaaacaagcaatggtgaaaggattccctatttaataaatggtgttgggaaaactggctagccatatgcagaaaattgaaactggaccccttccttacaccttatgcaaaaattaactcaagatggattaaggttttaaatgtaagacctaaagccatagaaagcctagaagaaaacctaggcaataccattcaggacagtggtatgggcaaagacttcatgactaaaacaccaaaagcaatggcaacaaaagccaaaattgacaagtgggatctaattaaagagcttctgcctagcaaaagcaactgtcgtcagagtgaacaggcaacctacagaatgggagaaaatttttgcaatctatccatctgacaaaggcctaatatacagaatctacaaggaacttagactaataagaaaataactccatcaaaaagtgggtgaaggatatgaacagacactttcaaaagaagacatttatatggccaacagacatatgaaaaaagctcatcatcactggtcattaaagaaatgcaaataaaaaccacaatgagataccatctccagttagaatggtgatcattaaaatgtcaggaaacagcagatgctggagaggatgtggagaaataggaatggttctatactgttggtgggagtgtaaattagttcagccattgtggaagacactgtggggattcctcaaggatctagaactagaaataccatttgactcagtgtgcctggaattggttccttccggtgggttcttggtctcactgacttcaagaacgaagccgtggaccctcgcggtgagtgtttcagttcttaaagatggtgtatccagagtttgttccttcagatgttcagaggtgtccagagtttcttccttccggtggtttcgtggtcttgctgacttcaggagtgaagctgcagaccttcacagtgagtgttacagctctctctttcttt

SEQ ID NO: 6063 - DNA, 1024 bp, Homo sapiens
caatgaacaactgggtcatctttcagctccagaacattaaaagttgtgacctgtgccatcccaggactatgtacaggattccttggagtcataaggaatgttcttcattcttccagccatttcactctgttcctggcttttggctctgccccagtagttatgcttagccctacttgccctgtcagcagctcctgaaccagttgcaggttcagttggtgacttcaagatggggacactggcttacagactggcagtcaccagaacacatctgtccagagccccggttgccccggtcctgttgaaacaggcgctgcaccttcaggtctctattttccttgcacctccgattactcatcatggtggagtctgggtaagaaggaagttgaagagatgaaagcagatagagttcctgaggatctcattgccagtcgtggctgtctattccctcccttggcagcccagtgtctcatttgaggttagacacctgtctggtgcagatgtaaactgatatacctacctccccatttgcagcaggaatctggagtctcctatggcaattttgtgggggttgattttgggagacttttatctagacatttctgccttgtttaacgtgtggcttactttcctgttctgtgcatgttattatgtattactggcataataacatgcacagaatgcatgttatttccttttggagcacattgttgcaaatatcgatcatgcaagacatgtacatttgtggcagactcttaaatgtgtaaggatgcagtgaggttttacttagcctgatcgttccatctgtgacttccacttccttgccgtccctgccctactacaattcccaactgcagactctgcccagatgtaattcagcaaacattttaaaataccaaattttctctctacctctgtcttgactgtggtcctcattgtgcttctttcaagtatggatcatctagtctccatccttgtttgtgaagttgtcctgtccttcacatatttttaagaggggagaggagca

SEQ ID NO: 6064 - DNA, 1024 bp, Homo sapiens
tttcaacatgttggccaggctggtctcgaactcctgacctcaggccatccacccacctcagcctcccaaaagtgctggcattacaggtgtgagccaccatgcctggcctggtagtgtgtatttttaaatgtgtgcaaagtgggcttccacaggacctatgttgtttgaataggacctctcttgcctaaacatttttatttacattcattcatctatcaaacatgttctttaaagtaacggtgaactccagacttgcacaaaatttttatattattataaattagtgaagttcacattaataaggttgtacgtgataaactccactgtaaatcctgaaacatgtgccctgtcaagacgggagaatcccattaatatctaagatttcaaaacttagcaacaattttggacaggccaaatcataaatgaagtagtctaacattttaccaactaaaattttgtattctaagatgaggactcacagggcaaaaaggcctttcctcttgttctgaacagatacctctggtgctctgcacttactaataatcatgtcaaaaaagctgatgccaatttcatttttcctcttaaagtcactctattaaaggaaaaaaggttctgttaaaatttaatcaacaaaagcaggtgttacagggaggggtagattcgttgaaagctgccagtgaatccaaatactctctcttttccaggcacacaataaagttagtccacaagggcacatgaaatctttccagcccacaatcatattagaatttgcattgtgttactggaagcagcacagaaatattcccttttggctcacttcagttcttcgtcaccccctgaagctgcctcctgctgattcgaaggtcttgatagtttctggcaggacagtggtatcactctccagttatattgctgcttagcatctggtagttgcagaggaggtttatactgcattatgttccaaaaaaaaacccaatctgtgaaccacattaaggccaaatctagtcttggatatagtgccatg

SEQ ID NO: 6065 - DNA, 1057 bp, Homo sapiens
aaatctcttaggactgagagattaggatccttcatttctactttatgagaaaaacaaataatacacagttggggtgaggaataatgcacagttggggagaggaataggcatattgtgccagtatatgtggcttcatgaaaaaactattaacagctgttgttaagctagtctgtagaaagtagagtgagaagaaggcagataggcattttgcaagtgataattttctttaaggaccacttacctaatattaggcctttttaatttttgtgaatattaccaactttgagatcacgaacaagcttgaaacacagtctttagcacacagagtcaattgaacctataattagctgctctttagtgtaacatataaaagttatatgtaacaagtgtaacatacaaaacaaagatgagaaatgtaaagaattttaatgccagtctcaagttgctaagttatttttagaatcgaattcctaaaagttttgctgtttcctgcatgtacctgtaattgttccttgaatctcttcaagagacaggttttccggtttctaaattcttatctgagtagctcagacataaagagatcatgtatatggtatgatgtggtcacctttttatttacgggactttcttagtctaatgtgtgtgaactcttaaatgcatagtgtcttactctgtaacagcaaccagcagttgtgtgttaagatttttcacgaagagtcccagctgttgtaaaaaggaacaatctgccctggctacagattacagtgctttgggtttagactgcaggcaatacctctgggacctgtcatgcacactgtgaacatcagtattcctgggagagagaaggcaaattagtcacttctggctcttagaagttcttgcataacttgctgttatctcagtacaatttcctggggatgctttatcctggcatgtgccccctcctttatcaaaaggaccattgagtattggactgggatgccattgccattgcagagggctggtgttgtttcctcctcttcatcctggatcctcgcattattgtttttgccatgtg

SEQ ID NO: 6066 - DNA, 1059 bp, Homo sapiens
cttaatttagaatctggtaacttgaagcttttctaagttacccaagagttgataaggctacttacatgttttgtgtgtgtgtgtgtgtgtgtgtgtgtgtgtgtgtgtgtgtgtgtacatgcccagtgtaattcagaaattgtttagactacttactatatgccatctcctgcgcaagctggagagttaaagaagaggtgcctgtgcttttttgtaaatactttaaggactgaactgtctcaagttcagcgttcttggaatctctcctcagagtgttgtaaaatttcagtaactacatgtagagtaaaaatttaatggaataaatgttttttttttttttctgagacagggtctcactttatcaccaaggctggagtacagtggtgtgatcgtggcttactgcagcctcgacttcctgagctcaggtggttctcccacctcagcctcccgagtagctgggaccacaggcatgtgccaccacacctggctaatgttttgtactttttgtagaaatggggtttggccatgttgcccaggctggtcttgaactcctgcgctcaagcaatccacccaccacagcctcccaaagtgctgggattacaggtgtgagtcactgtctccggctcagaataaatcttttattaagtgctagtaagaatgaggaaagaggaatgtttctacattagtattgttgtttaaactagcacagccactttgaagagcgatttctgatcatcgcattattctaagatattgattaccctacctgcagtagttctacttctgattatacactctgaaaacacctttgcaccaagagacaacacgagaatggtgttgagtaaaaaaagtatattgcatcgtagtatgtagtcaatggcagcatttttgtgtatatatatgtctgtacatttttaagtataaagcattgtttagaaggatgcacacaaaaatcatgatgagttgcctttggggcaatagaaaggaaaatggaacaaagtaaacaagggagatgttctatttatttaacaaaaatccgaaataagaaaataacaccat

SEQ ID NO: 6067 - DNA, 1060 bp, Homo sapiens
atctattataacatgttaaaatttatcaaaacctcacagaccatatatggcaccactggcagcagagagaaatgtaaacagacaaagacattttaaatcataactgcataaaattaactgtgttatatacagtactgctgtaataatttcatagccaccttctgttgctattgcagtgagctcgatgttacaagtatccgcttaaagcactatatgacactaatttccacctgagcaattaatctctccagtaagttgcatataacagttacaagtgatctctcacagttcttgagtatttttcattgtgtttagtacaataccatagaccttgaataacaccgtaggacccacataaagtgccgctaatgctctcaaaagcaaagttatgacatcatgggaaaaagttgaattgcttgatatgtaccacagattgaggtgtgtagctgcatttgcccaccacgtcaagataagtgaatccagcataacaactattgtttaaaaaaaaaaaaggaaaaggaaatttgagaagccattgctgcagctagacctgcagatgcaaaagccttgcactttttgcaaaataccttttttatcttgcattgaaaatgcagcttttagagtgggtgcaggattgttataaaaaagcatacttattgactccatgattcaagaaaaagcaaagtcattatatgacaacttaaagcaaaatgaaggtgaaggatctaaagttggagaaattaatgacaacaaaagatggtatgttaattgtagaaagaggtttggcttaacaaatttgaagataacaggataaggagcttttgtcaaccactagataccacatgagttcccagacacggttaagaaaatcattgaggagaaagactatacacctgaacaggtttttaatgcagatgtaagtgtcctattctggaaaaaaaatgccacaaaggatttttattagtaagaaagaaaggaggccgggtgcggtggctcatgcctgtaatcccagcactttgggaggccaaggcgggtggatcacaagatcaggagatcgaga

SEQ ID NO: 6068 - DNA, 1028 bp, Homo sapiens
taaggtcagataccactttaaaatttatttgtataattcacttcagtgaaaaaataagctctcagcaattagtagccaacctagatatgttcttttgaatacaggctccttataaataagcacctcctgtacaaggcttaattttaaatagttgccctgagattcctttcttaaatttgagttttgagtctcttccattagggaagctactacgtcttccccagtttttattatagcaactgaaattatggaaggagttttattttgtgaaacagaggtcaaaaatgtttgctggattcttctctcatatattttttttccccagtcttcaggatgtgcttatgcaggattccaggttatatctcatctttgagtttctttccatggatctgaagaaatacttggattctatccctcctggtcagtacatggattcttcacttgttaaggtaaaagcttaactaattttattaatatttatgcactgtggatataaagggactatatatagaagtccctgcattttgtgggaatatgcttggaaaaagtgttagaataagaaaaagtatttcatttttctccctcatggttagtttatacaggttagagatacccatgttattaccagatagtgtttctagtaagtaaaaattagtgcctgagataacatagaactggtaggtattgttggaagctagggtagtctggtctttctttggctgtcagatacatgtaaaacaaagtaatgaaagcctagggcagagtggtggttgtaggtgttttattccagttttgaacatgttttggtcaatttattgtagacatttattatatttcaggtaaattataaaattgtatagttttaagtactgaagtatataaaagtgtcttattcttgcaccagttctaccaaaccactctgcagaggtagcgctgttagttttatttgtaatcttacacttgtatgtatgttcactttgtatgtatataaagatttttttttttacacaaggtggacttatttgcat

SEQ ID NO: 6069 - DNA, 1059 bp, Homo sapiens
tttacagtaaattattggtaactgtagtcagcttacagtgctgtagaacactagagcttatttttccttttgagctgtaattgtatccataaaccaacttatctctgtcttcctctactaagccctgaataaccactattccactctatggccattagatcaactttttacgttttcaaatatgagtgaaaacatgtggtatttatccttctgtgcctggcttatttcatggctcatccttgttgtcataaatgacagaatttcattctttttttatggctgagtagtattctagtattccattgcgtgcacgtatgtgtgtgtacactacattttctgtatgtgtgtatgtatacaccacattatctgttgatggaaacaggtcgattctgtatcttgactattgtgaatagtgcttcaataaacatgggagtgcagatatctctttgacataattgattttatttattttggacatatacccccagcagtgggattgcaaaattatatggtagttctagtttgtagttttttgagcatcctctaaacagtttttcataatggctctactaatttaagagcccaccaacagtgcgtaaaaagttgccctttctctgcatccttatcagcacttattttttgtcttttgatgataattactctaactgggtgtgatagctcattgtggttttgatttgcatttccctgatgaatagtgatgttgagcactttttcatatacttgctggtctttgtatgtcttttgagaaagttttattcagattgtttgaccatttttaaaattggattcttactattttttttattctggatgttaattctttgttgtatgaatgatttgcaaataatttctcccattctgcagattgttgcattattctgttattctgttcattctgtttcttttgctgtgcagaagctttttagttcgatataatcctgtttgtctatttgttattgctgagacagggtctttctctgtcacccatgctggaatgcagtggcgtgaacagggctcactgcaacctcaacctcctgg

SEQ ID NO: 6070 - DNA, 1334 bp, Homo sapiens
taaactaacatactaagttgtgtgactataattcatttagtgactcatttttagctatttttataacacattgtgctatggggggttttggaacttgctggaagctacatcagaaactgccatagttaattgccatttcaagaatgttgtaaataactcaggtggccgtttaattctcaatgtaaatataattaactagacgtctttcctatatttgtgtctcagttttaaagctatttctggatgcttgagtcttaccgtaattgataacaaaaagaggttattgagaatatctatgatttacagagtaagttattctagacctcaagagtgaaatgtaggggaggagacatttgtgtgttaaactaatggaaatgctcatttaatagatattcactgaaagtattagttttggtttattgctagaaaagttgaggttttatggagatttttgtaaaaaatggtttatttcctaaataaatatctctttttcttttttctcccagaaaatgttaatctatgatccagccaaacgaatttctggcaaaatggcactgaatcatccatattttaatgatttggacaatcagattaagaagatgtagctttctgacaaaaagtttccatatgttatatcaacagatagttgtgtttttattgttaactcttgtctatttttgtcttatatatatttctttgttatcaaacttcagctgtacttcgtcttctaatttcaaaaatataacttaaaaatgtaaatattctatatgaatttaaatataattctgtaaatgtgtgtaggtctcactgtaacaactatttgttactataataaaactataatattgatgtcaggaatcaggaaaaaatttgagttggcttaaatcatctcagtccttatggcagttttattttcctgtagttggaactactaaaatttaggaaaatgctaagttcaagtttcgtaatgctttgaagtatttttatgctctgaatgtttaaatgttctcatcagtttcttgccatgttgttaactatacaacctggctaaagatgaatatttttctactggtattttaatttttgacctaaatgtttaagcattcggaatgagaaaactatacagatttgagaaatgatgctaaatttataggagttttcagtaacttaaaaagctaacatgagagcatgccaaaatttgctaagtcttacaaagatcaagggctgtccgcaacagggaagaacagttttgaaaatttatgaactatcttatttttaggtaggttttgaaagctttttgtctaagtgaattcttatgccttggtcagagtaat

SEQ ID NO: 6071 - DNA, 1030 bp, Homo sapiens
tcctaaaaatagaaaaattagctgggtgtggtggcaggcacctgtagccccagctactcaggaggctgaggcaggagaatcacttgaacccggcaagcaggggttgcagtgagccgagatcatgccactgtactccagcctgggtgacagagcaagactgtctcaaaaaaaaaaaaaaaaaatgcaatccagacaggccaagaagcaccaaggttggggttgccaaaaccaataaaataggacaggcctacagacctctcattagcactgaatctccagacaaatcatcagaaacctgcctcaaggttgaaaaagccaaggtcatcaaagtaagatgcagttttcagtccagctggttttcctatctcatttaggtagcaatatccccttttatgtgtggaattctactgcttgtggtcctcatggggctttaaatgccggctttccactccttgttcacaagggtgacccaggtggaatccgtcacaatatgccataacccagcagtagtaaattggtgcaaggcgtaggcaaatgacctcacaagacacagggccctttttgctatagaaacgttgagaatgaagtttaggagactaggcgtggtggctcacacctgtaatcctagcacattgggaggccaaggcaggaggatcatttgagcctaggagttccaagaccagcctgggcaacatagcaagaccccttctctacaaaagaggaatgaagttctgccaaccttgctaaattgggatgacatgactggagagcctcagaaacatccctattctggagctagctgagacgagaaagattcctaggagcatgatgtccttggtctggtcctgaggccctggttcctgcaatactgccttactatttgtgagctgcccagtattcctcctaggtgcaggagggtatgtgtgtatgtgtgtgttgtctgaacctactttcagttggatttctgtcatttaaacctcaactaatagtaactaatagttaacgagtagagtcccaatggatacagctg

SEQ ID NO: 6072 - DNA, 1089 bp, Homo sapiens
tattatgacttcaaaaccatgctctacttctctgttgaggaaataatgcaattacaaaagcagaatgtatttggagaattcatttgctaatgagtattagtagttctttatatttctaaagagctttataggaattaagggccacatgctatttcaatagacagaagcttcctatactctaaaaattctctgaactataaaactacaagaataagtacaccgtaacacattctttctaatgcagagagaaaagatacatttcccaactgaacataaccatttgtctcaatggttttggtatcatgacaaatgtatttatgtgcaagaaaatataaatgtattcttcatgaagtgtgttcactgcttctaggatccaaatgggaagcagagcatttgctccatcttaaatcttgctagaatctgaacagttttagaaatgtgctttggcttcttgtttaaaatacttctcatgcacaagcagtaatagaaaatggctcagaacataaaaagattgcaatttcccagatgaacacaaaatggtaactttttgaccagtcaacattggtctgaaaccccatgaactagctgacaaatgtaatgtttgggagctcttaattacccatgctaacagaaggtcatggcagctagaataacccccaagagcaaacacctcacctccattgcaccaaattttggcattcactatgtaacccacctgcttttagcaataaatctcatttcctacttagtgaaatcaaaattttaaaattgaattggatgttgaacatcattcaatgcagtctttattttcccagtgaggagccttcagatctcagcaacagtgataaatagaacctgggttttctgatctccagtttaaaaagatttctactctgttttagataggcatcatgaggtcaaggaagaaattgtgtattttgaggataaaatatccaggaaaaagagaatccaaatgaccagtgaggagaaaatagaagagaaagttacatagaatgggttttcagtgaaatttgaagtgtaaaggcatgcacagtgtacagtgcaagtagctatagaccaagcatgttg

SEQ ID NO: 6073 - DNA, 1048 bp, Homo sapiens
taaaaacagccttccagggagtgaataaacaatactatatttggctagcagctgcttttggaaaatgagatgtcagcaaagctgaatattgtttaaagaaaactaattatccagctacctttgacttggatcagagtaaataaagcacttcctgatttgcactgaaatgttttgtctagaatttaaatattaggtattagtcagatacttctcttcttccttcgcttgccttgtggacccaatggatttaaataagtaccctttgtgtttggttgtgctgccagtacccctttatgttttctggagtgcctagcatttgttgcttcttttcttatttgccatccactagttattgtgttaggtgtaaagcagtgtgtttatggttacattaaaatctaggtaatctatgataatataggatggttgcatttgtatacatttaattatgcaaatgtaaaatatatattttatgagtaatttttaaattctatttaaaaattatgtgtagaatttgaatgaatgtaaataccctccatttttgaaaattcatttcaaggttagcaagccaaagaagctgcaaactggtttatactattgccacatggcactttggccagtaaagagaaattcctgcagccctttttcagggttgcatgcatcagcctgcagtgtccttggatcacagctcctgcaagtacctgtggtgatacctttctacttgttttaacatttactataatttgaaatacttttatattctaaagcaatctcacctgagcactcattaagtgcgggtgacatagtgggcctgagaattaggaaattttgaagaacttgagatgttattttaatgtcacaaagaaggccaaacaacttccatagtacattttacagtgagcaattcatacaacagtatacaacagtgatgatcttgagaaaaataaaaagctgcattaaaatacacatatacaatagttacagatttcaaggaagtgtctccctacttaatactttactgtggaaaaatttgtgttgaattgtgcaagtt

SEQ ID NO: 6074 - DNA, 1017 bp, Homo sapiens
actctcatatgagccttttgaaattagcagacattaaaagtacattttaatgtgataaactggtactaagcctattattcccttgtgatctctaatgtaagtaatacaatttcaaaagtagcacaggaaattttccaattaaattgtgttatttaaatatataccaagcttaagactatgcacaattatcagtgtacacatacatatgctcacccacgtagaccatgtcctttccaaaaagactgatcatttgggggttttaatgaatctggactttaaaaaaatacaaaattttttaaaagatgtaaagaagtgctatgcttcaggaaaaaaaatcattttataatggttgagtcagatgaatgagctagttatagatcttagattattatctaccctcttaggattgtcagcttgcacatttttcaacttcttggagggccaggtattctcatgacatgcaattcaggatgtgctcaatcacttagtaacaaacagaagaaatcaagttgtaacagggacttaattagcagtgttcatttactaagatgacacgctaattcgctgcttggtggaaactccattttccgttttaatgaaagcagagtttctgtagttcatggggaatatagttgatgcatagagctgtgtcattcattaaaacaagtcctgcctgccacccatttgtgctgattgggggtgtcgtatgttagatagaaaaatggcaagattctctcttgtggtctgttcccaaggccaccactttttaggtaaatactgaaaggttcttctcagatcaaattctttacaatgttgatcccccaacagctaatcgcttatggtgtcatttctaataaattctgtatccaaaatgacttagccagtagcccatgtagtcaactgagccaagcagttctgaattatttcctttcttgccaagtctgtcagaaataaatcataagctttcagtagtctgacgtttcccatttgttgtttgtggccaatacctagaataga

SEQ ID NO: 6075 - DNA, 1031 bp, Homo sapiens
cactgctgatgagcaagatgggaaatgacttttcaaaacagcatcttgttatgtttgacctgttctcttaattaagagtggtgtcatcgggccggcgcagtggctcatgcctgtaatcccaccactttgggaggccgagaggtggatcacccgaggtcaggagttcaagaccaacctggccaacatggtgaaaccccgtctctaacagaaatacaaaaaattagctgggtgtggtgacaggcacctgtaatcccagctactctggaggctgaggtaggagaatcacttgaactcaggagtcagaggtttcagtgagctgagatcacaccactgcactccagcctgggcagcagagtgagactccatctcaaaaaaaaaaaaaaaaaaaggcaaaaaagaaaataaaatcacacaaaaactgtgagggaatggacatagaaacaaggattgccagagagccaagaaagattcaacatgcataggactgccgtctctgaaggaaacagtagaacgaatggaataaaaaatcattcaaagacatcattgaaataacatttgggcaaggaagaaacgcaggatctgaagaacaaaaggaaccactgttctaaaagaaaaagatgaagaatgacacactctgagatgtggtcttacaaagttattgaacttcaattttttttaagtatgcaagcaataaaaatgcatcaccaacaaaggaagaggtaaaaaataaaaaataaaaataaaaaaaaacactgacttacaaattttagcagctttacatgcaaaaaaaactgtggaacattgtcaacaggattttggaagaaaagagatttgaattacatactcagtcaaactggcatttaaatgtccagatgataggaaatgatctcaaatgtacaaagtctgaggaagtatatctcccacatatccaggtaatgtttttaaaaaatctacttgtcacaatctagccaatatacagattaatccaaataaaaacgacaggaatgggaaagtcccaggatgagaaatgg

SEQ ID NO: 6076 - DNA, 1003 bp, Homo sapiens
cggccagctttggtttttaaatgttcatatttcccgacgtccgcctgcaattttaaaaaggtgttgtttggaaatactgtgaaaaatcctgcaacctaccaacaggttgagctctttccccctcccaaggtctggctcggccccctcccccgacccaactttcctgcgcagctgtcttcctccccctccctctccccctcctgatttcttattatttgcttttcaaatttattacttcaacatggcctgtgatctggaaaagggaaggattaaatatccagaaaagaactggtgcttaacagacttctgactaagtccaggaggaaattattcagtgttttatgggatattttgtggtcactcttttttggggggcggggaattgaaattgggatgttttttaaagaccctgagttgaccccacttggtacagttttaatttttgttggtgtaattaaatggtgaattctgatttaagaataaaggctatatttgccaaacgttgcatctgctagaagtgttgacagtgaatagatatatttttaaatacacgatttctttttaattgttcattatggggaattgaaagggaaccattgtaatgatctgtgcatttcgtcactgctatatgagccatacctgagaaaattaatcttgccatttaaaagtaaactctagggggtttgcggagggagatggctctatttataatcctcagctgcatatacatcgtctaatattatgcatgatttgttttttaatgctaacacggctggtaattagctgtatgattatacttgtatatttcattaggactttggctgatgtcattgtgaattattcagccatattaaaacaattttcaattgagataatgacacgcctcaaaattatgcaaatgcagactgcattgtgcaaaataattatgacaaatgtaaagcaggtagaaagtttcccaatgcagatcggttttccaccctggtgatgtcatttcccccctggc

SEQ ID NO: 6077 - DNA, 1035 bp, Homo sapiens
acacacaataactagtcttatgacttgcggtaatgctgaataatacatctgttgtgttactttcctaatgtatgatctaagttgtattaccattgtcttatgttttccttaacattaaaacctttcttttgtttgtttaattttgtgtgtgtgtgttatggaatatactgttactaataaaaaattaaacaggaaacccacaggggacaaaaggatgtgtagatggttaagcttgatgtcacacatataaacaagagtatttatagcaaggtttatgtttaaaattgtgtttaaaatggataatttattaatgaacaggaaaataagtctaatttcttaattccacccaaagaaataaaaggttgatcctcttggattctaaaaaaaaagaaggtccatattctacctttttgcagttgattccagaagaaattggtttatagtgaatattcacagtacttgcaggtggtttggcctggaaaatctagatgagtggtttttaaatttagttgcttattagactcaagaaagaaatttaaaaaacaatactgattactgagaccagcttttctagattcttcattcagtaggagtaaggaaaggccaatgaatgtgtattgataaaaaggttcctggccgggtgcggtggctcacgcctgtaatcccagcactttgggaggccgaggcaggtggatcacctgaggtcaggagttcaagaccagcctggccaacatggtgaaaccccatctctactaaaaatagaaaaattagtcacgtgtggtggcaggggcctgtaatctcagctacttgggaggctgaggcaagagaattgctggaacctgggaggcagaggttgcagtgagccgaaatcatcacacctttgcactccagcctgggcgacaacagcgaggctctgtctcaaaaacaaaacaaaacaaaacaaaaaaggcttttaggttgagtctgattttgtttgtttgttttggtctcattttggagacagctttatgattagtgctgaagaagggaaaatga

SEQ ID NO: 6078 - DNA, 1051 bp, Homo sapiens
tgtggtcagctctgacttagattttctttttgaaaggcctagtcatcccactaggaacttatacttagttcaaacccagctttccaaatagaaaccctgtgcttgatgttaaatactgacctttttgttgtctccgataagtgcatagtggttcattttgaggttgtctggttaacagaagaaatatgtatattgtatattccttgtcaaaattcctaatattccaccaaagctctagcacttccatccagaaagtgttctgaggagttgaaggctctttcttattttgatttattcagtttcatttgcttcataattatgaagactgtccaggcctacaaatggctgcattggcaatgaaaggctgtcagttgaagctcagaatgttaataatttatcctctcattcactatccatgattcatcactgcaatattttcatattatattcttagggtacaacctacaagctaggggaaaacattagcaattttagattgcaaatgatagaacctttccatgaaaatgtcaactttttgcctagttatattcatggttgcaaatggggctagtgtggttaatcaaattgtttcatataaaacaatttctcctgaaggcaatgttagtggtggatttcacaaaatcacagaattcaccttgggagaactttgtggctgaataaaacttctgtcacatctctgtctggggagtgaaggtagggcaattttatctagaatctgtactacacctaataggttcagtgtttggcaggagatatactgataatcattattcccccaccccaccttcaaaaaaacctataaattgggctacatgtcaagtgcctaaatgttctgctgggaaataacctgagtaataggatcttaattaagaactgatggataatttttgtggagatgctaccccctgccaaaatctgcatgcagaattttatatgtaaacacacattttcttgggagaccattcatagcattcatctgattctgaaaggtattgatgatgattttaaaggttatgatatacccttttaa

SEQ ID NO: 6079 - DNA, 1032 bp, Homo sapiens
gacaatctaattctgacagtgtagtgaaggccatcttcaatttgactgtgctccactctgttatgctgtgaaagaaaaagataattcagctgagcattctgccgttggctagaaacaccgcagttctgaatacaaatattatgcaggtaaatgaatcattaaaagaatagaggcataaaatatctgacagatgaactcctaaagtttggactagaataaattttcccatatatgagcagtaccttcatccatcgactaacagtgttagttatccgttaagtcaccaaaaagcatttatggtcttagagtaaatgattggtaattatgacttacaaggctataaatacatggaggggatttggtgatatcataataaaccacgaaagaaactgcagtggtttttaatgttagtagaaacttaagaaatatttagagccgtgttcgcagccctacagttgttttttttcttttttctgggagtgtgtgattggtgttttgtcaaaatgtgcaactctaccaatggactcaactcaactaatgtaaattagggccaatgagagtgtccgactgagattagtcctcaatttgtatgacatgtgtctcaacaaatagaaaatattcttaaagaaaaataagatattcccgcatgtctctcttttttagttccctaatttctgattcctttcttctgaatgagttttctgtaagttaaaaaagacaacagtgaaaggccctgttcctctcagcttcttaaccccagtttgcctggtttatctcctgttttagattctaaaaaggaaaacattaatcatgcttagccctggactttgtttccctacctgttacctcctggtctaatggcagagatactgaaaggggcacagacccacaccagccaactgacctagctcatagccacaggaagagcggcatgtccctggggcagtgagagcgagactgcacccagaaccactgtctcatgacaccaccccacatctcaattgaagatccagatggacagctgacctatat

SEQ ID NO: 6080 - DNA, 1967 bp, Homo sapiens
agaactggaaacattcattccactatttgtggcttttttgataaacaaggataaattgaagttttaatagactggggctacatttgttgctccaggttcctgaagatcattatttttagtcatacttaaattcacacacacatgcatacacacacacacacacaccagatgccagtgtaaaaaatgggaggggggaagcttttaatctttattattgattttctgtgtgtacaattttatctaaagagtatggtttaccagccattgtggagctaggctttaatgccaataaaaagctttgcttgatccttagaaaataaaatgagatattcaggcagctagtttattttatttcttttcttttccacatcaagacagtatttcaaataattaggttgatttattattacaaatagtttgaagatgtaagatgcttttacagtgcagtgcgggtttattgtatctggccttatccaattataaaatcgagtttagtcatgtaatgattctctaactaaaatatcaatcacagtgaatggacttttgcgatgtatatactgtgaggctattttgagcttctctctttaaggcacccgcacatctgaatatgcttacttggctttactctttaacatataagaacacatgaaactttggctaaatttagcctctggagtccaatgcacatgcttggtgacagcaaagggagaggttttgacaacaagcaggatatgatacaccagagtaattatttccgcaagacaatgagcattctacattatttgtacaaataacgcaaagtgattatttggctgtgccattgtaatgagacaatgaagatcatatttaattttaaaacaatatcttctagggtcttttttgttctgagtattctggactactaaaacaaacttgatttgctgctatggttaacaatcacattttaagtgggggacagagagaaagagagagaggagaacaaatctttccccctcttcccattaactctagcattccagaaatcatgataagggtatgtgggacaggaatgttgaaataagtcacttatttcactatttttccatattgttcacataaccatttatttataataatttgagtaatctcagagttcctcctaaaggctttttttggcctggataaaaagtacagctttaagatatttctcctaaaataaatttgagacggtctcatttatagtcagcagtgccttgattacttgcagacacactggaaatttacatgcgcttttctcctttataaaacactgatctgttcatatcattagttccctcatgactagtgcttggctgcttgccaagcggtctaaatctgtagttgtaaatcgtgagttgaaatagcagaaagtggatttgtaacttaaaaagtgtaaacagtttggaaaatgaagtaattttggagtatgattgattgccttgtgattgtactttaaattagcctggggtctcgggggcagatatgtgctctaactgcttattacacattttcagttttcgaaggaataatagcattgttggtaggcttttaaacaatgtatgcatctcctggagtgaccttttaggaaatgaatagttttattgtgtgtccattactttgcctgaaacaacatttttgagttattaatttgacttgttctataaataaagaattcaaaatgcaaagcagctgtgcaacccagagcatagtatatcatgcttcagaaccactgtttgagatggataatccatagaacaaatggtttcttgggtgatacattaataatgtttctggagcctctggttaccaaagattagcccctcaatattgcagaagccaaaaattattattaaggaggacaatcgattagttggccttccaacacactggaagtagaggtctgcgttttttaaaaggatcccagttcacttaacagcataaatagaaag

SEQ ID NO: 6081 - DNA, 1049 bp, Homo sapiens
tataagacaaatggcattttaagctgtttttctttttgcaggtttggaaatcttatttaaatcaatgtaatgagacactttgaacaaaatgtaatcattctcacttctccacgtgttggaagaagcagtatagagttggagacttggggttagattagagctggctgtcttcacagatttgcatccttgccgtgtgctctgagttgtcacagtgtatcagataggtgggatgtttttgcctctgtgctaagtaaattacattctagaagaattaagagggctgttatttcatggtgattttttaaaaaaagtcagacaccccagaaccgagctagaattgttggaccagttttcttcccttttcttcttggcctccttcttgtcaagaacaactgttctccagttttcaagaaggctctgttgaagtggaaacataagcctccattaaagtataagggtttgcgaggaggtcaagggagtcattactttgtcttttacaacaaggatgtatttatatattctgagttaaaaaaaatgcttttaaagaaggtgtgagcaaagataaaaattatttcttacagctaaagaaaagtagtctcttcatcgttatccatgagggaataactcattgacacttataaaagagcgtcctagcccaagatatcatgtggtgggaaatttgattggaagaatctcttccactaacttgtgcatgagaatatttgttccagctccaaagccttagaagctgttagagaaaggtgggagggtatttggctggccttgggaaatggtaacctaacactggaagccccttgcttttgttctccttattgtacataagaagatgagattttatttccagatttcaaaacacggaccaacttgcaataagaaataaacccccgccaaggtgatgaattatgttgctttttaatttagaaactggccctccgatcagaaagagtaaggatgactttaaataaccagattgatttgcaggttggggcaaagtagagggatctggtggatctcagagactctttctt

SEQ ID NO: 6082 - DNA, 1050 bp, Homo sapiens
tttgcccatctgaaaaatggggctcataataacttccttagggctgcccaaaggaggagagagaatgttcatgactgacaggctggaaagattaatgagtcatggtattttaatctgcctggggagtttctatgtatccttcaaaagttagcttgaggggtttctcttccctgcgaagactttcttcactctctttgctaccaagattctgcctctgctgtgactcttgtcagaacacttacttgtattaggttggtgcaaaagtaattgcggtttttgcaatcctgtttaatgacaaaaaccgcaattactttttgcaccaacttaatacatctgttcacatgcccaccaccttttctaggctatacacccctctttaaagagggatggtggcttttggtctttatcctcttgccacctgctacttcttaatccacagaaggtattcccttggtgtctgaccagccaatagatggaagaccattttgatgttaaatcctttttttttaaccacatattatgttaatccatttatatgaaatgtccagaataggcaagtctatacagacagaaagtagatgagtagttgccagggtgttaatgggtatgaggtttccttttggggtgatgaaaatgttctaaattgattggagtgatggttgcattgtgagtgtcctaaaaaacattaaattacatatatgtaatcgtatcatttttaatcttatctttttgaggatacaatgggtgcaattgtgtgagctacgtgtgtatgatgagaatcaggtggttgtggatctttgtcccgggatcaaaagaggagaagtaatagagagaaataataataccattgtcttcacttaggctgaaatgtgctttctaaggggttaaaagtaaagaattgtgctggcgaggtgtgttctgtgcaatggtcatctgtttttgagattatcttccaaataaggcaacaccaagcttcacttagggattgttttgaacacaagactggaagagattctttaatactgcaatctgaaaccagaaatttgcgtc

SEQ ID NO: 6083 - DNA, 1050 bp, Homo sapiens
gatcaagggtcagcagagccagatagtaaatattttagatttgtgcaccataaggtctctgaggcaaatgcaccactctataatcacacaactgtgccgtcgtagtgtaaaagcagccaaagacaatatgtaaatgaatgtgcatgactatgttgtaataaaactttatttacaaaaacaggtgttgggctgaatttggcccatagtttgccaaccctttcaaacagaaataaccttaaagaaatatctgagagatacccagaaacagggatctgtagcactggtaactcatggtatgaaaccacagaactatcactggaattaatatagtagtcacgagcaatttgtttattgtcttttatgagaaaagagaggtaggtttggatgttagagattggggaaaaggggatatttgctgtggaaatgattttcagcagatggtaggtactttgggaaaggtggctaaactagagccatcctcctcctgtcttacatcagcttactcagtactaaccctgtacaaaaaggaagtaaaacagagcacatctgtatcatcagctttcaatgatgttcttccatggtgcactgtgacagcacattagaaggtgccggagtttttatatgactgctttgccgtgagattaaatagtggtttcagtttccagtaggtttcataagtatctctttcagctgttaaattacttttagtaatgtgcacactagaaaaagaaagaaagaaatatccattctgaacaactgggtgtcatgacagaaaacagagcagatggttttgtggacatggcaccaagtgaacctgtagctggttacagcagaaggatatgtttaacccagaggagagggctctcaccaggtcttaacagttgaagcttttaagagattattattttactttgaattgatttttgttattcaccagaaaccaaaggtggcaagcgagaatctctactaaaataactatacttgctaactttgggtctttgttggggctttggggtatcagaacaatgaaataacaggcactgtgaggct

SEQ ID NO: 6084 - DNA, 1083 bp, Homo sapiens
gatgataggtgatagatatccatgtcctgaattttttcatacactcatacacacacatgcacacgtacacgcacattgtgcccaccaaagatggatacatatcttaatctgcatctctgcctagctaactggtcacgtgtctctacatgtagacagaaggggaggagaagaagatatcacatcaccagtttgggaagccttacacggtgcagtagatggcgagatgcaagccaagatagtcgttctcttacattatcactttctcatctgtttgttgaggagactggatcatatcagtggttttcagcaggctgggcagggatgtcagaataccctggggtagccttatcaaactgcttgtgttcctgggaatttctatacttagaggcgtgaacccctaccactctcaccctaccccttctctggaatcactaccacagagtgactgctgggatggctgagccctgctgaatccctcatggctacctgggtgaagaagaggttgagacccttagcctggagagagcatagggtccctttgaactgaaacattccttgattttgttggctgatgttttcctgagaatcactagttggcagattatccagattcaggttactctgcttatcctttgcagaccttggtatggtttcaggagtccactatggcctcttaaatttgattcttcatgattccaacagccctggtgctgctactagagaaattttgcaagtagctatgtgaacagagttggggtgaggatgaggagatggcatatgatgatcaagaaggaagggaagacagagagaggaaggggaaccaaatgatctaagtccattagattctaagagccatgacattttttccctctaaattgtgtttttggatatctctcacaactctggcttatcaaatgactgtcattctgtaagagggcaacactgtttgtatttattttttcttcttcaaagaaatttatttattgtcatatttttagtattcaaatatcctttgacttcaagtagataaatgtatgcaatacatttttttacaatgccctctcttttcagatcagcatttac

SEQ ID NO: 6085 - DNA, 1093 bp, Homo sapiens
aagaatggcactttttaagagagctatttctgatctccaaatcaagccacaaatatttattgaatagtgactgttctgccctgaactgtgccctaggcacattgaaggacacagactgtttgggagactaagtaaagtagtcgttatgatcagggtcacatacgtgtagataaagtggtgttccctttgagtcttggataccgataggcttctgtatccacacaaagatatggaaaactctgatttaagtgcctgccccctctgcagcttcactttcaagccttgatttccctagttttaaaatggggatgataatcctctcagcacagagtgccttattcatccatccatctgtacttctttctgtcaaggccatcgttcatcaattcaacaaatatttagggataacttattatgtaccagataatccatgaggccctgattaaaccttatggaattaaatcgacatgactcatctgccctaattctagagcctgggaatgtgactagtaagcaagtaaatagatacatttatatttgtacacatacacacaaagagaaatatagaacttaagagactcctaattttgactaatacaacacctgttgtctttgtagcagccagtgattactgcacatgctcaattcttgagtttaatggtaacacaaccactcctttttctttgaggcttatttcagaaaccagagtggaagggaacctttctgttgagtttataatagcaattacaagctgataagggcaaaccattcatcaaaggatcatacctcgggactttatctctttgggtcaaatgtttcctgattgatattgactaccatatcttaagcagctttgaacagataagaagctaggaaagaaattcctttgaaggagatttgacaaaattatattttctgatttttttttctttcgggaggcagattaacttcccattgttcttactaagaagtacaaagttaccaaaccaatgaactgaagaaaatctagaaaagttttcacgggtagatattgattgagtttccactagagacgaatgatcatctgtattgttattcttttcgggttctgaaa

SEQ ID NO: 6086 - DNA, 1050 bp, Homo sapiens
ctgcaaagagaaatctgtttgaaaaaaatatatttgcaacatcacacaggccagttaggggactaagtgggttcatgattcaattcctctctgaatgaatgtcttccttcccttttatctgttgtatcactgtggcctccacgtgaaatatttgttttcctactcactgccagccaccacatgttggtgaaatactgtatgaacctttaatatagtgctgccatcagacattctattaagaaggtaatcgtatattaaagtggctgttatttattgattatggagagttcttatatgagagaagctctatatattactgtttaatcaatggcgtctaagggtcgaacaagaccaaccccagttttgagagcccatgctttttcccaaagacatctaatttagcttctcttgctctgctgatgacagtaggactaaaactcttgcctttatcctaaaagtagaaccatttttgtagctttatgactgtttcttaagaaatgttttaagtggtaataatagattctgttgtcaaatgccctttgggcaaattgtttcctaagaacttagctctctggggtactttagtatttctttttttctctttctcgttgaaaaaaaaaatgttttaattgacatttcttggaagtatgttaatgcaatgcttatctaaatacttattgtccctctaacagttaacctttggactatgtttcaagctgctcaaaaactgggaggatatgaaacagtaagtgtttaagcaacttaaatgaaataattttgcaatctaacttttcccctctctttgaccaaaatggagaacatgcaagggcaaaacatcactgactgccttttcaaatggctctacacttttgggggtttattgggccgctttggaaacagtcccaattagttccaggtttggcaaaattgtaaacttgtcgtaaaaactacaagtggaaaacatatgtaactctcccctgtcagggaaattagttgggtctgtaattttttcccatgttgagaaagggctattattgtacaacaagccaa

SEQ ID NO: 6087 - DNA, 1025 bp, Homo sapiens
ctgcggctacacctgtaggaagttcatatggggaccttttgcataacagcatttaccctttagctgctataaatcctcaagctgcctttccatcttcccagctgtcatccgtgcaccccagtacaaaactgtaggctcagctctgcccagcagtccaaagcggcatggccaacagagcttcactccttacccaggagtgctggcttatagagttagaagtcagtatttcttctaatctgaggctatgatcagtcccagctgtaggggcccagaggggaggtgaacatgcctgatttttgtgggacaactctagcccacaaactgactggctggtgagtcttgactcccttccaacacagatgcccaggcacctccagatcattcacttcgcacgtgggccttgtgaagggatttgtgaatatccaggaagaacttagaggaccccatctgagttcggatggtcaggaaacaatctgggcaaaaaagaggcaggcatttcaaaggaaggggcaaggaagactggcaaacagatggcaagggatgcccctctttttcataaaactctccaaggttcaatcaatgcaatgtatagtgaaacttcaatagatctttcattttgacactattaaacaatccagagaagtaaacactgttaaattgactgtatatatttgcttcttaaaactacctgtatcactgtttgctcacctaatttatatacaggtagttccattttctcccagttccttctcgtctttttttttttttttttttttttttttattaaatggtattgcttttgtttgcaggtctttttgtttttgttttgtttttgaggctgactgactgtcctagttgttgtgtgtttgtaatttttccacatcttattttgagcagctttgggtggtaaagttattgtttacaaattgaagcaactgattctagtggaacaaatgaaaaagaaacagtcaagcacacaatagtgcaaagaacgttcctttgtagatccgcaacttaaggatttt

SEQ ID NO: 6088 - DNA, 1046 bp, Homo sapiens
ccagcggcccctgcatcctcacaccgcaccgggacaacctgcaccagatcgacgccgtggaagggcctgccgccttcctggacatcctggccccgccctacgacccggacgatggccgggactgccactattaccgggtgctggagccggtcaggcccaaggaggcctccagctcggcctgtgacctgcctcgagaggtgtggctcctggagaccccacaggccgatgacttctggtgcgagggagaaccctatccaggtcccaaggtcttcccttgaagccactggcgcccaggagcggtgggccgaagacgtgccctaccctaccacaagggctgtgtctctaccccctagcctgggcgttggatctactggaatgagcagcagccgcttcctcggcagccttgggaagcacgggcgactggacagcagccgccgggcacggttatgggggcggggtgggcggggaggctagattgtttcctggtactgtcactgccactggggctttgatttggaggaatggggcaggggactatctgaagcgcttccatcctaaagccataatgaaaatatcttcctctcttccccattctatacaaaatactaagtggttttcttgctcccactccctaccccttagttaaatagggtttattttccactcatgcccttatgcctttttttcttatagttttttaacttattgactgtgcatgacccagtggtttgaattgtttttagttcaagtcattggtaaaaactaggtttaaggagatgagctactgtttaaagtgagctggcctgcctaattaattccttgtgaaaactaaatgattttttcagtttggggatcattctcacaacataactatgcatgtagaggacaagatttattttctttcctccctttgcccagtagccacatctggtttactcaggcagcatctactaagaaattcagcacctgcatatctctgtgacatggtcacttagagcttatcttccctatgaatctccagatctgtgagtcgagcagatttcatg

SEQ ID NO: 6089 - DNA, 1055 bp, Homo sapiens
gattacaggcgttagccactgctctcagccttttttttttttttttttaagttctggggtacatgtgtagaatgtgcatgtttgttacataggtatacacgtgccatggtggtttgctgcacccatcaacctgttgtctacattaggtatttctcctaatgctatccctcccctagcctcccacccccgctttttttaaaaaagaaatagttttgccactcaagtgtactggagttatctgctgtagggccaagcatacagtagatattccataaatctttgggtgtttttatggtgagagggctttgtacagtattaaacatgtcaactagtgctctttaaatctttcctaaaccatattttgttatgaatcagattgttaaatctgtagtcactacaaagacgatgtaccatgtttaactatttaagaaaaccatgttttatatggattccctagtgaaacaataccttatgtaacccaaaatggtcatggttacatatatataacatatgttaagtggagtgaatcagcatatgttaggcactgagctatgggatgttatgaatatataaagagaaggaaattttagttgtaacctaatccttgtctttgaagacttaaaactgatgttgggcttcagttaaccactccccactccagaaaaatacggcaaactgttagatcacattagcttaaattatagagacagaacttaatgtgattagtaaatcccactgagttgattgggtttccaacttgtgttttagaatggagttgaaagttgacgtggttgaaatgagctcactttttgaaattgacttgcatctctagggcttataactggtcttggaaggtatgggttaggtgtattctgaaaggaagcaacttattatttggaaatcattttagagatgtgacaaggaaagatcaacatctgagaaagactaataggaaggaaaggctgaactgagagaatttaagggcaaacagaggggacctgggtgtccacctgtcaaagatcagaggagattctgagactaaaaaacttaccgtg

SEQ ID NO: 6090 - DNA, 1123 bp, Homo sapiens
cactgcactccagcttgggtgatggagtgagactctgtctcaaaaaaaaaaaaaaaaaaaaaatttaaactggaagtcaagtcagaggaaatacagcacagaggcaaagcaataaaacagtaaaaataatatacagttgaccgctgaacaagagaggtttgaaatgcataggtatgcgtagtttttaatagaacatggatcaaaaatacagtgttcatgggatgtgaaacctgtgtatacagagggctgactttttatgagtgtgttctacggggccaacttcaggacttgagtatgtgtggaatttggtaaaagtaggctggtggtcctagaatgctattcggagttccactaatggaggaatggtattgttcacaacactgaacaaaaccaatcctgacgactgtattcatgggacatacagtctacgaggagagactgatggtcatcaaacaacataaaatatattacatttcatgtgtgataaatgaagttaggaaaatttattaagtactttcctcaatcaagaccatgggtgtagacagccctttcatgaagacataaagtaatatctgaactatgagtcaagttaactaggaaaactttctaggcagagagaacagtatatgcaatagaactaggcagaagaaaatacagtatttttttgtaagaactcaaagaaacttacagcaataaattgtgaataagatttgggaaggggtcacggtaatgatggtggttcataaggctacaaagggaagaccatgcaagtcttataaatgaatatatttggtctatctactactaatgtgaagatgctaacagattttatgcaaagcaggtgaaacggtagatttttatttggaaatatattcacaataattgactgcttcctttgggaaccacaggtactttgggaatcttttttgttttttggttgagacagtctcactctatcacccaggctggagtgcagtggcgtgatctcggctcactgcaacctcttcctcccaagttcaagtgattctcctgcctcagcctccggagtagctgagattacaggcgcgcaccaccacgcccagttatttttagtagagatggggtttaaccatattggccaggc

SEQ ID NO: 6091 - DNA, 1051 bp, Homo sapiens
accaacatgctattacttctcccatcttaaaaaaaaaaactcttttaatctactatacttttcatcttatcaccccatttccctctgtctctttagagcaaaaattcctcagaagaatagtccaagccgggcacagtggctcttgcttgtaatcccaacactttgggaggctgatgcgtatagattacctcagctcaggagttccagaccaatccaggcaacctggtgaaaccccatctctacaaaaaatacaaaaaacaaaaaaattagctgggcgtggtggtacatgcctgtaatcccggctactgtggatgctgaagtgggagaatcacttgagcctgggatgttgaggctgcagtgagccatgagcatgccactgcactccagcctgggcaacagagtgagaccttgtctcaaaaaaaaaagaaaaataatttttttaaaaaaaggatagtctatacaccatcttcactttctttccttcagggtactctggaacccatacgtttgtttagacttttctctccttccactccactgaaattgcccttctcagatcaatagtgaccgccacttggccaaactgtttgatcctcatctgacttatcagcagcttttgatacaattgctcactttctccttgaagtattttcttcacttggtttccaagaaaccttgcttttttttgttttttttttttttgtttttgtaactcaacggccactcccttctcagcctacctggcacatttctccatgttccttgacttcttaaagttgttaaagttggcatgtcatggggatcagtccttagaccattttctcttttctatttgtagtcctttaaggattcccattaatttacatctccaacccagatctctctgctgaactctgtgatcatattttcagctgcgttctttgctccacgtggaaacatctgaaagtcagactgaacttaagacatccaaaactaggctcttgagcttccttccccatctggctcctctggcagctttcccccactctgttaatgccagctccacctacta

SEQ ID NO: 6092 - DNA, 1072 bp, Homo sapiens
aatgttatatagccattcataattattttcaaagtacttttcatttcatttgaagatgttttaatatatcacagtttcttaacctcagcattattcatatttttaagtggataattctctgttgtgggagactctcctgtgcattgtgggatgtttagcagcatccaccagttgtgacagccaaaaatggctccagatatggaattgacatatgtcacctagtgggcaaaactgccactggttgggaaccactgtgttaagtaaaaagggaagaaaaatatatatggagagggcatgaggctaaaaactgtgctatctcatatggttatgtgtggctatttaaatgtaaattaattaaaaattaaatttctcaatacactagccacatttcaagtgctcagtagctatgtgaatgcttatcttattctgtgctaccttactgggcagcataaaaatagaacatttttatcatcgcagagttctgttgaagtgatcctttacgagatatagtccgctcagcatctccacctgaaaatggctgtgctattttctatttgctgcttctatgtattttatgagagaaattctataatgatatttggaaattcacaagtatcttaggatagctctggcttaagaatattctatataaaaatactgttgctacttgtagaaaagaaattactgttgctgatcaatctgtcacaatctttattatttcaaaattcctatgtttacagagaatttctaaaaattgatgaaaaatactgatatagtacactttgcaaatatttttatactcacgtattctgcacatcaggtgttataatccatattttttagcctgtaaatgaagtatgacttacaagttatagtttttcctggtcttagaattgattaagacattaggattagaatacagagctgaaggttatcactatgttgcttttcctaactattaacagtgtcattgactctgcagaatcaaaactatcaaggaaatcataaaagtaaaagtcataggacaaatctaaacaaaataggtttatgctaaccaataattcaaaacata

SEQ ID NO: 6093 - DNA, 1815 bp, Homo sapiens
acctgttattttaaatcctccttgttgagatagaatttatatataataatttctatgtgtttcatcagatgtgtacactcacatatcatcaccctatcaagattcagttattatccacagtggtggttgaatgtccatttctattacattcaccattcctgataataattttatctctctctatgtgaaaagtatctaaattatttaaaatatcctcaggatatagaattttaaaagctaattagaaactcatattgctgttttctcaattcctttctaacttggggcaaggaaggagggtgcaatgggagaagccagcactaggattgttgcccagtgagagtaaaaaacgtcaacagttacattgcttagataactaataaagtataataatcagaagataaaaagaattctttaaaatcagtaagaaaaaaaattaacctaaaaagaaaagtggacaaatgaactggtatctcatagaagaggaaaccaatggcaactagacatataaaaagatagacaaaactcattagttttcaagaaaatgtaaattacaaccacattgaaattccatttcacacttactagattgcaaaaattaagaagtctgaaaataccaagtgttggcaaagatgtgtacagcaacaggatccttttcatgatgccagtaggagagtaagatgctggaactgctttggaaaacaatttggccctaacttatagtgttaatcactcacataccctataacccagcaatcccacaactagctatgtaccatcaaagaaatttggcatatgcatcaaaagacatttgcaaggatatttataggaaaatccttaaagcaaaagtctatgaaaaataatagtttacgtggacagaagaattggtaagtaaacattggtttatgtacaaaatggaatattatacaacaggaactactacttagaagcctcaacttggatgaccgttaggaaagttatagtgtttgtgttttgttttttttaaagcaagccagatatgattacctatggtatgatagcattttaaaggccctaccataggcaaaactgaacaatgtatagtttagtaatgtatacatacacacatatatatatttagcaagtctatttttcagaaaagacaataatgataaattataggataggggttagctctgagagtctgggagaggagagggatctggaacaatgatatttgatattctgcttcttaagttggatgccggattcactgggctcattttactgtgtgtgcttcataacttagaagtgtgtgtcatatattcttttcctttaatcaatgattacattaaaaacatgtttaacacttgcagtgagtcaggaccaagatatctacagtaactaaaggggcgagcttagagaagcagggagcaggtagcaacggaaaggagaggctgatcctgtcccagcccatatgcttcttcctggtgtagaggccagtttcagtgctgagccaggccacagatggaggcagggaaggggctgcacctgtcatgatgagtatgtgaacagaaggccagaacctctatgaaatcgccaggcaggctgtctcttgtcctttctttttctcaaagctggtatgaatccaaagaagaatgtccaatttcttatttacccaagggatttttgaggttctggaggtacatacatagatagccacttaaaagctttcttccccccccgacccccattgatttcttgtctattcagataacagttgttttcttgtctattcatttgatacatgggatattgctataaaaagaaaatgtc

SEQ ID NO: 6094 - DNA, 1045 bp, Homo sapiens
tgttctactttctgattgagtttctcagttttatcttctaacccttcaatggatcttttaatttctgcacctatgtgcttagttcctgagaatatgactgacagttttttggacacttttttaatttattctattttattttattttttgaggcggtgttttgctcttgctgcccaggctggagtgcagtggtgcaatctcggctcaccgcaacctctgcctcccaggttcaagcaattctcctgtctcagcctcctgagtagctgggattacaggcatgtgccaccaggcccagctaattttgtatttttagtagagaaagggtttctccatgttggtcaggctggtcttgaactaccgacctcaggtgatccgcctgccttggcctcccaaagtgctgggattacaggtgtgagccactgtgcctggccggacattttcttctttctacatagtctttcgtttgaattctgttttacatttgtttcagcttctgtttttcatgtataatttcctcaaatgttggatgatctcgggttctctgctcattttttaggataataatgaaaagctgcctggagctctgtgcccatgaaagggcttattgaacgtgatcttcactgtagagtgatctgactagactatagaatattttcctgtggctgccataaggacgtaccacaagcagtgtggattaaaacaacagaaatgtattgtctcacaatttctggaggcttgaagtccttaatttcataatcaagatgttgactgggccacactccctcagaaacctgttgaggagaatcattccttgtgaattcctagctgctgattgttgccagcacttcagtctacctccacactctacctccattgtcacataggactcgcccctcatgtctctgtgtgtctattttgcctcttcatcttaaaaagacaccagtcacataacttcatttaactacatcttcaatgaccctgtttccaaataaggtcacgttctgagggattggggtttaggactgtgtgttagtcagcttgtgtt

SEQ ID NO: 6095 - DNA, 1373 bp, Homo sapiens
cacacagcaagtccaaagtgcagccagccaaaactggatgtggtggatgaaaggtgccaggagggatgtctctggtagacctacaaagccaagaggatttttcgtgctgcacagggatgatactaaaaccagtgagaggctgggcgtggtggctcacacctgtaatcccagcactttgggaggccgaggtaggtggatcacctgaggtcaggagttcaagaccatcctggccaacgtggtgaaacccagtttctactaaaaattcaaaaaaattagctggacatggtggtgggcacctgtagtcccagctactcaggaggccaagacaggagaatcgcttgaacctgggagatggaggttgcagtgagccaagatcacgccattgcactccagcctaggtgacaagagtgaaactccatctcaaaaaatactaataataaaataaataaataaataataaaaaataaaagcagggactctgagggcatgcttcaaccagatgacacattggctgtaggccactggtgcccatgtagctgcacatgatccctgagcaccatgaaaaaatacattggcggcaatgtaaagaggaagagggtaagacaatgaaaaaggaaaaaaaaaggcataatcattaactctggggaaaaaagttacataagaaatgaaataatggagtatgactgcatttacattataataatgaacacagactaaggatttaacaactgtggttttgccatattgagagtatgggggaaagagaaggaaagtggaagagaactaaaatcctcatttgttacagtaggaaagtagagggtttaaaggagttgcatcggcagcggatgaagaggagaaggagactaagagcttgttgctttttgctataaaatttagcatttttgattttgcaaatcaagtgcatgtatttatttacacccaatgaagatgctatctgaatttttcatatttaaaagcatccttcaacatggttctatggagaaaaactgaaaattaaatttcaagttgaaaaattatttagagaacacattttagaatattgtctcaaaaaacaaagaagcatacaaatcccatttttcctcctcacttttaacatttgtgtataataatctattattctcctattttgtgagacaccattgtacatattgtgactattttgtgcagtacttgttttattttgacttgtgtttactactcccacgtagggcatcagcagtccccactctattatcttatcctcattcccttcctcatttatttttatcttacacttcgcctccattggtatttagcattctacatattatttattcagcatctgtttatttaatgcctactgcatagtaggt

SEQ ID NO: 6096 - DNA, 1035 bp, Homo sapiens
tcttttcctgtgggtttcatttgttaaattcattggattttaataatataaaagtatagctaattgttcagttttaactatttttaattatcttcttaacaaataagaagttgctttaaacattaaccaattttctatatttagctatacagagtaattgaacttaacatgtttttgtcaacaccaattacattttcagcttttaaaaatggtagcttttgtgaaatagaatcagtgaccagtatagcacttagatcccttctaactcatataatttttctcagccaatccattcacaagcttggcattgacatgtgctgctagtttataaactggcattgacgaaaatcatttgaatctcttctggctgagataatttgccaatgcaaaatacagttgtcattaatcctgcacattagaaattattagaaacatattactttttaactttaaatctcaaagagattttgagttattgaattcttaaggctttcttagcttgaactgataactatgcattatgaaccctaagtcaatatatttttggtggttttagtgatcagtaatcaaatttgtacttattatgcttgttcaggtaatttacttgactgttctatttgtttgtccaaaagataaaatgatgagagagattcgagaggtctttgatctgtctcccttttaagaaatgaagccagctggtaatgtatattcaggacttcctcagagtattggccaagaacataatgtttacacaggagtaccttggtataatgcatacattgtctcatgatactagtcataaaatattttatggattatttcacattcttcatatataacaagtaaaattaattcagttttcttctcccaacgtttaattctgaataactctatctactttaccctaatttttagcctcttaatttctggaaggactctaatttctattccaaatttctatgaattctaattgtaaattatcggaacagagttttatttatatgacctggtactagacttcttaatataactgtt

SEQ ID NO: 6097 - DNA, 1050 bp, Homo sapiens
tcagccttactggccacctggagacagtcattttgggcctattgaagacacctgctcagtatgatgcttctgagctaaaagcttccatgaaggggctgggaactgaggaggactccctcgttgagatcatctgctcaacaaccaaccaggagctccaggaaattaacagagtctacaaagaaatgtacaaaactgatctggagaaggacattatttcggacacatatggtgacttctgcaagctgatgtttgccctggcaaatgttagaagaccagaggatggctctgtcgttgattatgaactgattgaccaagatgcccgggatttctgtgatgctggagtgaagaggaaaagaactgatgttcccaagtggatcagcatgatgaccgagtagagcatgtcccacctccagaaagtatttgataggtacaagagctacagcccatcaagagagagcatcaagaaagaggttaaaggagacctggaaaatgctttcctgaacctggtccagtgcattcagaacaagcccctgtattttgctgattggctgtactactccatgaagggccgggggctcgagataaggtcctgatcagaatcatcgtctcccgcagtgaagtggacatgttgaaaattaggtctgaattcaagagaaagtatggcatgtccccgtactattacatccagcaagacactaagaacgactacccaaaaagcactgctgtacctgtgtggtggagatgactgaagcccaacatagcttgagcttccagaaacggtgctccccacgcttccagctaacaggtctagaaaaccagcttgtggctaacagtccctgtggccgtccctgtgaagatgacattagcattgcccccaacctcattttagttgcgtaagcatagcctggctttcctgtctagtctctcctgtaagccaaagaaatgtacattccaagcagttggaagtgaaatctatgatgtgaaacactttgcctcctgtgtactgtgtcataaacagatgaataaactgaatttgtactttagaaacaa

SEQ ID NO: 6098 - DNA, 1568 bp, Homo sapiens
acaggcttctggtaactttggaaattgtaacattaaaataaagaaaaatatacaggactcataaggagctgaaatgctcacaaatatcaaacaaaacaagagttaactaaatggactgaactcaggaaactgaaaccaggctgggagcggtggctcacacttgaaatcccagcactttgggaggccaaggcaggtggatcacctgaggtcaggagatcaagaccagcctgaccaacatggcaaaaccttgtttctactaaattaaaaaaaaaaaaattagccgggcatggtggcacatgcctgtaatccaagctacttgggaggctaaggcaggagaatcacttgtacccaggaagcagaggttacagtgagcaagattgagccattgcactccagcctgggtgacaagagcgaaactccatctcaaaaaaaaaaaaaaaaaaaagaaaagaaactgaacaaatctttttaacctttgcttggaatattgctgatccgtgttttgtttttcagagtcaaagaaactttgaactatttatggcctttaataattaagtaaggtatactcctgtgatcaagacttggagcatatttgtttctctctgcctggttcctctagaaattggaaactatcagtgagtatttttatgacaatatagttgtttgcatcagtgcagtaagagtccattttcaatggcggaattcttttctcactcttttcgttgtttaataattattatagcaataataataataataaataccaattattacattaactctctgcatgtctatgttcttattgcattttcttataagaacacaagacgtattggattatgaccaactctaatgatcttattttaccattttaaatatcctatctccaaatacagtcacattctgaagcactgggagttaggatttcaacataggattttgaaggggcacagttcagtctgtaacagtggttaaaaacccaagttcagaaaccaaattttctttgcacaaattgcagttttgcagattaggagatatgagactttggcaaacttgccaagaccttggtgacactctttatgtcttcttgttctcatctttaaaatgagaggtgaaagaggattaaaaattattacataaaaacaaaagacttaggatgatgatgaaatgctggtaatatatgttagatattagtattttttatctcaataaattcaattgctgtaactcttgattcctcatcttgctactgtgcaattgccctcctcttccctcagtgtcacccatcaaagggtagatagtctcattacaattcttacttctatatttcttttctgattgatcagttccgcctctttattgacactgggatttatatgcattgacttaaaaatggagaaactacaagcagcattagaggctgttttttaattaatgagtctctccgcttacaccatcaaactgaagattagctgttgatttatgagataccctcagcttgtatcttgtgccacatccagatcattgccaattcatttccagaaggaggatcagtaccattatctgct

SEQ ID NO: 6099 - DNA, 1033 bp, Homo sapiens
ttactatatttattttaaataatttatttataaattcactatatttattttaaagataatgaaagtgaggaagtcacagagcgattaactttatcacacacagctagttagttgtagagccatggtatgaatctgaatctacaaaattccaattctctaaatttttttctaagttgttttatgtttaagctatagttcttagtaatatatttatattgtgttaatttttaacacagcagtatactatctttttatgtgttattgttaataaaattatatggccttcaaaaaatgtttaaatatttttcaaagcttttttatatatatacatataatcattaaatttatttgtgatttatgtggcacaaagacaggaaagtatatatatgacaacaggtaaaagaataacaaatctaaaaatataataatggcaagaaattaaacgaatttcagaggatatcattttatatttaaaaaatcaagaattaaagttttacagtatagaaaaagaaagacatgtaatacaaaagctgatgaataggaagatggttgatagaaaaaataaaaacgatgttgaaaaataaaaataatgtcagaaataaaataccattgtaaattaacaattagagcaacaccagtattatcttaacgtaatgaaattgtataatttcgtaaaatgaaaaaaattatagtacccagtttcaacaaagggagaggagagcaagcttgttaacatttgcaaaagtacaggaggaaacaataaatagataaaaatagtcatattaatgaatgattatggagagaagataccagaaagccaacaaagatatgattggtgttcttgatgtaggaatcagaaaaggaaaaaaagaagcaacattcattcttatttctttcagccttaggaacaagttaatttgaaaatgtaaagataactatataaaaagataaagaaataccaaagtcagtataatactaagtaggtcaacatttagatatatgttggcaatttcaagcagaaaaagaaaatgaa

SEQ ID NO: 6100 - DNA, 1062 bp, Homo sapiens
tgcaggtataagaaagaatgtaacactgtggccctttgccctccattagcgctgggcagccatcccacacaacaagaagcagcagtggggctgggtcagccccagagccatgggcctgagcgaggcagaagaactgaacaatctgtaacacagctgggcaagggtacacctggcctagctgcaggctgagcacgggatctggctggggtgcatgccaagtgcagcccacatggctgaatggtccaggtacctccacccaggagcccaggaccaagcagagcccaggtgggggtgttgccagctgcagaggtctctggctggcaaagcagcactaaaaaaaatcatatgtcaaaataatttaatgcttaaactgttactatgatattcttagtttttgtataaagaagaatggaatatagaaggttagaggttcacctccacagaaatagtaagctgaagaagcagaatttaagctcagattttctaacttgaaatgttgtaatacactgtaactatctcaacagtagcaaacaaagccacaaatttatgaaaattctgctgctatttcaataagtttaaaaataaatgttttgacaatttaaaaatgaattaagttaaagctattgttaaataaaacgtaaatggaagacacaacttcacatttaaagagtgaaacaacaatatttgtaaactgaaacaaggtaaaacctatataaaaaaatgcttacaaaatttccagaagagacttactggcattgtagagatagatataaatttctgaataaaattctttgcagttattttattaacccttctattagtaacatttctaataaataattttgttgtgggaagtcagggaccccaaacagagggacccgctggagctgcagcagaggaacataaattgtgaagatttcattttaatatggacatatatcagttcccaaaattaatacttttataatttcgtatgcttttcttactttaatctcttaatcctgctatcttcgtaagctgaggatgtacatcacctcaggtccactgtgatgatggcgttaa

SEQ ID NO: 6101 - DNA, 1546 bp, Homo sapiens
tatttgcatcaccttaaaatatctccacataaaatatttattaaatacaaagaaaaaaatagtagcattataatgaagaatcacataactcctgatacaatatacttcaaaagacaccacgtagcttctttggttatgtttttctaaaaatgcataacattggttaagccatcaaacatcaaaatatcaaactgaaattgaaagacattctacaaaataatatgccagttatttttaaaagtatcaaggccatgaaagataaaacaagactgagaaactataaaggactgaaaaagactaagaagtaatgatgatacagtacattgtaagagccgggataggatctaagtccaacagtataacagtagtggaacaactggcaaaattcacataacgtccacaggttagttaatagtattctatcaatgttaatttccaagttttgataattgtatatatcatggtatgtagtgttttaaaagtaatgaactggctgaagaatatatggggattctgtattatttcaaaaattttcagtaaatataaattatttcaaaacaagaagttctagatttgctatttcctaatgactaataatattgagcatctttacatatatttattggacatttgtatatcttctccagagaatgtctatataaatcctttgccccatgttaaaataggattgtttacctttttatctatatcctaataagaaagtttttttcatttgtttgttttactgtggcaataccattgaagagcatttcactattaggtaattttcgcttttaaatttttcattataatatttccactatgtaaatgtcattgaattttgcactgcaggtagataaaatgtagttttaccaacaaaattccttgaagaagttatgaaaattgctctaaattaacatactggcccacttgaaaaataggcacatgattcaaaaagttgaaataccaacaatagtagcaaatctatgtaggagaacactgcttggatatgtctatgaagatatctagaacttgggaccttctttaaagttcttctgcaaagctaaagttcccctaaatgtttgtataggggatggaaggacctaacctgacctattctctcttctggtcctgaaagacaaaaactggaccaaatctatatgactgtaatagagaagaatgtttctgtgtcccagcaaagtatctagaaaagtagaccagaagatagcatggttacttgtttaccaaatcttactaattgaagtcattcttccttccttgtgaagttactaaggatggttaggagttagaacaagcacattcaagaagacatagtgtatattttatccattagcaccaacctgagaaggaaaagggaatttcttacctgtaactaaactggtcatatatcctggtttataactgtatgccttatattatgtcagatgatccctctttctctcaaaatttggacaataaataatatggttacactacccatatattaatataataataaataaaatgttaccatatgttcttctgg

SEQ ID NO: 6102 - DNA, 1035 bp, Homo sapiens
taggtgaatatttcagttgattacacctttgtgcttggtgattttagtaatttttctcaagaaatagaacccattcaacattgaatatacacagctagcctctaatacatagattagccattcattttgtatctttggtttcattgtaggtaatttcctgtctatatgagtgtagaaaattaacactcaattttaatcctgttgcaaacttcaaatcatggtggaaggtggaatttttaagggagcatatccatattaaaatgtatcaacactgtaaaatagtctgagttgaattgtggctcagcaggattaccagacttaaaatttgtcaatttatatttcctctgctaaaaatgtcaatgttaagtttgtaaaatttgagagtagaacaataaggggtaatgttatatgttgtaagtgccttctgaaaaaatacatactcttcttttcacctttaccatgtagtctgtgattagcatatctatctataataatcagagccatttgtttcaaaggcaacaatgttgactgtggtgaacatatgccagtctgcagagatattagttatactccatccatatagtgtgtaagataatacataattattgaggaaccatttggatgaagaaataagttgcttgaagaaaatagtcataaaattcacttctaaattataaaataataattgaaggctggcccttgcatttgaaaatattaatatgtttaagtcagctacgtgccagataaaaatataccacaggcctccagaaaaactcagcaagtatttagaaaatggaagcaacagcttacaagatatcattttaatgggtttataaaagctcatgtctctaagggactttttttgctcaagaaaatgtcatggagatgtatgtctcagacagtgtttatgaacagtatagttattcatagttttctttacacaatgcctatggtctgtgtgtcaaaccgcctgcatgcatttacgatggcttcctgccatataaaatctggctgacttaatctctgtgaacttgt

SEQ ID NO: 6103 - DNA, 1106 bp, Homo sapiens
tgccacattttcttagtctagtctatcattgttggacatttgggttggtcccaagtctttgctattgtgaatagtgccgcaataaacatacatgtgcatgtgtctttatagcagcatgatttatagtcctttgggtatatacccagtaatgggatggctgggtcaaatggtatttctagttctagatccctgaggaatcaccacactgacttccacaatggttggaactagtttacagtcccaccaacagtgtaaaagtgttcctatttctccacatcctctccagcacctgttgtttcctgactttttaatgatcgccattctaactggtgtgagatggtatctcattgtggttttgatttgcatttctctgatggccagtgatgatgagcattttttcatgtgtattttggctgcataaatgccttcttttgagaagtgtctgttcatgtccttcgcccactttttgatggggtggtttgtttttttcttgtaaatttgtttgagttcgttgtagattctgaatattagccctttgtcagatgagtaggttgcgaaaattttctcccattttgtaggttgcctgttcactctgatggtagttttttttgctgtgcagaagctctttagtttaattagatcccatttgtcaattttggcttttgttgccattgcttttggtgttttagacatgaagtccttgcccatgcctatgtcctgaatggtaatgcctaggttttcttctagggtttttatggttttaggtctaacgtttaagtctttaatccatcttggattaatttttgtataaggtgtaaggaagggatccagttacagctttctacatatggctagccagttttcccaacaccatttattaaatactttgtatcaaatacaactcttcaaaatgtatgacaattttcttatttgataattttaatttcatgatttacaaaattaagctcactaaatatgaagaaaattcacaactgaatgtattctaaatcctagggaaacattccctaaattgagtcatttaatagttctggaacagggatcagcaaattttggcctgcaaccaattttttaaaataacgtttgtt

SEQ ID NO: 6104 - DNA, 1058 bp, Homo sapiens
gcaactctgaacaaaaggtattccgaaataaaatcctatatctaaggtaatgtatgatgaagaaacaacacggaagccttaaaggatttgcccaagtttgcacgatttggcaaaggcattgctggctccagaacactggcttcagcttatttcttttttttttctattgcataataaaagcaatgttttccatcgtgtaaatggtggaacataattcctctggatattattatttaaaaaataaattgtaaaacatgccaaataagttcatgaaaagactacagtaaaaattaaaaaggaaaactagtgtctttattgcagccttttctaaactaaggtgctttgtgagttacaagagagggatagaggacagagcattttacacagcttcctgtctttgaatgagcgtccctttatttctgcttactgagaatattttttgagaaacatttctctcttggaaatgattttaagcagaccgtcaacaaactttcaaaagctttcttgtatcagtatatttcaaactcacacacaccttaagttatgccatatgacttgcacatgacatgcagcatactgagataccattaactgaactttcctgtattcaagtgtagggttcaagaggtgcaaaccaatgtttacttttctgttcttataaaattctggtgcttcagaagaccaagaaaatacatgaattcaggaactttcacctttaagtattcaaatggcatttggtttataacgggcactaaagaaatatgtaacacagatcacttacgatagcatcctgctgcagtctttaaaattagtcctcaagtgattgaaaacattagaggcacgtcttttgtcattgttatatgtgaaaccgcaacagcaacctacaccttccacacacgcacacacacacacacacacacacacacacacacacacaaaattaagacaattggagctaaaaaatacaatatcataacaggttatccctttttgtacttgtgcacattttttatctacttgccctgatttagtatttattttttttgctgggttcccat

SEQ ID NO: 6105 - DNA, 1082 bp, Homo sapiens
tctggggataacattacttttgtaaaacctgagatcagtgcttgagatattttacagacactgtacttgatggcttatttggtcttgtggcccccacccaggaattgactcagtgcaagaggacagctgggactcccaatgatttcatctctcaccgcaccagtcagcactccccactgtccaacccctgccaccaaattatccttgaaaacctcgatccccaggttttcagggagactgatttacgtaataataaagctctggtctcctgcacagctggctctgtatgaattaaactctttattacaattcccctgtcttgataaatcggctctgtctaggcagagggcaaggaagaccccttgggcagttacattatctcttttcttcttagaacataagtctttctccattgtattgaaaggtcattaagagtctgttcaaataactcatatgtgaaatatgacaagaattccatactaatataatgttatccagtaatatttacagcaaagttactatttatgcagtgttttgctggagccaatttataatggcacacaagagtcaactgtgcacctctcttcccaatgctacattcgatgatgtcatcaaaataaagctgagatttgccaaactcattgtcaatcagagtttgcctaaggaggtatttctaagaataaaacataattgagtcccgaaaagatatgtaaaatattcatttttaatgatactgctgctgttactgacaatagtaattatatttattttttggccaaaaaatttaattataaacttttgccaaattgtctttgtcaattaataaagtttaaaatttatcaagtatttcttctactgtgtttggaaaaattccctggatctctattgagcttactttgaataataaaaaaaaaactcttattttaatatgaggaaatcttccagtgctgactttgccctgtatcagacatatattcttaaaataaagactaaatattttatgtaagcattttagcaaatgtttccagtactttggatggcatcatgtatatatattagataatatttacttaaggatgcca

SEQ ID NO: 6106 - DNA, 1066 bp, Homo sapiens
gaagataaaatcaggagagctgattgcagcaactgtcctgtggatcttggtagctgctctgcattctgctcagcaggaatgccatgctgaggagactgtcaagtctcatagcactgcagaggttatgagccctggaaatgcctgagtccttttttgtgtttatgtggcaccttcccctgacccagaagcagctgaaatatttagtaagttctggtgctcgcaataagtcttttccaaataacaaacaatggcagagcagtgatttcactccagtgcagcatttaaattctgatacacactaagtcctccccactcaggagtcaaaagctggacagcaattaagttctgatattaagttgtaatgatctaagaccacaaaaaacacctgcaaaaacagaaagaggtgaccatctcctcaaattcacaggcatcaatataaagataaaaggattaataaaaatcaggaaaatatgacaccaacaaaagaaataaacaaagctctataatggacacagaagaactgatctataaaatgtctgaattccaaattcagaataatctactttaaaattttcagggaatcacaataaaatataaatagaaaattaactaaaatttggaaaacaatccataaatacaatgagatatttgacaaataaagaaacatttttaaagcccaaataaatcctagaaataaagaatataataactgaactgaaaaaactcaatagaaagcttttacagtagacataatcagaggaaacagcttgaagacgtatgaaattaatcagaggagcaaaaagaaaaaagaaaaaatatggtgaagaagaccttcaggaattgtgggacactatttaaagtaaactaaccttcacataataggagtttccgaatgagaaaagggagaatagacctagaacacatatttaaggaaatcatagctaaaaacctcctaaatctacatgtagaaaacaacatccacttacaagaaacatagaagttactaatcaaattaactcaaaaggaattccccaacacccttcaaattatgataaaaaaaatcaaa

SEQ ID NO: 6107 - DNA, 1069 bp, Homo sapiens
aagtaaacaaattcagggcactcaaaaactaattgggccaggtgtggtggctcatgcctgtaatcccaacactttgggagattgaggtgggcgtatcacctgaggtaaggagttcaagaccagcctggccaacatcgtgaaaccccatctctactaaaaatacaaaaattagctgggcatggtggcatgcacctatggtcccagctacttggaggctgagacacgagaatcgcttgaacccaagaggcggaggttacagtgagctgagatcatgccactgcactctaccctaggtgaatgagcgagactctgccccctcccctccaaaaaaaaataagaaactgtaagtgtatataaatcacttacatctttttttcttttctttttttttttttttgagacagcatctcactctatcacccaggtcagagtgtagtggtgtgatctcagctcactgtaacctttgcttcccaggctcaaatgaattacccacatcagcctcccaagtagctggaaccataggtgtcacttacatctttatataatatcgctttcatcttttagtatctaaaagaaaaaaaattaatgataataacaacaattgtttaagagaaagaacatgtaaaaagaagtaaaatttacatatcaaaatccaaaatttggaaaaagactggtttaaaatgtaaaaacttatgataaatacactaaaaataaaaagtgctgaaccaaagcatactagagagaatcactttaccacaaaaaagacagaaaaatgaaagaaagatagtttgctgagaacgatggtttccagcttcatccatgtccctacaaaggacatgaactcatcattttttaaggctgcatagtattccacacacatcagggcctgttgtggggtggggggaggggggagggatagaattaggagatatacctaatgttaaatgacgagttaatgggtgcagcacaccaacatggcacatgtatacatatgtaacagacctgcacattgtgcacatgtaccctaaaacttaaagcataataaaaaaaagaaagactctccaaaaca

SEQ ID NO: 6108 - DNA, 1034 bp, Homo sapiens
acaaatacatggaaattaaacagcacgctcttgtatccccattaagaaaagaaatttctgaaaatttctggagatagaaaatgaaagcctatgggatatagcagaagtatgtcaaagaggaaacactagagcaataaattcctacatcaaaaaagtaaaaagatatccaattaaaaaccatctggtgcacttcaaggaactagaaaatttctaaaaagccaaatgcaaaattagtagaagaaaagaaataacaaagatcacagcagaaacaaaaaaaaaacagagattttaaaacaatacaaaaaaatccatcaaagaaaaacaatttgtttgaaaatcaaaagaaattagctacactaagaacaaaagagaaaagagtcaaataactaaaatcagagaagaaaaaagatatattacacagaatttgtcaacagaaatacaaagatcataagagattttatgaacaactataaatcaagaaatttgaaagctagaaaaaatgaatccagactgaattatgaagaaatagaaaacctgaacaaataaagagtaacaagattgaatcagtaataaaaaaaaattctcccatcaaagagaagcctaggatctgacaaattcactgctgaattctaccaaactatcaaataactaatactaattcttctaaaactactatgttaaattgaagaagaaggaatatgtctaactcaggctatcaggcaagcattaccttgacaccaaaaccagataatgacacaacaataaaagaaaactacaggttagtatctctgaaacatagaggcaaaaatcctgagcaaaatgctagcaaactgaatccatcaacacattaaaagatcacttactatgatcaagtgtgattcatcataggaatttgaggatgatgtgttaggctcttcttgcgttgctacaaaccaacacctgagactgcgtaatttattttttaaaaaagatttaattggccctacagggtgtataagcctggttccaacatctgctcagcttctggggaagcc

SEQ ID NO: 6109 - DNA, 4364 bp, Homo sapiens
taggaagaataaattctggtgttctattacatagcagagtgactacagctaaaaatagtgtattatatatttcaatatagctagagaagaagatcttgaatgttatcaccacaaagaaatgataatgctgtggtaatgggtatgttaattatcctgatatgatcattaaacaatgcatatatctattgaaacatcacagtatacccccaaacatgtacaattattgtgtcaattataaacaaaaataagaaagaaaattcagaaggagggatttttttttaatcttgtccttttttgttcacactccaggaagatccttatgtttcaccatttacttctatttcaacagttgagtgtgatataattaattagattagaaagtagggcaggatatacatgtcaagcacattgaagtaatttgccatgattatctctttaatattttcatgtaaaatcaaagctgactgttatattcaagatctatgtgaaagatatacaccttctagtctatagttttgaacttttttatttgattgtggtttactaacattaatttcaatatatgtgttactgcctcacatatgtgctttttatatctagaaaatataagggctcctgaaatttaaaaatagtatgaaattagtaccttatagtaaaaatctctagcttgaccaactatgaggatttaaaaggtggcatgaggatacgtggttttattctaacatgttttaaaatatatgtagactgataaacttttaaataaataaaatggctggtaatagctattttgaacatcacataaacaaatgtgtaaatgtccagtggtaaaatgatgaaggcagtaggcataatgcaaaatatacgctaaagtgttaaaccagtaactcaactccagcatggttttgccattcaggctaaaggaaacacaagaattcctgccttgccccccacgtagtttttctaaagaaatgcaaaattcagattcttatttgaaatattctgatttctatatgtctctcaaagaacagttgatatttaatgactagtgtttctaggtatgtaagctttatattctactattttgttgcattctcataccactttaataagtcaggcaaaggaagcaactgaaggctcaataaaggacggtagatcaacagtaatgattgatacctaaattctgataacaattgtcccacttgattcatgaatttattatcactgaataaagagtccttctgattttctctactttgtctgaaaaattcagcagggatttttgctgttgtttatttcccttctcaacaggtgttttgccttcatgctcaatagctatttcaattaaactgtcagaatatgtttcacacttcccaaaacctggcatcttacagcaaagtgtgtgcaaccttttattaggaagtttggagagcttgtaatggatatacaaatgatttttccataaagactttctgactttagaatgaacagcactaggtaaatccttatgtagtttattgttataagaaaaatcaaagatttggtttaattatacatagatttgaaattcagttgcaatggggactgaaagtaaaggatattaagttttgctctgtaagctcttccaggaatgaattgcattggcctcttgaagtggctcctagtcatcactttcaaaggcatttaatagttgtagtagatctaaatcataacttatatgtacattgatacttgctagctgtattaaggcctgagtcagcagtggccacggctgagcaagatcagttatttggtggctttcacccaactggaaaagggttgcagctttcactgtgactatgataaatcactctcttttttggcctgatacaggagatttttgaactcgatccattgtggtgttttttgatgtcattttaggtgaactcctgagaaatttggtgtaaaatagaaatttaaatctggattttatcactaaaaataattgtaggattttgatattgaaagtaatcaagagataataaagtccaattcctcattttaaagataggacaaataggaatgggcaaggtgactgctccaggtcatatagctttttagtagccaagctgaaacaggaacatagggaaccagtttataaggccaatgtttgagcacctgtactatgctactaagtactagcatttaatatttagccatgccaatgtaaaaagaaagaacaggagaggtggaaagtcaaatgtggagaaacaacactgatcgtctttgttagtttaaatttttctttacaaggtgtctcagtaaggcaattttatgtctctcttttgctaaaaagcatctgaaaataatcaacaatttcacaaaagggacaaaatcatacagtttagaaataattacaataactgtccataagcaaggattccttcctaaaagatacttgctttacttaatctttgaccatcttctgcattcacactactttcctaagtgcagtataaatggctcccaaagtatggaatttagagttaatgaggaaataatataggttcaatatcattatactatcaaatattgtttaggcttagtaaacaacaggtgatattgctactgattaatacattcagaacaggttcatggaaatggtgacattgtatttgtccttaaatggtaataaatttttcaacaagtggaagtgagagaacaactgtaagtgtatatttcaggcagagtgagtgacaaaggcattgagatagagtggtagaggaacaaaaggaacacagcagaggtagaatttggttcaagggtattgtgtttctaaggccaacaatagaagataattttggtaaataaaagatctctagtaacatacaatggtaccagggcattataatataggaaaatgtttaaacagagaagtgatatgttcaaaactgttttagaaagataatgctagcaataggtttaagatggattgcacagtgatgatacttaaaggaaagaaggattctgagacttggatttggatggagcagtggaaatggctgataaagaagcctgtgactttcttcagagaaaaccagcatatctttataactgattcaatggggaaagtgaacaatataaagaaaagagtaacattaaacatgaatttgaaatttcaggcctttggagaatatggatataatgaacaaagattaggaaataagtaagtggaaaaaatttggaaagaaagatgaatcttctaagaagatgctaatcttactaggtgaattttattgatggcattagatatataagtatggggggcatcctaaaaatgtgatatgagaaacattgagggatatgataattagaaaaatgaatgagcatttcaagaatgtccctattgccacagaaggttgaaaagatgatccagtgaagaaacaagagaagatgtagccaggaaatatctgaagcaaactggtggattctgaatgattaaaaataataataaccaaagagaaaagaagtagtggatgaggttggcagagatgaggaactgccatttctccaaagctctgaaccaaaagcaaagactcatttgaatgttttaccaagcttgagtactttacaaaacttgaaagtgtgcaagagcaaagaggtatcatttagcacactataaatagcatcttctttaaaaatgttgtacacatttctcatatttgaaagtaaataacctgagatttaaaacatctgtcaaacaatctgtgaatgttatgtgccattttaatacattttgacattatttcatgttgaaacatactttctctgattgtattgactggattatatagaacctctttgactgacttagtctataacttgcccagataaaatgtacattgcaagtaaataaaatatgggtgatatgggaatgaaatttcaaggcaagtttcgtgtataatctgtagctcctctcaaactatattaccactcctaagacatcctttatctgatacgaatgcctaataaggagcaacatttctttttatgctataattacattgtactaattctttttctaaaatggaaatgcataccatcaaagaataaaacaaaatgttaagaatttcacacatttatatttgataaaatgacactttgtattcaaatgacacattcattttttccctactacttgaatgaataaaaacatcctttattgttcataagcattacataacgtaattttccaaaataataattatgtactttccagcaagtacaaaatctttttaaaataaactttatttggggaagagataatttaacatatcaatttcttcaatttataaaagtgataatttcactccaatatttgaagaata

SEQ ID NO: 6110 - DNA, 1026 bp, Homo sapiens
tattaaaatgctgtacttctccatacagtatttaggctttttttaattggtgtgttctagttttcagtgtatatatcatgaaaacttttatttatatctaagtattttagttttaggagattttatatatgctattaattttataatttgaaataatttgcttcattgctagtgtataaaaatataattattttttgtatattaccttgcactctgcagccttggaaaactcatgtataacttcttagaagtttttatgagttgtttgggttttctatgcatataataatatcacctgtgagttgaaaccattatttcttcctttgattcattttctttttcttgtgttattacactggttaaaacttaaaatacaatgctgaatatgaactttgttcccagtcttagagaataagcaagcattcagtcttttactattaagtaacatcacagctaaaggcattttattgataccctctattagataaaaagaagttccactgtattcctagtttgctgagaatttttaccatgaattaacgttaaagtttgtcaaatgcttccacatcttttgagattgacatatcatttttggatgataagttgaattacattcatggggaaaactgttgttcaaaattatttttatatgttgatagaataaatgtattagcattttgctaaagatttttgagtttatgttcataaatattattgctctatagttttctagtattgtaatttctgtgttgattttgatatttatgtaatgctagccttataaagtttatttggaagtattgtttcattttttctgaaagttgctgtttgtaactgtgctgtaattctccctaaagtgtttgaaatttttcaccattgaagatttctttgattgaaatatttttactacaaatccaatttttagtagatacaggactattcagcttgtctgttgtctaagtgagttttcataatttgtgcttttttggaattagttcacttcaactatttgtggaatttatacgc

SEQ ID NO: 6111 - DNA, 1052 bp, Homo sapiens
tacttgctcagtttggctagagtttcttcagttttatagatgttttaacaaaaaactatctttccatttcactgattttttcaattctttgttccaatttaattattttcatctcaagttttaatttctttgttgtttttatttatttatttatttattgatgtggagtctcactcttgtcacccaggctggagtgcaatggcacagtctcgtctcattgcaacttccacctcctgggttcaagtgattctcctgcttcagtgacccaagtagctgggattacaggtgaccaccaccacgcctaattaatttttgtatttttagtagagatggtgtttcaccatgttgaccagcctggtcttgaactcctgacctcaggtgatcctccagtctcggcctcccaaagtactgggattacaggcacgagccactgcacctggcctatttcttatttctagtaattttgaatttaatcctctatcctttccctagtttcttaaggtgaaaattttatttattgatttgacacaggtttttttctgctatatgcatttgagaccaaaagaaatctctaaacaatgctttagaataattctacacatttggatctgttgcattttcattttcattcactccaaaatatttgcaaatttatcttgagaatttcgcttgactcatgagttacttagaatacttttgctagttttcaaaaaactggagatttttcagttatcttcctattactgatatatatatttttttgagacagagtctctgttgcccaggctggagtgcagtggctcaatctcggctcactgcaacctccaccttccaggttcaagcaattctcctgcctcagcttcccaattacctaggactacagatgtgtgccactacacccactaatttcttttttttttttttggtatttttagtagagacagggtttcactgtgttagccaggatggtctcaatctcctaacctcatgatccgcttgcctcagcctcccaaagtgctgggattacaagtgtgagccaccatgcctggcct

SEQ ID NO: 6112 - DNA, 1665 bp, Homo sapiens
cagatggagcaaacaggaaataaagactaaaatgatgaacttaaattgaaccacatcaatctttacatcagatgttaatcatctaaatacttcaattaaaagcaagagattggcagaatagattagaaaggaaaaaagcaagatcttactgcatgctgcttacaagaaaccaattttaaatataaatatgcagaaaggttgaatataatggaagaaaactgataaacccacacaaattgtgcacatcagaggactggtgtatccatttaaataaaggattaagcagactccaatatcatgagtattactagagagataaataaagatcttttacaataaaaagtaagacaattcatcaggaagatataacaattataaatacgttcctataaacagtctcaagataaaagaaaataaaatggagatcaaagtaggccaaaagtaaataagatgggggactaattttaaaaaacataaattgatgaaataataaaacagacatgttttagaagattaacagtgcaaaaactggttctttgaaaagatcagctaattaccaaactgctacttaaattgatcaagaaaaataaggaggaaacacaaataactcaatatcagggataaaatatttcaaatataggtctgatagacattaaaatgattttaatagactaaaccatattacatcaataatttttataagttcaatcaaatatgtgtatttcctgaaaaatataacttactgaaattgacataagaaataaaaatagattctgaaagtcattatatctatgaagttaatggaatttatcatgaaaaaaaatcacagataggaaaatccttctggcttaaagaagtttactgattaattctatcaagtattgaagaaacaaaaaataccaaacttatactaactattttagcaagttgtggaggaatggtcactgtatatttcatttaagttgtccaatttcttaacatgctttttgagggcaacataaccctaatatgaaaaccttacaaacatgatgcaaaagtgaaaagcacagatcaatttcacttatgaatatgaatgaatatatttacaaaatattagcaaatctaaactcaatgtatataaaaagaatggtatatcacaaccaagcagcaattatttaaaggacttaaagttttaaacatttgaaaaccacacaatgaagtttataatatcaaacaacaataataaaagttacatgataattgcaatagatttagaaaaagcaagattagataatacaagattgctatacaaaaatcagctatattattttacattagattcaaaaaattcggaaataaagagaggaaaacactttaatttacagtaaagcctagaaacaacaacaacaaaaacaattagaactaagtttaagaaaaagcattaatgaactttacacaaatgttattaaagaaattttttaaaagacctaagcaattgtgaagatataccatattcatgattggaagactcagtattcccttaggatgtcaattcttggctgggcatggtggctcatgcctgtattcccagcactttgggaggctgattagggcagatcacaaggtcaagagacagagaccatcctggccaacatggtgaaaccccatctctactaaaaatacaaa

SEQ ID NO: 6113 - DNA, 1578 bp, Homo sapiens
aattagctgggcatggtggtgcatgcctgtagtcccagctactcaggaggctgaggcaggggaattgcttgaaccagggaggcggaggttgcagtgagccgagattatgccactgcactccagcctggcaacagagcaagaccccgtctcaaaaaaaaaaaaaaaaaaaaaaaaaaagtccgagtgtcttcctacctccaaatgacagcattagtgtcttagcaatggtttttaaccaagctaaaatggctggaatgccagatgtagaattcacaatatggataggaatgaagaacattgagattcagggaaaagccataacccaatccaaagaatctaaggaatacaataaaatgatacaagaactgaaagaagaaatggccattttaataaggaaccaaactgatatgataatgctgaaaaacttactgcaataatttcacaatagaattgcaagtattaacaggcaaagtgaacaagcttaggaatggatctcagagctggaagactagttctctgaattaactcaatccaataaaaataaagaaaaaaatgaagaaaacccaggagaaatatgggatcaagtaatgagaaaaaatttatgacccattgacattcctgaaagagagggagagaaagcaagcaacttggaaaacatatgtgaggatgttgtccatgaaaatttcccaaacctcactagagaagccaacattaaaattcaggtaaggcagagagcccttgtgacatactatacaagatgacatccccaagacacataatcttcagatttcccaaggtcaaaataaaagaaaaaaacgttaatggcaaccagaaggaaggggcagatcacctacaaaggtaaccccatcaggctaactgcagacttttcagcagaaactctctgagccagaagagagaaataatagtgggaggctttgccattccactgaccttattaaacagatcactgatacagaaaactaatcaaaatattcaggacctgaactagacacttgaccaaatggacctaacagatatctatagaactctccactaaaaaacaagagtatacgttcttctcatctgtacatggcatgtactctaaaatcggccgtaaaacaattctcagtaaataaaaaaaatactgacatcataccaagtgcactattagatcacacagcaaaataaaaatagaaatcaacactaagttcgctgaagaccatacaattacatggaaattttacaatgtgctcctgaatgacttctggataaacaataaaattaggccagaaaacaagaaattcttcgaaactaatgaaaacaaagacacaacatagccgaatgtctgtgacacagccaaagcagtgttgaaaggaatgttcatagcacaaaatgcccacttcaaaaagttagaaagaattcaaatgaacaacctaacatcaaacacagagaaactagaaaaacatgagaaaatgaaccccaaagctattaaaggacaagaagtaaccaaaatcagaactaactgactgcaattgagatgtgaaaaaccatacaaaaaatcaatgagtctagaagttg

SEQ ID NO: 6114 - DNA, 1013 bp, Homo sapiens
cagccgatttcagtgcctagaatctagatgctttgcacctagtttcacctttgctcacagatgctagtgccttttagaatcccaagaggccaaagtaaaactgaaaagcctaggaggacctggtgtggcaaaatctcatcatgatccatgcaacagtggaggcaatgttacgctctgcctcaggttatacttctatgcaaattaaaaataaaattcataggaagcaattatattagagttggtatttaatccagcattcttctgaattatcttacatataaacttagttcatcttaatatgagaattatataataaatttgaggaaatcttacagatttgttcaaaatatgcttgctgaataaataaattaatagtatatgctagcacagtgtatgcatgtgtgttgcatgtgtgtgtatgtgtatataatggctaatttttaatattacctatactaatgcctctaaaagttaaatcttgatatacactagagcaagattgtccaacccacagcccattgaccacatgcagcccaggatagctttgaatgtggcccaaaacaaattcataaatttcctgaaaacattatgagattttgttgtgatttttttgttttcagctcatcagctattgttagtgttattgttagtgttagtgtattttatctgtggtccaagacaattcttcttccaatgtggcccagggaagccaaaaggttggatacccctgcattagagtaaatactttgcattcataaatgaaatacaaaaaagagtagtataataattcaacaaaatatttctgcctttaatacttatgagacatatttaacctaaatttaagcattttattgggcaagtcaccatttccctttaaaaatttgtatattccaaaaaaattagccaggcacgggggcacgtacctgtaatcccagctactcaggaggctgaggcaggagaatcacttgaactcaggaggcaaaggttgcagtgagctgagatggtgccactgc

SEQ ID NO: 6115 - DNA, 2917 bp, Homo sapiens
catgttgccaaattggcttataagtaaatgattactcacaaattaagtaaatccaaatgcttttcaagttcacataaatttagtaatctttggtaaataaaaataattttaaaattattagtaaaacaaaactagaaatgcctttggaattgtaagcatacattttttatgtgggcttacagattattttatattttgcctctgctagaaattttaaggtgtcaggggttggcacaaccacaaaagttataagagtacaaacccaaccaaaaaaagaataatctttgtttatgtgaattttttgacaaataagactaatttaagattgctaattcaataaaaacacctgaattttctgagttatcagcaagatgctcatgtgtttcactttaaggttctttcttaggtgaatacttggtattccaagggtacactaaatggttaacaagaaaataacttgaaatgatgactagctttgtctaatatctcagttttcagaaataatttggataaaatgttaataattaaagaatttctgggtaaagtggctcacacctgtaatgccaacactttgggaggccaaggtagaagtattgcttgagctcaggggttcaaaagcaggccctggcaacataggcccctatctctaaacaaattttcttaaaatttaaaaaatatttttagctgagcatgttggctcacaactgtgtccccagatattcaggaaatttaggtggaagaatcacttgagtctgggagattgaagctacagcgagccatgagcatgccacttcactccagcctgggcaatagaacaaaaccctgtctcaaaaataaataaataaataagtacatgtaaatgggatacatgctcacttataaattttgtaatttaaaatcttaaaattattttgaattgaatagtagatgcttgttggatgtctgggtaattttcaattaagaaagggttatcatatggaaaacatgttactaaaaattgtggagtggtttcatctataaaatgttaacatctgagagtcaggtaacaatttgctgcttcctaaaatttaaggctactaagaacaagaattctagttaatacataattctgtaagttgtgtttttattaagaaaagaggtaattataaagttatgaaagaaggtaggaagaaacaagtaggaggaataatgcaaagatacttaaggatatgaagatgtatttttgtagggaaaattataaagaaaaaagaataattttgtatggaaagggatcttgtatgctaaatttttatcctaaagtacaatgactggttttttaaaagagagggaagtatgggaaaaacacaaagtccaaatgtcattaatggtctctgtaagtcatgataaggtttgtgaaatggaatttatgaaaggaattgtatatgtaagttcattataattataaaggaaagtatttatttactcttaataaaattataagaggttcttatttttaattctatgacctgtctccttttgaaaactccttagatttatatcttggaagttcaacttttggccaggtgctcatgcctataatcccagcactttgtgcctcatacctataatcccagcactttgggaggctgagataagagatttggttgaagccaggagttcaagaatagcctaggcaacatagtgagattctaccttcataaaaacttaaaaaaattaaaattatcaggacatgatggcatgtgcctataggcctaggtacttaggagactgaggtaggaagattgcttgagcccagcaggtcaaggctgcattgagagccacaactgccgcactgcattctggcctggacaacagagggagaccttgtctctaaacaaacaaacaaacaaacaaaaaaaacacaaaagaattttcagcttttgctgtgtatcactattttcgttgtttctctcccttttaaaaggcctgagatgatcactctctctcaacttttatcttagctcctgtaactctttttctctgtttctaattgttgttgtggcctgatgctaaaatgcttcatcttgagtgtctaacaagtaatattttccaaaaatctaacttgattttgtcctctttgcttttcttcatatttctgaatcatttcatgtaactgggaaacttctcatgcagttacaaggagtcatatattctcctgctatactcataccttgaacacactccctgtgtatggttaatgtcaaatacctttattatcaagtctgacttctaggttatctaaatgggcttcccataaggagaagcagtcacactgcaggtttttctttgcttttttcataatcaagttaagaaacaagagtttacattttatcaagataattactaggctgtctttattaggtttctgactacttacttagaaaaactttaaaaaggttaaggcttttatattgatgtaagtttttctgtattgcttgtaaagtcttttgattatcactcttgcctaaatgagtaactattattctatgttgataaaatgttgcaagccttttaacacctttgataaacgtcctcaaaatcaaaactcttaagtctctgaactagacttattactggggacttatcaaagctatacaaattaaattactgtgaggttgaagaatccttttcacaacttccagttagatcataaactccagtatcaccacctccactccccttgaaaaggtcctttatcatgtgctattaactaatcctgtgctgttaagttacagggctttgattcagagtacaaagatcttatctaaagatggcaccaactcctgccagtatctgacaccaaactttagttaaccacaggcttatcttcagacctgagaaaacataacaatcaaagtaactacctcatgagacatat

SEQ ID NO: 6116 - DNA, 1069 bp, Homo sapiens
tcttaagacaccctggtatgaatagctgaaattgattgatagtaatctcagtaaatcgtttcattctaatttttggtatatctatactgctttgaataactcttctacctacagcccattaataaatatttgcctagtcaaattttagtttgtgctatactcctagaaggacatggggtgtatggaagcgaaactaactggatatttaaggcattcaataatgtctttttgcttccgattctagctgtataacataggtaaatctcttaaattctcagaacttcaattcatttatatgtaaagtgaggagttgtaccatattggtagttattaacatgtactgtacttatgaatcagtctgaaaatcttgctaaactgcatattctgagcttttcttaatttttttttgttttctcggaaacgctgattctctaggtcttggttggagtccaggtatctgcaaattaaataagcacttgaagtgatagtatctgagtgtccgtaggcaaatgttaggagaactgaatcagatgttctttgaaagattttcatggttctaaaatgttctgatttaaaatccacaaagaaaaaaagcattgaaaatgaatcagcaaactagatgtaattaaagcttcttgcaattccattaataaactttttagaatgaattacactttatgtcttcattttttcttttacattggcatgaaagcagtgaaccctgaaatgtttcagtccttgagttcccaaagttatgtaaaagcttgataatcttaattaacccacattatctcttatcatataataatagtgctttctagaagttgactatcagatggtgaagttaggtttatatcagctggtcattacttcaagtttttaagctatagaagtctgaactaccaccaaaaagagcaactatcattttttgctcacataaagaagtaaaaatcttcaaaatattctcaggtgttctataaatatttttctctcatgttctaggaaaccacctaaagtatattccaattgataagctaaaatcacttggagtttgctaattttgaagatg

SEQ ID NO: 6117 - DNA, 1028 bp, Homo sapiens
ggagactgctaactttcttcggcccctagtgccggcagtcccctagcctgctctttcactggatacctgtgtctgaatactgctttcatctgtcgctcggtcagggtctgtggaatggacccggcaactaaatatagtaatataaatttaatttaatgtacatttattttctatctaaaataggggcagcttaataatgagagaacttcatcatgcaagtttataagggttttttttgtccaagtttccataggtgtatgcaaccttaaaagtctgatgtgcctttagagtctattggtattaatacatgaagaccatttcctcatgcagcaagccaccctgggacctgagacatgataactgaaaactttacacagaagataaagaccaatggcttagttttttgaggaaggtaacacagaaggaataagaacattaagagccaaaaagaaaaataatttaatgaaagtaggcaagtgaaactaaactgactactctcaatttacatgttttgagacaactgactcttctaaggttgaagtcaattgtcttgtctccttggaaacaagatgtctcctggataaagccctctcccctctcaggctaaattcaataacccttgctctagctccattatcaccatatgtatgtatttatcagaaaaatttcaaactttcttgccatttaaaatggtggacagaggcaatatctttagttttggaatgtcgagaatctttaacgaggtatggagaattgtagatgcttagtaagcagtcataataataataacatgggtcatttgtgtatctctttggtgaaatacataatcaactattttgcccatttttaaattttttcttctctattgaatggtgaaaatttttgtgtattctggatacaacttatttaccagatatacgattggaaaatattttctcctagtttttcactcatattttcattttcataatgatgtcattcgagatgcagaagtttcaaattttggtatagtgcagtttatcaatttt

SEQ ID NO: 6118 - DNA, 1897 bp, Homo sapiens
aagattttcattaaatttttatacttttattttttctactcaagtacacctttgtcaaatttattactatgtacttgatatttttcatatactgtaaattatatctttttctttgtagtgtgtttctgaatgttgtactagaaaccaggaggtttgctcaactttccaattaattctaaaaaattaatgtttagagtctattgaatttttaaacacacacacaaaatcctattgtctataaacatttagagattttctatttgcaatatttatactttaatttattttagttctttacagcattttccaatattgaatagaagtagtaattttgagtctttcttttgtccctatttgtacagagaaaatattttaatgtttcactttcagtatgatgattctaaaattttttgttttgttatgtttttgcttctctgtttattgttgaaaaaaatctttgtttaattaagtaagctccactctatttgtatagtaacacaaattttataagataattttttctaaaactactgagatactcaaatgatttttcttctttagcttgttaatgggatgcaacatgttgattggcttttttaggattgaccttggtaatgttgaattctctttctatattggttcattatgtttactcatattttatttagaattttgtatctggtatcttttagtttatctgtaattttctttgcctgtactgatgttctcagttttaatatcaaagttataattaccatttaaattgatttaaggggtgtttcctcattccagtctctggaataatttatttaagatttgaaatatggtttcttcaaatatttggtaagttttcccaatgaaaacattaagtcacaaaattttcacaatggtaaaatataaaattactaatttcttttctgtattaaatatataattacataagttttctatattgcttgttttatatgtgttgttaaaagctttgtcaattttatttagtttttcattttagctgaaataaattcgttcacaatatcttattgtcttattttctgctgggcctaaagtgaatcaataaaattttcttattcattcctgatatcagtgataagatttctctttctctttttctttttctctgtctcattagtcttgccagagttttatcaattttactggtcttttcaaaaaattaatagtttactttgttgatcctctcttttgtatttttattttgctttttatttatttatgctttattctttattatttgtacatttttacttactttggatccttttatttttattttctttttattgaactttgcctaacttcttggggtggatatttgactcattaatcttcaatgtttcttcttttgtaatatactcacttaacaaagttcttcaagaaattgtttttctgtatcttacaaacaatgtatggattgttttcattgtcatttacttcaaatatttatttttttgcagcttctttgaaatgtgtattatttagaattgtattttttagattttaattatttggagatttcttagttttattttttattcatttttaatgcagttgtactgcagttagagagtatattctgtatgatttcagtgcttaaccatatgttgaggtttggtttatagacctgcaattagtcactttttatcagtggcccatatgtgcttgaagaaaacatattctgcaaattttggttttactcaaatcttccttgccctttcttatttttttcaactttttcttctgtaactggaatgcacagttacgtaagtttcaattctccttcaatgattgttaatatggctacttctttctggtttctctttatctttgtttcatatgatttgaagccatatattggatg

SEQ ID NO: 6119 - DNA, 1042 bp, Homo sapiens
aagagaagattaaataaagagagtaacatactggaaaatatttaccagatatttaacattatcataaataatttaagtattctgaaaaccaagcagagggagctttgtttatctgaaatttttggagaacatttatgaactggatttataaatagatttgctaactggtactttgtaacttctaaaaagcagactagtttattttccaaaataagtgagttctttaaatgactcacgaccaatttagacttatattgaagaaacatctagaaacaaatactttccaattttttaaaaattgactttggtgtcatgaacttaatgtttattaattaatattcagaatattctaacattttaaagatgacaatacaatttactttatatacagcagtttggtaaagaaaacaacaaataatcaatttaagtgaaataacccattttgaatatgtattttaattaactcgtcagagatgttaattggctttctattattttggacagttgtggtgctttgataagctcagtttttcttctttacttttatctactttagcatgaattaatttttatattttatagatatgtaaaattttacatactttattaattttaataaagtaaaacataattcatgctaagaaaattaagtttataaaacaactgacaatgaacagtttagcatagccttcaatctcactcagactatattctctctttatttcattttaaaatccagttatttcaaactggaactgtgttgtagaagagagctttaatattactttttattgtttcttaatatttctaactattctatcttcaagatatccaaagagaaaggaatttccacagtgtataattatttattttcatgtttaaaatcttagaaatcactccccaatattatatataaaagaaatactattagaaaggaatatttttaaaacttgtttctaaagagtgaagttttgcttcactctttaatgatggacaagaacgccttccctaaacttgtaatgtggctgccgctacttataga

SEQ ID NO: 6120 - DNA, 1034 bp, Homo sapiens
aaatatgaaagattaatgataaatgtaagatgttaataaatggtaagacctgccttctttttggtggcaatgtctcaatataaaaaatatgccaagtctccctaaatgtattacttaaatttaaacaatcaaaatctcaaccagatttctcaagaatttgacaaattaaattttatcatatatgtaaaatatttacgtaaatctgaacaattggtgggaaatgaaacaatggtcacagggtcttataagaaaactaaacacactataagcattgcaaaaatacaaaagatgtataaatgaagtagaactcttccttatattttcacgaagttcacctttaattgattaaagaacaaagtatacaaaaatagaaacttatacatacgagaaattgataacattgcagtgctggaagtttctgtaacataaaaatacagtcaaccctccgtatccatgggttctgcattcatacatttaaccaacaatggattgtaaatttttttaaaaaaatggatggtcacatctgtactgaacatgtacagactttttttggtcattattccctaaataatacaatgtaacaacaatttacattgcatttaccttgtcttggatattatatgtaatctagaaatgatttaaagaataagagaggaggaggagtacaagaccagcctgagcaacatagcaagatcccaactatttaaaaaaattaaaattaaataaaaaataaattagctgggtgtggtagcatgcacctgcagtcctagctactcaataggctgaggtgctgggattgtctaagctcaggcgttggaggctgcttgagccattattgtgccactgcactccaatctaggggacagagcaagaacctttccctaaaggaaaaatgggaaaaaaaaattattaccttttaactgtggctaacttgtatgttcatttagtttagcaaaagctggaggtgccttgacatttgcagtacactgaaacagtggctggcttgaaaaatcccaaaacgattttctgcagga

SEQ ID NO: 6121 - DNA, 1044 bp, Homo sapiens
atatttttctatatatatatatatatatatatatacacacacatacacatacatatgagatatatgtatatatacatatttgcacccacacagacacacaggattcttgacacccaatttcataggagttcatgacctacatcaaatcatcacatctctggttcaacaaggagttatttaggggtttatgagcccagctttaaatatattggtggactatttggatttctgaaaacctcaagctggcataaacccaattctgcatgagaagaccctgatttcctttagctccagattacaagataatgtagatttgatataaaatacttggtaattcaatgtgaagtcaatttgagacaggaaaagtgaggttaatataaggttgaaaagacatgggataagtcttaaaagggcactcatggaatgtatcagaagatgaagacagagcaaatgcagatctcattgagaaaaaaatgtaagtgagaaaagatatatcaataccttgcttgcgttggaggtacaaagaaaaagaagtctacaacagatgtgctgaagctcagaaaatggcactacaaagtgtggcactttgacatgctaagtactttgaactaaagaagcagcctcaaaacgaagatctttctgaacttgtcttaccaccccgtctctctaccctgtttctcccctaaaactctcagagaggctttctgtgaactttcccttatctgactaagggaagttcctccagaagcaatgcaattgttatgaaccccttccctggaatccacattaaccagagaagattatctcatgtagcaagagaggagactaaaggtctttctgtccaggataccatatctacagaggctttacatccatttttctgagagttcatcagaccatgtctgtgcaaaaaccgggacaattccagtgtacactaggaaaaagttattcagcttatttcagctttgcaagaaacttctcatcaaagaaacacacaggcttcttggaaatcagtgtgggaaagacaatgaagagccaaagaga

SEQ ID NO: 6122 - DNA, 1081 bp, Homo sapiens
gatttagttcactgttacagtaaaagtagtgtctggagtgatggatatcatgaataatttagagtggtgatactgtactgaaatcaggttgttatatgaatatctgaataatgtgtgttgaggtttcctagtttctcagaatttagttacctaagcctaaactgttagggaaaaaataaaaaaaaaatctttctcctggaaatttgaacagaccaaaataaaagggataaagatactaacaatgggggaatccaatgaagcttacgtaggtctttgtcccaagcctccagataagacgtcattgtcttaagaaatttatactggcctgtgacatcctgagtataaagcctagttgagctgcctgacctcatggaactattgttttaagccactatgtgacaatctgttaagtggtgatacaaaagtcattcatgaaaggtcataaaatgatttcctccagtatccttccttagaaagtttctgaaaactgtgcactacctaaacgaggctgaaccagattcaggtttcaacaaggttgaagtcaagaaagtaatgtacaaaaggtgcataaaataagagattcaagacaaaaggcaacagaaggaaatagccaagataataagtgaagagagatgacaggtaacaactgtgtaccagactggagcagaagagaaggccccaggaaaactttcctcagttagattgatttgatagaataattcatgaatgaagacattggggaaagatttagacaattgttagaatgtttagcattaaataagtgaaaaatacatcaaaaactaagcaaccttccttctctgcatccctaaaaataagataattattaactccagaggaaaaaaaaattgaagcaggaagttttttcaatggccatagtaaaatagatggttcagcttgagtaatgttttcatacttacaacatgaatactgaaatcaacaaaaatcaaaattacaatttaactagactagatatacgggaaaaagggaggctacatgtgttggggtggtttaggggcttgaaaagggttgaaaaagacctaccttctaatattctctggta

SEQ ID NO: 6123 - DNA, 1043 bp, Homo sapiens
ctttctagtttttgatttaaagtgagatatgtggtgactcctctttccacttgaaaacttagaggccattgtaggattatgaattggcttaattttaatattgttgtgtcacaggaaataaggaggcccaaggagagggagagtgatgagggaatggctggtgagtgaagtagtcaaaacacacacaaccacaggatttatccattaagtttgcttctttataatgtcgtgattcatggcatcccaaaacacttacaataataaaaaaaatcactgatcacgtatcaccatagcaaatataataataatgaaaacgtttgaaatattgcaagaattacaaaaatgtgacaatcagaaatgaagtgagcatgtgctgttggaaaaatagcttcctatggattggcttatttgaataattttccaggctccaaagcatagggctattcctagttgtctgaaacctggccccagagtgatttgggttggagcatagtggccacgaaggtgagagctctttaatggaaatggtgggggtatggacttcattagctgctaaaaagaactgaatcacctgtagctagagactcaacattgggtcaagataccatttagttgaaacacaaaccaaaaagctccattacagtccttatccaggtctgttaaatcagaacctgtgttttgaaaatacctccagaagatgccaatgcacgttcagatttgggaagcactgctttaaacaatgctttttcaagagcagttgaaacattacaaatgtttaattcagaaaagaagaaattttagatggatatggaaagtgagtcaaaatatatttttagggactttgggtgggtctaaatatatgagggctctcataagacatttgatcccataggaaagaataagaaatatcaattacaagttcaaaaacatagattttgttaaaataagatcctggtaaagtgactacattatttgaggatcatctttatggaagaattatataaccttattctgtttgacttagccatgaacactcaacttgt

SEQ ID NO: 6124 - DNA, 1057 bp, Homo sapiens
gtaagatgcacacaatgtgagcaaatgtgaatcaactcactgaaagcagttgttttgagtctctcaataaaatgtacgtctgttggcatctcattgaatctaggcccagttcacttctctgaaaagatagctaattagtctaagtatgatagatatagatacacgccacctgtcaggaaagaactgccatgctgcaggaatgtgatcagcagacagccatcaacattcagctcctttataatcagcctctgcttcagaaagtagccttgccagaggtcatgattttccctgggcagcccacattggataaataaaaggctgggacataaaggtacagtcatttcagctcaaaataggacaactagacaggtaatacttgctcctgatctcttccctcacattggctgaatgtttgacagacatacatcagagtacgacttcttcctctaaccaatctttctttctttacctttcacaggtattaatccctaataaatactttgcacccaaaacttcatcttagtgtatggtgctggagctttccgaactgtgacatcaactaatttcttctaaagtgttattagcaaatagcagcttaatgtgccacacctctgagtacactgtagtttaagaagagacccctgaaaacacaatgcctttatccaaaaatagtcattctaaaatgctaggattcttgtaacttggtaggctagaaatttacataatgcttagagagcaaaaaaaaaaccttcctaaagtaattttaatgtatctcattaaaaggctacttattgttcattaaccatttaccaacacagctagaaaaaaaaagccacagttaattctactaaaaatggataatttcacttttgatagtatacataattattttaaaactaaaaatgtttcaggcactgtattaaattctgtaaatttattttcaccaatttattcttggagcaatcccttatgtaactttatagataagaaaaccaaggctcaaaaaaggtagatagatagatgatagatagatagagagatggatagatagacagat

SEQ ID NO: 6125 - DNA, 1025 bp, Homo sapiens
ttttagtacctcattgaaatctcctagtataaaacacaccaggaaaaacaactgagaaaaattgtttaggaaagtatcataggcagtagatagtataacacacagatcactgaaagaagacaatattacaaatgggcatcataactgcctaggaaaagttacatagctgcagcacagtgagctggatgccaggctcagagcctgttgttcctgtagagctgcaaaagcagtcatagggtttgggggagctaacatagctctaatctatcgggaacaaagtggagaggaggacactggatgtgtgagggtctgagaactgtatgtgaagggtcttcatgaaaccttgagcaagggttgtgctgagcacatgcaaggtacaactaaatgaggcttactaggaagtatctgctattgggatgggattggaaatatcagagatctaattcaactgagactttgttaacatgttaacatcacagacatctaaatgaaataccagaaggctgtaccttagaagtatgaaccacaccctacaatagggcctactctagatcctccttaaacacacacacacccatacacacacacacacacacacacacacacacacacacttatggaagaaaaaaaaaaacttctggtaaaatgttatggggagaaaatggttgggaatcctctaaagttaaaggatattagagaaaacactatttctacacttctaccctttaaaaagctcaaagacaaggctacacaagtttaaggcgacatgccaaaaactgaaatacctattaaagcaaaaataaatgtacttcagagaaagttactagaatctagaatctccacaaatcaagaatgcccaatataccataaaatatggcaagacatgcaaataaacaggaaaatgtgacactcatcaagaacaaaagcagtcaacagaaatggaccctaagatatctgaaatatatttagctgataaagatctaaaaacgtgttataaaaaggtttaaagaagtaaaaaaaaataa

SEQ ID NO: 6126 - DNA, 1008 bp, Homo sapiens
gctatatttttatataaattacttgtgcctttagagcctgtttgtgcccagtcataatataatacttcctcgatgatgcatcactactgtgaaagtccaactttaaggcttggtgggccaggtaacacccagctcatcatgggcagcttaggttaatggtaacttggctgcccatgattaagcattcagttctctatgaaggctgagtaaagagttgttccttaaaaggagtagttatttgcagaggatggcaagagctttgttccaaaatccaaatggcctgcactaccattcatctatgagggcctgctaaaggctccaaacagaatccctatctgccactgacacttcaagcaccattggatctgctgaatcatatggcccaagaggtagagcagcttgcacagcagtctggacctgttgcagagccttctgctgttctgggctccactcaaaactagcagcttttcaggtcacttggcactgtcacactcggaaataatgtataataggcaaaacaagaaaaaatgtttagccaaatatcttggcatcagtgacacaggccacttcacatgtaaaattagctgacacaattgtgctgaattaaaatggcttaattggaataggaatgataagagtgttaactaactcatagctctatgtgtcttttgaatatagctgtctatctttatatccatccaccaatttatctatctaagagataacatacgtgtaaaactaacattgtgaatcatgactcagttgaataagaacactacaaataactttaaaaactcaaatgcctttgaaaccttctgtcttcccttcaataacaaacttctaaattttgtttttatcattctcctgttttcaaaatagttttactgaaaataaatgtgttttgaataggatactgttatactttgtatgttttcaattttatattaatgatatactacatgaattattctcatgtgcctttttcactcaaaattgtttcttgacatt

SEQ ID NO: 6127 - DNA, 1035 bp, Homo sapiens
tttatactttggtgatttggttgtttagaatgacccacaaacatagtgttgaagtggaaggctgagatgtgcctagtagagagtatatgtttgttagatagataagattcattcaggtgtgacacatagtgccgttggccatcagttcaatattaatgaactctctctctctctacatatatatatatacatatatatatatatacatatatacatatatatatatatatacatatatatatatatacatatatacatatatatatatatatacatatatatatatataatttttttttttttttgagacagagtctcgctctgtcatccaggctggaatgcagtggcacgatctcggctcattgcaacctctgcttcccgggttcaagtgattctcatgcctcagcctcctgagtacccggaactacaggcacctgccaccacacctggctaatttttgtatttttagtagacctggggttttgccttattggccaggctggtcttgaactcttgaccttgtgatccacccatcttggcctcccaaagtgctgggattacaggtgtgggccaccgtgactggccaacattatgtattttaaaagatgtcttcaaatagaaacacacataaaataaggccatttatgaatcagttgaaaataaatataaaatctggttatatgaaaatataaccagagctctcagggccctaaccctgtgtttcccttaggaacaatggtttagtatttgcaaattcagtgtttgcagcaactttatatttcctaactaccatgaataataaaaaatgactctaaatagaatcatgtgtcacttaacaatgaggttactttctgagaaatatgtccttaggtgatttcatcactgggtaaacatcacagagtgcacttacacaagcctagatggtatggcctcctacacacctaggctatgtggtataacctattacttctaggctgcaaacctgtacagcatgttactctacttcacactgtaggcaattgtaacaaaatagta

SEQ ID NO: 6128 - DNA, 1064 bp, Homo sapiens
tgagttcttgtcttaattattgagttttaagatttctttatggcttctacttacgagttctttatcaggtatataatttgcagatgttttctttattttataaattgttttttaaattaatgttcttcaaagcaaatgtttttagttttgatgaagttcaatttgtttttgtcttttgtttgttccatgtgcttttatgtcatatctaagaattcatttccttacccatggtcatgaaggtgtaatcccatatgttcctttaataattttatagttttacaacttattttatgtatttgaccaattttaaattgacttttgtttatgatgagagagagacattcatatttattcttttgcatttggacatcccattgcacaagtattatttgttgaaaagattatttttctaccattggatggtcttgacattcttgttaaaaatcgaataattggcttgtaaaaactatacattatttaatgtatacaacttgttgagtttggggataagtatacactacaaaaccatcaccattacgaccatgaacatgtccatcttctttctaacttttcttctacctctgtgtgtggtaagaaaacttaacatgagatctacttttctcttctacttttcttcttttctgtttatgccctaaagtttactgtcttagtgatagcagcttaaaataagtaaatatttggtaggatgagttccctaccttgacaatattgtcttattgccttagacatttttgccttttctatttcttattaattcttatactcacctttaacttttgaagtctcattttctctctctcttttctctccctcttcccccacaccatcttcctctctctttctctcaaacacacacacacacacacacacacacacacacacaacacaagcacacagtcacaaagtttctgatagcttttataataaagatgcataataatctggatgaaatgttcacttcgcaaaatagaaataatccattcataaacattgtatacaccaccaattatttaggtcttattttatggttctcaatgattttt

SEQ ID NO: 6129 - DNA, 1051 bp, Homo sapiens
tttttgctaagagaactggataataaacactatggaatcagaaacatctaaaaatttttttaaaaattaataaaatttagtacagtgagcacaaaataaaagtaattctgtgacagcgactttagcaggagacatgagtccagtaagcaaatctgactgatttgttgaagcattctgcctgcaggtcagtgttgccttgcttgttgaaaagcccactttaacccccaactcactgaagggtacgttacagcctgcttcatgaaatgtaaagttttcaggtatggatgtttggcattttcacaaatgagaaatttgaaatgtttacaaataaaatatgctccaaatgacaaattcacttacaggagggttagaaagcatcctattttgacagctaattttactctgcttactataaggaaattttcctggaaaatcagaatctttggagcaatatctaagttcaaatcttatatactgtgtccattatcaatataagcttggaaaattaaacacctctgaatcaagtttcctcatttgtaaactaaagactgtttacttagttatgataagtgaaagacatcaaatacctcagtgctcagttagtaataaattactttctcacattcctttcaatggggacaggatattattccatgggccttatgggtaaacaattatcttacatatgtaaccagctcttagtataatggagccaggagagaatcctcctaatatatgtacttcacaattttttcctctggctacttgttttaaatgagaataaaattaagtaaaatagcctaacaattcaaaactagaccagcaataatgtatttttaaaccctggaaaatttacttattcatcttgaactccaaatttctcactgagataatatgttgtttaaacaaaaatgtctgtaagagtccataaagtgacagaatgagtgaatgtgcaaagaaactattccaagaaccaggaaaatacaagaagagttaataataacccaagcaattaaaatgatgcatatcaggtactggggatgctttagtg

SEQ ID NO: 6130 - DNA, 1033 bp, Homo sapiens
agagcaatgggagatggatattcttctcattccacctccttctagccttcctatctcatctaagtgcaggggtgggatgaaaaactatagaagaagaaacgcttgtagtggtcacagattagagacatagagccactaaaagactgagactgaacagaaatattacagaagcttccaactcccacactttattatcacacccaccaggctccaataaaataatagtggattataactgaaacaagtgaaagacacagactatctcttaggagtagtatttattggagacgaaggtcaagacaaaatcaagtacaacagaaaaatatgaagcttctgggaggcacagctgctgcaaagatgaaacatggcgcaactcttagccacattagaggaaaaaataataacacagtgggaaaagacaaaggaagcactgaaacagatccaggtatgacacagatgttgcaattatcacacgggaatgctgtaatggaagagtaggcaacttgtaggaacagatgtgtagtgttattagagagattaaaattctaagaaagaatcaaaaggaaatgctagaaataaaaatggagaagttctgtgttaaattaagtttagcctaaagctgcttcttcacatattttaagtttggcataaaagtttctctgtacatagggaactaaaacctaactggatatgtaaacagactgtaacctactcttgggccagtcgccaagtcttggccaatcaaaagtggccaactgttcaaaccatattcagataaggcaaatgccaagatgtaaccaatccagctgtttttgtacctcacttgttttctgtgtcactttcttttctctgtccataaatctttctctaccacatggctgagctgaatctctctgagcctactctagtacaggaggctgcccaacttgcaaatcattctttgttcaattaaactctgttacatttatttgtctaaggtttttcttttaacatctgtgataagctcatcaatagactggacatgactaatgaa

SEQ ID NO: 6131 - DNA, 1030 bp, Homo sapiens
aaaagaattccaaacctgcatctctacaaaaacattaaggaattttaattaacaatttgcttacacatttgtataactttctttctttgttttaaactacacagttatgccacagcatctaaccctccaagtcctcaatattttcttccttctcaccccaatctttgtagcatttctctgcactttcatctccctataccctattctcttgactctcttagctctttctttaattcttcttggtgaaagtcaccctcccgccccgtcttcttaagaagcaataactaccctttcttataagcctcccacttctcatctgagggtctatcattagtggaatctgctgtcttctgcggttaattttatctctgttttctccaatatcaaaaaaattttttaccgtgaatagaagtcttgggaaaactctctacaccagccttttgagtctacatctctctactaatccctcttctacattactgaaaaataaaacttaaaaataaaaacaaagagaccgaaaatcaacttccaaatttttgccagcataagtaggtgaggctcataacattttaagagttactttttttgtgtggataaaaattatatcggttagtttatggttaagagaagcagcacttcagagatttcaaaaaggaaggttttcatttatttaggatgtatggtgttatctatctattatctgtctatctacctatctaatctatctatcatctatttatttggtaacatggaaataaggacttgcaaaacaattggaaggtctagaggaaaaatggttaagaaaggctgccattagacctcagttcttgcctttagctctgcaatgactgaagaagcccacgtttctataaatcccttgttgtctcccacacagaaacaggttgtttctaaagaagactgatgaggaatctttaatttgctgaagcccactctcctgctccctcttcttgagaagtaataagtatcctttcttatctcataagcctcccacttctcatgcaagggtcca

SEQ ID NO: 6132 - DNA, 1707 bp, Homo sapiens
tgtaggtcaactttcatgtttctaactgtccaacagtttctaatatataatacaacatgtttgtaatatataaccatatattatatataaggttatacatagatatataatgttatatatctcattgtaaatatatataatatagtatatatcatatataaataaacgtaagcttagcattaattaattttggtctttttttgcattatgccatcatgtgtctgctggaattcacaaatcttcaaattggttttattagaacatattcttttgctatcaatttgctaaaacatagctgggaacaatatcagtaactatcactgaatggaatgtgaaatctttatcccatgggaaagcactattggctgaaataggctcatcattcctattttctgaggaaaataatgagaagaaatatatgtcaaccgcttatggggttttctgaattcttctattagaaaatacttagtgaacaaatgagccactcgtcagagatggctaagggtaaattttacaaagcaggggattgtctacatgagagtgactagaattcctactggccatggactgtgttttgaagaaacgtctttgaagttagaagctgaagatgctgtttgcaaacattaatatagttcagattttggtaaataaatgatctctggttctcttttttttttccctttgtattttgaagatgttttatgtactgtgtttacaactatggggacttcacttacattaatgaataggtgaaaccaaataatactgacatcactctgacactgattgtcagtgactgtgctggcaaacacttttctgacttctctaaattatctataataccatttgctcttctattggttacataactgcatggaagaaaaatcttctcagtgtctaattgcactagtttactgtaaattactcttatgaaaatattcccatgtatttgcctgtgcaactatgcatgtaattgcattttggcaagagtgcaaaactatatcctttttgaaaatgcaacctaaggggtgcttcaaagaactatgatattttcagcttgactcttagttgaaatttcttctgtactcataaaaccgacaagttgacagccttgtcatctgagcttttccagccacaagacaggtacaaaacagatgcttctgggtttttttctgacattgaacctttgcggacatgccacatttaacaataaagagaaatttcttgtaagccccttaagcatgccctgctgtgggcatgctcatgtacctctcaaagcccattaaccaagtcatatgcaaatatattccaaaaagcactgtttctattataaaatggatgtgaatttgaggtttggggaaataatggaagaaaactgagctgaaagattgctgtctgcatctacttatcaataacctatcaaaatgtggcaacctgagcaatcaactcattcatgagtgaatggcagctatctagagttttaagtcataactgttgaaaaggaaattttctgaaagagatttggtaaatatatagtccccttgagagtgctgaaaaattgtttttattacactatcgtattataaatatgccctacaagttatttctcagaatgtgaagtgattttttatgtgaatggttggagctttctatgatctttgttttcccagatagtcattattgaggattttacaactttagacaaag

SEQ ID NO: 6133 - DNA, 1043 bp, Homo sapiens
caaatatattgtttattcaatattttattataaatgatattgtttgtgtaaatttagttttctgtttgagttgccagtatgcaaatcaatttatcttttctatattaacttttattcagttgccttttaaaatttactcattagtttaatagtttgtttttatttatgttcctttgaattttcagtgcacacaatgatggcatttgcaaataaggacaattttataactttttccatttttaaaaatatttattatgccattgaccagaacttcctgtgaaataaaataaataggtgtgaaaatttttatttgtgtctgattttggggtgaatattcaatatttcacaaatacatttgatagtagatggaggcttctttagatattctatagcatattttattttccaaagaaagctataacaatatctattgtattacatgctttctagagtcaaattctgccctctcccctaccccgcccccaccaccaaatttggtctgggtctgggtttggtatttgcttgaacagtagaacgtggtagaagtgatgtttggggacattagagattgtgcagcttctgcctgaatttcgtggagtgcctacattccagatactttctctcagaacccatccaccatggtgtaagaaatccaagctacatggctaggctgtgtaaaggtactacaattgacagcaccaactgagttttcagtcaacagccagaattaactgccagtcatgaaacatggccactttgaacataatcgagagccctcagatgactaatagcaaccacataaaagacattaagttaagaactgtctagatgaggccatgaaaataatatgagataactaggacatcagctttaatagacttaggctactctttaaatatttactttgctgcgagtttttattttaaaagagagatacattttactaaatgtattttattcatccattgattttttaaattttattcctttgttaagataaagaattatattgattgacttcaggtcctttctctttccagatg

SEQ ID NO: 6134 - DNA, 1025 bp, Homo sapiens
aataataatatttaaaaatacatgtaaataatgagttatgtatccttctgaaaagcttcctgaataactacagttagcatcattttggagagatctttacagctttctgaagactacaaggtctactggtggcattttcttaaacacttaaaggtttcttataaccatcccctatggggcaagtcaccatgttttcataagggaagcaggccaatgtcaggccttcccacaagaagtataataactggggtatacatggtgtctttagtatttagttattatttataattattgggacctatctggtgatacatatatcagttagactgcaaatttatagtgactcctaaggaacctctcatggggcttcctgtgcatatggtaaaccttagagttcctcttctgttgtccatttccctgcaaattcaggtaacatctggtccacatcacatcactctgtggggatttgcccttgtggaactaaagtgagatgctgctcgatctgctcttttgaatgtgtgtaatgaatggtctctttttctgacccagaggtcttgtgtattctgccagtatatggactcattagtgtgcaaataaaataaaatgttagccccttcacagtttcttacttaacaaaagtttgttgggatttaggaaatttgggtaattgttttcatcaaatttggaaatttttaaaacattatttcatctatagttttttatgtcccctcctctcttttcttctgggatttcaatcgcatttatattcagccacttcaacctgtaccacagctcattgatgttatacttgtttaatcatcatcattattattatcattatcttttccttctttgtttcattcctattgctatgtctttaaatttataaatctcttttttgaaatatctaatctgaaataaatcttatccaatatattgttataatttttattgttatggtttctttctaatttgtcttgagatctctctgtcaagagtgaccataagcaaagataaaattctct

SEQ ID NO: 6135 - DNA, 1035 bp, Homo sapiens
aaaacatacattcacaaattaaaaaatatatatgagtcatacaaaggatgttatcagtagaattaaactagaaatcagtagtggaaacatgcctgagaaatccctaaatatttcgaaattaaacaacactcattcaaactatgggtaaaagaagtctcaagataaatttttttaaaatttgaactaaaaattataataaaattcgtcaaaatttgtgggaaagaaatgctaagagaatgcaaaggcaatagccaaagtttttacattagaaaactggcaaaagaagagcacatgaaatttaaatcaagaagaaggaaataaataataaaaactagagcagaaatcagtgaaattataaaaaggaaaacaatagaaaaaaactagtgaaatcttatccagttacatggaaaaatcaatataattgataaacctttagctgggttgtatcagggcagtctctcactgctaaaagaaatccttgagactgggtaatttacaaacaaaggaggtttaactggctcatggttctgcaggctgtacaggagacatgatggtggcatctgcttggcttctggggaggcctcagcaaagttataatcatggcggaaggcagaggaaggtggcacttcacatggatggagcaggagaaaggagggggggacggtgccacacacttttaaacaaccagatctcatgataaatctgtcatgaaaacaggaccaaggggatggtgctaaaccattcatgaaggatccactcccatgatctgattacctcttaccaggtcccacctccaacactggggattacaattcaccatgagatttggtggggacacagatccaaaccatatcatgcattaacgaagaaataagagaagagacaaaaattacaaatatctgaaatgcattggggtcatcaccatgattctcatagacattaaaataataagaaacactgtgaacaagtcaatgtccacagatttgataatatacatgaaatgaccaatttcttgtaagacataaactaccataa

SEQ ID NO: 6136 - DNA, 1033 bp, Homo sapiens
gtttgatttgtgtgatgattttcttatagttagacaaaaattatgtgtcttaggaaggccacagaggtaaaatgttatttgcatcacatcatgtcaagggtacatgctatcaatatgaattattactggtatgttaaccttgttcacttggtggaggtagtatttgtccattttctctaccctaatgttactcattttttttcctcttttcatattgtagtcactagaagaaaatcactatgtgaatcccacacttcaggagtggagagttacattttacctccttgaaactgaagaatctacatcaaatttttctgtatgggagacttgtctattctctcttatttatttatttatttaatccttcatgtatagcagtatgaactcacagatatttattttatactttgttataatacaatactatgttacttattttgttgctcaaattcttccagcttcagctattagggtctcttacacttggctcctatgccccattgactgacccccataatttcatttttttgagcactttcttacttcatggcactttaaggtactccatgctcattttgtttatttcccacctcacgccagccctagaatcaatcatttctctgaggagattgggttccttttattggagaaggtattagaaaagaagatatgggtgaagggtgtgtttgttgtgactagtgtgtcattgcttctagtccctctcagaggacagaaaaagaaaatatatagttacatatgagcctgtgtgtacacatgtatttatgaattttttatatgttttcaactgtatatataaaaaagctgaccttgtgttcatgctgatgtctccaactctaatccattatcatgtttcattctagccttcagcccttgcttgtctgtcaccttccactccaatatgactgtcaccattcaccatccatttacttaaattccagaatacatgtgtgatttcagagctgttaacctatatccccatggtcagagtactttatcaactagagtacagtgc

SEQ ID NO: 6137 - DNA, 1029 bp, Homo sapiens
gccctccgttcagccgcgctcctccggggctgcggttcctactgcgcgagctgccagtggattcgctcttttcctccgtccgtggcccgcctgggcggccttgttctttccgcagcagccaggtcgggagactctcgcagtcgctttaaaataagtttctctccccctcttactcttttagcatattgcttttgttagagctttttttttctttttctttattttttattttcattgcttttctcctctaccccccagcacacttaagtctgcaactttttggctgtcccgttggtctgcgttttcaattgctttttgcaaacttgacacctgtgcagtttgctttttttggtctatatttttatgactgaaattacaatttttgaaagaggaaagctgtttctatagtcacagcttgcaaaatttaaagaacgtggctgttcctgaagacattaccattctgtaatgcagttaggagtgggtatgggagagagagtacttttagagctgttcatattacttttattctaatcttgctcttgtgcggtaatggtgtttgggctaaacatgctttttttgtatgtatgtagtattgagacacaaacttaacacttctagcataatgaagcagatatgttgcagttgtcatgttcttgaaggtttctttttttttttttttttttttttgagacggagtctcgctctgtcgctaggctggagtgcagtggcgcgatctcggctcagtgcaacctccgcctcccgcgttcaaccgattctccttcagcctgccgagtagctgggactacagacacccgccaccacgcccagctaatttttgtgtttttagcagagacggggtttcaccatgttggccaggatggtcttgatttcttgacttcgtgatccgtccgcctcggccgcccaaagtgctgggattacaggcgtgagccaccgcgcccggtcaggtttcttatttttgatctgaggagtttctatccttgataggtgttcatctttatcaatatttgg

SEQ ID NO: 6138 - DNA, 1038 bp, Homo sapiens
ccaaagtgctgggattacaggcatgtgccaccttgccccacctcacttgtcccctttttgtgtagtgttcttcatccggttagaatatcttcctccctcacttcatattccttgttttttcactttattgtacacttaccacttcttgaaaagctctgtatcttactttttaaattgtgttgtttcctggtctagaatataagttctacgggagcaggaatttttgactgacttgtatactcctgtcttttcagtgcctaaaaaagtgcctggcacatagtttgtgctcaataaatatttaataaatatgtgaatgaaatgggaaagtatttcgatgtagaaagcattatcagttttttataccaaaggtataaccatcttgaaagtggatctttttgtgttctcactcttacaaatggcttgattatttaaacatagtgaagatcagtttctctttggtgtctgtaatttatttatttatttatttttgttttctcaagcctagggagctggtttgagcaatctcagggtaaaagaaaatgattagttctcagaacatcaacattgtatgtattatcttggaagatgggttaagatcaaattgaaaaattaccggaaaaaaattaagatggcagttatgtatagattttcatttctttttcctgtgtggttttaatgataagtagtacaggcttttaggactggtacgatttttctatgtcgtagaacccttttgtaaatacttttggtattatggtgtgtgtttctagatattaaccataagaacttaattctggttgttaattaattagactcttgaaatatatacttacagctgaagggggtcttcccaactcttcattagatcttcctaatctcattgggatatagcattaattctgagtgtaccgagaatgaaataccattaaattgcattttcttactttgcaaaaaaccctcacagaatgctaactcattacttcagaaaataaatgagattttgaattacttgataagttgactttaagccttttcccc

SEQ ID NO: 6139 - DNA, 1029 bp, Homo sapiens
acaaaaaaaaaaagaaaaaattcttccctacttaaaataatttgttgaaatggtttattttcttctcaagttgcatttgctttaatttgttggctaaatgcttaaaaggcttaaaattggcctgacttaaaaattccttatctgtgttaaagatggaatatgaggtatgtttaattttactcagttatttgggagttttatttctgaaataagggtagggttgtatttttatttcttaaaagaagtttcagactaaaattttctttctcaactcttacctaattatatggtaagagagctagctagttcctataaaggtagaagatttaattttacaaattatgccatgcacattttaggtgtctgtttcatgtggaatacctgacttcaggtcaagggatggtatttatgctcgccttgctgtagacttcccagatcttccagatcctcaagcgatgtttgatattgaatatttcagaaaagatccaagaccattcttcaagtttgcaaaggtactatgaactcttctggttgtttctttggccttctctcatgaaaaagtattttgttcacatacagccaccttaaggttatcgttcattgtttagtaaagtgaatgctgctactgtggcggagtaagatcactcattatggctagaattcctttattcctagaggaggactattatctacttcattttaggagtgagcttattttcaaagagatagttcatatttttaaaatttgcactgcagcgatggtcgttattctgcctgggcttttttaagaggtttgcacaccatataaaagtaacataacttgtgatttttaatattttattagagattgtaaaggttataacatcactttggtgtttcgtagtcaagttttaacataaggatgtgcctgaaaaatcatttgtaattagagaatgggaagattcttgggttgcatttttgtcagcaaattgcagaggatcattattctgctctagagttgcaccgtccagttcagaagccactagccac

SEQ ID NO: 6140 - DNA, 1048 bp, Homo sapiens
ataggaatgtgaaatgggcatgtttcaagtaggtcgtctgggcccagtgaactataattgttgctttttgaactttcggggtgggggtgggtgatgtagcaattgttttgcgtagtttggcgtatatatgttagaatttgtttttaagttttacttttgggaaacagttaaaacaacccagtgatggtagatgtgtgtgtattgaaattgagctttcgatgttaaatcttccaagagttgtattttgtgcagtttttttttccgatggcattaaggctctagaagtaaaatacttcaaaatacggttatggtttattttcttttggtagctaggcatgttttttctttagtgtaggagtatagtacactgtaatcgtattttaaacaagggaataagcctactaaacataaaaacaaattgtaaacccagtcacgtggtggtggtgtgattcggatgagggtcctgagaactggatccgtaattttcattgaagacagtacaaaagggaggagaaaggcctgagagtaagaatttctgataattcatgtaaaactttataagaatattgttacctacttttccagctctaaaaacaaaaacttattattattgaagatgttcagtgatgctttctcaagattgccaaggaaaagtttacgaaaatcttaccttgaaacagtaggtttgagtgaccctttgaagagatagtccagactgtcctgtaaagttatatatgatataacaaatagctttactaattggattggactacacatcttttttctgtcctcttttcatttgtgccgttatctggaaatccatctaattgcctttttaaaataatgttatctttgatttccttgttttggtaaactgactgaactgcagtagataaaaacctggttctagtgaactaacattttagagaccttacctccttaagctattaggggtgtgtctagttttttgtttttgtaaagagcaagcccattgggaaggaatgatgtaaattttctgttaaacttaaatcatcagcactttttccaa

SEQ ID NO: 6141 - DNA, 2259 bp, Homo sapiens
atttatttgtgtgcataacaagtagttgtaatgtcagttaaaagtttgtattcccattttggttttctatgtctagagtggcacctagggctgaaggtgattgacactagaggtacttaactacttccagagaatttctacattagcttattttaagtgcatgaattctagggaaaaatattttaccctttgcagatgccacccctaagagatgcaccaacaaatagatgacatgaaattaagcattagtgaatgctgttgatacgaaatatgatcttcaaacataaaggaatcaaatgaacaaactttgtttacaggggaggaggtggtgagggaaaggtttgaaatactcaggtgagtaggattcctacagctgcatagtgagatttgtaaggttctggtaagtttctgcagctgaaggacttctgcattcacctcttttgtaaatattatggaattttaaaaggaaggatggttgcctctggggaagggaactgggaactgaggttattttggaggggaaggggggcttctagatgtaccttttatgctttattaaaaagtatattacctattaaagtttgtttaaatctatttgattaaaaatttgagtaaactggtttctaaacactgtctccagtggcttcaaaaacacaggtactgttggaaggcattcacttttgagtggcctttgacctcagttttaatctgattaattcagtcattttataatcttgctcttggtgagtttaaactagatttggctaaaatagaggtgggagtgttggcccttcaaagacagtttgatgtgttcaaaattgtagtgcatttaaaagggttagacttctgtgatatttgtccaacgtcaatcagtactcattgcatttttttacttaggctcttgatgttagtggatactggtattatatgcaacttctgaataagttttaaagaatttgaataatcagttgaataaaaacctgaaaagtggtgaatgaaaatttgagagataaggaaaggctagagttggcattcaggggacacaaatagtttgaagactctggtagtagaattatgcaagttttcttaaaattaggcaatatataatattgatactacgaaattcagtacttttccgtaggagggggtcaggtctcattgccttttccgtaccccaaaatatgaaaggtggtctacaattttgttgtggcattgtcacagcagttggccccatgttacatttcctcttgtggcacctctgagaggtgtttcttcattacctcttgacaagagtatattttgattgactgctctatgtgcttgtttattttttatagcatttaaatcaaacggtattgagatggattgggttatgaaacataatggtccaaatgacgctagtgatgggacagtacgacttcgtggactaccatttggttgcagcaaagaggaaatagttcagttctttcaaggtacctctagtattagtcaaagtttagtagtattgtaattttatatttgtattgttttactgtttttaatttgtaaaacccatttgattttggaacttttaagtttaactatgatagtcttggttaatgtattaaaataatatgctccagttaatattcaatacagaatgtgtagaatatgtaaaacctagttaatgtgcagtaacatatttgagaattgtgatgaaatgaaccgtgaattagtatatggagcatatatttgattttgtagccttttttcatgtaatataggtgggcttttagagtgtgtaattacacagtgtttttacactggtcgcaaaaaatttatttaatccagtaatatttgaaaaaatctttcatttgtattatggggtgatgggaaactaagcttttttgttttgttttgttttgtttagacttgttttaaatatttgattcagatgggaatgtttcagcctttaacactgttccccttgatggggttatttgtccttgggttaaagggttggaaatcgtgccaaatgggataacattgacgatggactaccaggggagaagcacaggggaggccttcgtgcagtttgcttcaaaggagatagcagaaaatgctctggggaaacacaaggaaagaatagggcacaggtggggatggagagtttgggatggtgttaaatttttatttttgggggttgtgggtcactattgcttaaatgggggggtagccataacatttttctggggtagtttaaaagaattgataattatc

SEQ ID NO: 6142 - DNA, 1287 bp, Homo sapiens
ctagatatagaaaaacttactgcattttgcccagtatctaatttacactaatacatttatgctgaaacctgtaccttaaaacatttttaaataggtatattgagatcttcagaagtagcaggagtgaaatcaaaggattttatgatccaccaagaagattgctgggacagcgaccgggaccatatgatagaccaataggaggaagagggggttattatggagctgggcgtggaagtatgtatgacagaatgcgacgaggaggtgatggatatgatggtggtatgtgtatctaatgaacaaaggttctgttgtcattttcttaatgttcctgacactttgtcaagaaatacagaaatggcagtaatttcagtacctattaggttttaaaacctgttcatgaaaatacggattcccatggctagctgtgggacttgactgatgcacatattggcacctagaaaacttacacagaaattaaaattaagatgttggcatattttgacctttttttgcctaaggatgaaatttaatttacatgtctgaacttaattaactttctgagattttaaatttccatcacgttgactgcttttttcataggttttaagttgggaattgcaaacttgcaatcaagttacacagactgttaccacaaaatgtttttgtaaactaaattataaaatttatctctggaaagtgtgtagtcatgtgtttctccttaaattacacaggttatggaggttttgatgactatggtggctataataattacggctatgggaatgatggctttgatgacagaatgagagatggaagaggtaaaataaatattaaagacatttttattcataggtaaattttagtatttgctttgcaagctcttagtggtaatataggaaacttgtataaagttaattcagacaaatttcagtgcattcctatatagagctttataccttgtatagtatgtatgtatacttccctacttgtatctgtaatagtttataatcttggcaaattgtgttttccaggtatgggaggacatggctatggtggagctggtgatgcaagttcaggttttcatggtggtcatttcgtacatatgagagggttgccttttcgtgcaactgaaaatgacattgctaatgtgagtaatttttaataactattagtggttttatacttatcctggtgtctaaatctttaagcattcttaatgttctcatgtttatagcttaataccaaaatcccttgaatataaaaatagatctacctttaattcttttt

SEQ ID NO: 6143 - DNA, 2343 bp, Homo sapiens
tgacagtctcccactctgtctctctgaggctggagtgcagtggcgtgatctctgcttactgcagctcccacctcctgcgttcaagcgattctctgtctcagccttctgagtagctgggattacaggcgtgagccactgcgccctgcctatctgcttattttaaaagcagtaaattctttacattatccctaagtgtatactctgatattcacagaacctctgtagttgactaagttattagtctgacagggcagtggaagggtttgttttaattgatgaggaaaaatcaaggtatgtggtaatttactttaatattctcaatagaaaagtaaataagtgtttccttttatttagttcttctcaccactaaatccaatacgagttcatattgatattggagctgatggcagagccacaggagaagcagatgtagagtttgtgacacatgaagatgcagtagctgccatgtctaaagataaaaataacatgcgtaagtggtgtctttggcacacaatcttatttcctaaacgtgaatttataaaataagaggctctaagatctgtaggtaacgcttggcagttgttgggatttaaaaccatttgacctctataatggctttctgtgggctttatatatcgctgtactagtaattaataagcatactttgtttaatattacttaattgatcttttttacaaagcttgtattgatgaattttatccatcattcctttctcccctgttactctttctttttttcttaaagaacatcgatatattgaactcttcttgaattctactcctggaggcggctctggcatgggaggttctggaatgggaggctacggaagagatggaatgggtatgtaaagtttttaaaatatgcagggttagctgcttatcgatgagtctcaattttttttcttttttctttttaaagataatcagggaggctatggatcagttggaagaatgggaatggggaacaattacagtggaggatatggtactcctgatggtttgggtggttatggtaagtatctctagttcagtttgtgttagtccgcatatgtagtgcaaactttaaagtgcaggtattacttttattattttatgcagatatctcctgctgagtgattcttaatatctttttcttaaggccgtggtggtggaggcagtggaggttactatgggcaaggcggcatgagtggaggtggatggcgtgggatgtactgaaagcaaaaacaccaacatacaagtcttgacaacagcatctggtctactagactttcttacagatttaatttcttttgtattttaagaactttataatgactgaaggaatgtgttttcaaaatattatttggtaaagcaacagattgtgatgggaaaatgttttctgtaggtttatttgttgcatactttgacttaaaaataaatttttatattcaaaccactgatgttgatactttttatatactagttactcctaaagatgtgctgccttcataagatttgggttgatgtattttactattagttctacaagaagtagtgtggtgtaattttagaggataatggttcacctctgcgtaaactgcaagtcttaagcagacatctggaatagagcttgacaaataattagtgtaacttttttctttagttcctcctggacaacactgtaaatataaagcctaaagatgaagtggcttcaggagtataaattcagctaattatttctatattattatttttcaaatgtcatttatcaggcatagctctgaaacattgatgatctaagaggtattgatttctgaatattcataattgtgttacctgggtatgagagtgttggaagctgaattctagccctagattttggagtaaaaccccttcagcacttgaccgaaataccaaaaatgtctccaaaaaattgatagttgcaggttatcgcaagatgtcttagagtagggttaaggttctcagtgacacaagaattcagtattaagtacataggtatttactatggagtataattctcacaattgtattttcagttttctgcccaatagagtttaaataactgtataaatgatgactttaaaaaaatgtaagcaacaagtccatgtcatagtcaataaaaacaatcctgcagttgggttttgtatctgatccctgcttggagttttagtttaaagaatctatatgtagcaaggaaaaggtgctttttaattttaatccctttgatcaatatggcttttttccaaattggctaatggatcaaaatgaaacctgttgatgtgaattcagttattgaacttgttacttgtttttgccagaaatg

SEQ ID NO: 6144 - DNA, 1165 bp, Homo sapiens
taattaatgcaaattccactggaaaaaaaattgtaatacctacatgggctgtgtttcaggagctaaaaagttaagtagtgttaatatgatacaaattgaacgactgactgtccactattttatgtgcaggcctttccatgtgataattgtctagttccagggctgtcatttcagaattacttgacacacttgtattattttatcccttttggtggcagtgggggtggggctagcctctcttggccattgcttttctcagttttcaaacagccgtatctcattatggcatatgttacatatggcatatggaacaaatttttgctaccaactctttcaattgagggcagatgttatatgtacttaaatatgcctttaaggaatctctttgtatcactactgagacttcagtagcatactgcaccacagaactggacttggggaaaaaaaccaaaaaacaaacttttgttgtttagtagatattcgtgtataacctccaagtttgtcagtataaaggcatgtagactgattctgacccatgggtgttaatttctgaaattttgtcacagcagttcaaatcttaccctgtcatttcgtatgtgttatcttttccaggaagaaaaatttgtaaaactggccaacatcttcatctagtgtcagcataatccaagttacactgtgatgtaatattgagcaccctattatcgtgcatgtttattttgctgcagggcttaacttcagatctctttttgttggtcaggcttttggttttttattccagggtggtatttcaagaattgactatatcaaagctgcaaaagtccttttcaagtagccagccactgtgggactatgatggataatggcacaaatgttaccaggaggggtaggagaaagcatctccttttgcattattatcatactaaaataagacacaacttccaaatgaatcagactaatctaaacaattcagggcattaccttgacaatgagacccagtgctcaagacatatccagaaggtgttggctaattatcatcagcttttcatgtctgctatgagtgcaacaaaagagaaattttgctttttactgatttaattatgcaccattaacaccaagtcactgtttctaaagaaggccctgatgttctcctgcagagagagcagta

SEQ ID NO: 6145 - DNA, 1035 bp, Homo sapiens
tcacagagagcttcttatagatagtgtgggcttagtgtgctcaaagttgcactggtggatgtgcatatttcagagtccattggttttgttacaagtgttgcaggaagagttgagaacaccatattcattaggttttttttttctttttctttcttttttttttttttttggagacggagtctggctcagccatctaggctggagtgcggtggtgctcactgcaactactgtctcctgggttcaagcgattctcctgtctcagcctcccgagtaggtgggattacaggcacccaccatcatgcccggctaatttttgtattttagtggagacagggtttcctgttggccaggctggtctcaaacgcctgacctcaggtgatcttcctgcctcggcctcccaaagtgttaggattacaggcgtgagccactgtgcccggccaatagtttttttcttacatgaatttgttaaaaatgtgggtgaggggtgggtgagtgagaggtaatttaaaagtggaaaaacaacgcatgccggacttcacgttccaacacggaaagcatgcttttgtggcaaactgaaaggctagggattaagggtgatgaaatgcaggccttccggccctcactctgttcctgatttctggttgtgggaatctgttctgaatccagctgcaagtggaaaacccatctttggctgagcagccggggaggccctcctgccaatccccgaaatgtgctgctgaaactttggccctgcaaggctggagctagggctgtcttccccagatctgtgcagctgtcaaggtggctgtgatgggactgtgaccgccctctacactgcattttggcagtgaccttgagaccagccagctcaccacagctgccctgctctgctgccgctgttgcaatgccaggtggcttaagaggggtcgtggggggcacggctcccggtccagtctttcccagtgtctggcaggtgctagctgtggtgccagctgtcccactgcctaccacccactgggcgtgggggcagtccag

SEQ ID NO: 6146 - DNA, 1060 bp, Homo sapiens
tgattcttttccaaagaaaaagtccttaatgtgtaagtagtggagatcttacagccaaattatagttgtttaatctcaaattctcataatatcatctttaattttggctttcatgaagccataagaatatgcatgttttctttattttctatagtttgcctgatgagtattaatagtaacctaattcagttataagctcacagtctgtgtgatgagatttgtacagtgtttagaagggttaatttaaaagcatatggcatcactaaaagttcaaggctagctttagtctaacgaataggtgcttatgtgtttaagatttcaagtggtgtattgctattacaaatgtaagcaacctttgcaagccaccttttaaattcatgaagaaatactaagcaataaaatgacttatctttaattattttgtgtacatttaatttaaaatagttttacctaatcctagctttccttttttacacataaagttttagcactcaaagaggaacaacatgttgaactatgaatgtggcagaattttatttcatttgttgccccagtgtgtaacttgaaaatgttgacacggagaaccaaaccttgccctgctttcaaatttgcctgaccacattgagtttctgcttcctgtgtatatacagcattttcatgtacctgtttcatcaaccaacaagtatttatttaatatttaccacatagtcagcaatgtgctaggcactgtgaaatgaatgaaattgcttgacacaaattttcactgggcctggacaaatagaatcatggttattctcaaggtaaattaaacccttttctgtttttcttctttgtgttgatccatcgacccccatttattccttttccttccaacagagatagaagtttatcattaaaagctccttctatactttctgtgttggctatatccatctcaggcattttgtgaaaaatagatttagtcttcctcttaaaaatggctctcatttgttggggttgtggatggggattagcaggagaaagggatagattatgtggagaaactaatacagaccaagcc

SEQ ID NO: 6147 - DNA, 1050 bp, Homo sapiens
ctccatgagtagctcgggaggtggggggggtggggagagagggagagagagagagagagagggagggaggggagaaaggaaggaaggaaggaagaaaggaagggagggaggaaggggaaaagaaaataatattatttcctcttggtatattcacttgatagccttactgagaaatataagcctatattcaacagaggcttttcattccttttgaaaatgtcacttctgttttaatttacttacaatggatgaggcatatcttgttgttgttttcttttttttttttatttgacagagtctcactctgtcacccaggctgaagtgcagtggctcgatcttggctcactgcaacctccgcctcctgggttcaagtgattctcctgtctcagcctcctgactagctgggacaacaggggcacaccaccacacccagctaatttttgtatttttggtatagacgaggtttcaccatgttggccaggctggtcttgaacttctgacctcaggtgatccaccagcctcagccttccaaagtggtgagattaccagcatgagccaccgggcccggccagtcattttgttttaatgtgatcagcaggtactaggacccaattctataatcccagcagtgtgggaggctaagtttggagaatccactgatccccggagtttgagaccagcctgggcaacatgttgggatccagtttgaaaactgaaaaataaaataaagtcctttatagtctattaatttgcttaagtttttatttgcatttattattctatatgtatgggggttttttgtttttgttttgtttaggagatagagtctcactttgtcacccaggccgtagtgcagtggcaagatctcggctcactgtagcctcacctctcaggctcaagcgatcctcccacctcagtcccccaagtagctgggactacaggtacacaccaccacgcccagctaatttttgtgtttttcatagagacgggtttacagcatgttgcccaggctggtcttgaactcttgagctcaactgatctgcccacctc

SEQ ID NO: 6148 - DNA, 1162 bp, Homo sapiens
ggttttggtgttaaaaacagttggccaggcatggtggctcatgcttgtaatcccagcaatttgggaagccaaggtgggaggattgcttgagcctaggtgtttcttgttgttgttgttgttgttgttttgagacggagtttcactcttgttgcccaggctggagttcagtggcgtgatctcggctcaaagcaacctacacctcttgggttcaagtggttctcctgcctcagcctcctgagctcaggagtttgagactagcctgggcaacgtggtgaaaccccgtatttactaaaaatacaaaaattaactgagcttggtggcttgcacctgtagttccagctactcaagaggctgaggcaggagaatctcttgaatccgggaggcggttacagtgagctgagatcgcaccattgcactccagcctgggtgacagagtgagactccatctcaaaaaaaataaataaataaaattttaaaatctggctgattaaataccagtttcccctgagtagacgatttggggtgtttcttctggttttccttctctacatctgttgcattttcaatttttttctgtagtgagactttaataaaatcaaagaaatttcaaattataatgaaaaacacaaaggctaaccttaggattaaagaactgagtgatcaacgtcatgtacattatgaaatccattccctatatctaaaagttctgtttaaacctgagccttgagggagaaaaagggtcttgggaacaggagtatgggctctaaactgagatagttatatgtttgtcttttttttatttggatatcatttgatatttataaaatgattacaaaagtagtacaaagaattctcttatactctttatccaacatccccaaatgttatcttacatagccttagtatcagtcaaaactaagatgttaacaataacacagtgctattaactatgttaaagatgtaactcaaatttggccaatattcccacgaatgtccttttttgggtgcaggattccatataggatacctatgcccttccttccttccttccttccttccttccttccttccttccttccttccttccttccctccttcctcccttccctccctccctccctccttccctctctccctcttccctctttggacaaggccttgc

SEQ ID NO: 6149 - DNA, 1009 bp, Homo sapiens
aagatgacttgatattggctaaaccctagtagaaaacaggatctggccgggcgtggtggctcatgcctgtaatcgcagcactttggaaggcctaggcgggtggatcacgatgtcagatcgagaccatcgtggctaacatggtgaaaccctgtctctactaaaaatacaaaaaaattagcggggcgtggtggcgggcgcctgtagtcctagctactcaggaggctgaggcaggagaatggcgtgaacccgggaggcggagcttgcagtgagccgagatcccgccactgcactccagcctgggtgacagagccagattccctttcaaaaaaaaaagaaagggtgcagggcgggtggagtcgcggagtagtcctcatggcctccacgccggagcccggtgagcccgaggagaggaagtcccttaagctcctaggatttttagatgttgaaaatactccctgcgcccggcattcaatattgtatggttcattaggatctgttgtggctggctttggacattttttgttcactagtagaattagaagatcatgtgatgttggagtaggggggtttatcttggtgactttgggatgctggtttcactgtaggtataattatgcaaggcaaagaatccaggaaagaattgccagagaagaaattaaaaagaagatattatatgaaggtacccacctcgatcctgaaagaaaacacaacggcggcagcagcaattgaacaatcttgagcatagaaaagaagtcaatgtaaacgaagttaagatcaaccacataaaacatttcatgtgcaataagctctcaatcaagtaaataaagtttaagttgtaaaaaaaaaaaaaaaaagaaagaaaacaaaattgtcttaagaaaaccagatttgtcataggaagaatctcctgaactcttaaggagcatttaaatggtatttgaattttaaaaaaaaaaggacagatcacctgaggtcaggagttcgagagcagcttgtctaacgtggtgaa

SEQ ID NO: 6150 - DNA, 1064 bp, Homo sapiens
tggaggacaagtagaaaaatgcctatctaataggcatttttcctttaaataagtcagttcatttcaacatatactaaagtccagcaatttggctgggtctggtgtctcacacctgtaatcccagcactttgggaagctaaagtgagaggactgcttaagcccaggagtttgagaccagcctgggcaacatagcaagaccctgtctcttaacagaaacaacaacctacagtttataggaatacattgattcatttaatcctcacaatgaacttctttaatacatgttattactagctctgctccaaagtttgttgtttgattcctgccaaacccatgttcttaaaaatatataaaatagctaagatactgaaaagaataatacactaatcaccagagttggttattaaccttaagcatgggtgggggattgttcatggtaagtgtgaagaatgagaaggtagtaggttttgctttagagtcctctagggcctgggcaaggtggcatatgcctgtaatcccagccttttgggaggctgaggcaggcggatcacgtgagctcagaagtttacagaccagcctaggcaacaaaccgagactcagtctctaccaaaaacaaaacaacgaagtgaaaataaagtagagtcctctaggagtaggctcatcaaggggccaagaggtgtgagagtgaagcttcaaggaagatctacattttagagagttttaagtgaaaattctccttggaggtctacaaaccagaccattaaggggtcatggcaagttaagtctgtggtatttaagaaatgattgaatctgactgataattcaattataatttggtagaagtttaagatatttgaataaggagggaaattggtagaatgacagtttgaggcagattgggtggtcttagaaggtttttcctcctttgggaataaattatactggctcatagccccaaagaaaaaggaagatagccaggaatacttgtgaacagagagcattaactcttaggtcagtcatgatttgctacacatttggagccaatcttcaatttgcacgttaaa

SEQ ID NO: 6151 - DNA, 1052 bp, Homo sapiens
caattaacaacctgctcaacttcccctctgcccttcactccagccctgatttgaaaggatttcttgtgagttctaagaagccctggacagatgagggtggagttctcgtttggggtaggaatgagaaaattagaatatcaaagtaatcccagcactttgggaggccaaggcaggaggatatctttagcccaggaatttgacactactagcctgggcaacagagtgagaccttgtctctacaaaagcaaaagtagctgagcttcaggggatcccttgagcctgagagatcgagactgtagtgagctgtgatcctcttactgcactacagcctcggtgataaagtgaaaaggaaagaagcctggctctagtgaagagattctggaaacttctgaagcctctgctgtggctcccatccagcctagatatggaagagccatgaggccctacatcaccaaggtaaggagagtggagtctagggtcacacagtttctcagatccacttttggggcagcactttctttgaccctgactttctgtggacttcgaatctctcagctgatggctgtagtcagtagggaaacggatcagaggcaaagctccaagaatattaggtattcgacacttggtttagcagctgacttttgttttctattattttactcgttgtgtgtgtgtgtgtgtgtgtgtgtgtgagtgtgtgtgacagagtcttgctctgtcacccaggctggagtgcagtggtgcaatttcggctcactgcaacctccgccttccgggttcaagtgattctcctgcctcagcctcccaagtagctgggattacaggcacgtgccaccatgttccgctaatttttgtgtttttagtagagatgggttttcactgtgttggtcaggctggtctcgaactcctgacctctggtgattcggcctcccaaagttctgggattataggcatgattcactgctcctggccagctttctttttatccctaaaaaaagaaaaataaattgatggctgaaattctgaactagtcaaattagttcatttcactt

SEQ ID NO: 6152 - DNA, 1045 bp, Homo sapiens
ggggccgcaggtgtgcatcaccacacctgactaattttttttgtatttttggtagagactgggtttcaccatcttgctcaggctggtcttgaattcctgggctcaagcgatcctcccatcttgtcctcccaaagtgctgcgattacaggtgtgagtcactatgcctagcctagttgtcttttctttttgtatattatgtccttttggtattttatgacttcgctgaatgtgtgaaaagcaaaaataatattttaggctgtatccacaggggctttacatttagttgttattaaattttaatcttctatggctgttattcagatatttaagtagatgacataagtaatttctgtattttacaggcagattttgacaacaaaccagtaaatggccccaagtcagaatccatggactacagtagatgtggtcatggggaagaacaaaaattggaattgaacccacatactgttgaaaatgtaactaaaaatgaagacagcatgacaggcatcgaggtggagaagtggacacaaaacaagaaatcacagttaactgatcacgtgaaaggagattttagtgctaatgtcccagaagctgaaaaatcgaaaaactctgaagttgacaagaaacgaaccaaatctccaaaattgtttgtacaaaccgtaagaaatggcattaaacatgtacactgtttaccagctgaaacaaatgtttcatttaaaaaattcaatattgaagaattcggcaagacattggaaaacaattcttataaattcctaaaagacactgcaaaccataaaaacgctatgagctctgttgctactgatatgagttgtgatcatctcaaggggagaagtaacgttttagtattccagcagcctggctttaactgcagttccattccacattcttcacactccatcataaatcatcatgctagtatacacaatgaaggtgatcaaccaaaaactcctgagaatataccaagtaaagaaccaaaagatggatctcccgttcaaccaagtctcttatcgttaatgaaagatag

SEQ ID NO: 6153 - DNA, 1056 bp, Homo sapiens
ataataaaaaataaaggtgaaaaaggaagccacagaagtaattcccctagtatttgacatccagtgaaaatgactttttggtgtaggtataccatggctagaaattcatgaaacgcagaaattccccagtaattcttactacacatgagtctaaggggccaagttaaaaatagcattttttaagaaacataaaattcatgctcacaaaaattcaagtggtgcagaaatacgacgcaaacatcttcctatactcccattctatacaaaagaacattattgattttaattttgtttccatttttacaaaaatttaaaacaatctttctacttggttttttaatataatgatattgtggatgtctaaatgttttataaatattattgtttcaatagatttattgtataccactatataaacatcccataatttatttaaaccacatgttattgacagatgttgagtgttttgctctctttttgatattacaaataattgtaacaaggaacattcttttgtaattgtgcaaatgtatagtagaataaattgtctgcaatgaaattgctcaattttcccagcactttgggaggcacaaggtcaggagattgagaccatcctggctaacatggtgaaaccccgtctctactaaaaaatacaaaaaaaaaattagccgggcgtggtggcgggtgcctatagtcccagctacttgggaggctgaggcagaatggtgtgaacccgggaggcggagcttgcagtgagccgagatcgcgccactgcactccagcctgggcgacagagcaagactctgtctcaaaaaaaaaaggggattgctcaattttaataggattctaagggcaacctttaacatttattgttcttggataacttttagtattacacctcaattaatacagattttttttttaagcaggagataggagtataaatatgacccacatcttaaaatattttttttctcctctgattttcagaggaagaaagaattcgttaggggcaggaagaaaggaacattaaaagttaaatttcatgggctgttg

SEQ ID NO: 6154 - DNA, 1028 bp, Homo sapiens
tacatatttctcttgtgtatcctctaatacagttagtccaacagactaactctaattttatattgctttagtaacgatggtctccttactttgtttctctcttcccatggggatctttccagggttttcccattaagtgtgggttgtcggcccagcacggtggctcacgcctgtaatcctaacactttgggaggccgaggtgggcagatcaccagaggtcaggagttcaaaatcagcctggccaacatggtgaaaccccgtctctactaaaaatacataaattagctgggcatggtgatgggcacctgtagtcccagctacttgggaggctgaggcaggagaatcacttgaacccaggaggcagaggttgtagtgagccaagatcgggccactgcactccagcctgggcaacaagagcaaaaatgtctccaaaaaaaaaaaaaaaaaaagcatggattgtcagggaatgcctttcgggggagggaacatttaagctgagaaaggagtgacaaaaaacaaaaaagagctaagtaggcagaggataagcaggaagtagcattcctaagcagagaaaacagcaagaacaaaggtcttgggtttagaaataagagtccagtaaaaaaaatctaagcagagtcagttgaaattaaggggataggccaggcgcagtggctcacgcctgtaatcccagcactatgggaggccgagtggggcagatcaccagaggtcaggagatcgagcctatcctggctaacatggtgaaaccccgtctctactaaaaatagaaaaaattagccgggcgtggtggcgcgagcctatagtcccagctactcgggaggctgaggcaggagaattgcttgaacccccgaggtggaggttgcagtgggcctagatcgtgcctctgcactccagcctgggagacagagtgagactccgtctcaaaaaaaacaaaaatgaaaaacgaaattaaggagataattaatagaaccaggtgggggtaaaaaggtgaatgattttgtaggccatag

SEQ ID NO: 6155 - DNA, 1029 bp, Homo sapiens
ggtaataattttcttgctttccacctttccctgctacttatatatttctcaaacagtatagttttattttgttttgttcttttgtgtctggcctatccatagtaccttgtatatttgaaataaatcacacaattggttcccaatatctggcgctgatagttgttaccaatttattgagctatatctgttagctatttctgaattgttcactcctttgtctattaagtggtaaggaatgaatatgtcctcatgttgtggcagctggcttctcctacagtgagtccaaaagagagaaatgtaactaggcttattggtgggattgggatgatttctttttcctctctttaaaaccttttctaatataataataatgacagtgatataaagaattgtagtgtatagtttttttgtttttgtttttgttttccttaagaaggcaaatataaatgctgtagcttaaagatttcggtaacaactttctattagtatttttccctagcgaaattttatttgttttggatatctgtctgtgttgcctgggctagagtgcactaacccaggggactccaacccctgagccatgggccaataggaacctgacttcatggcagaaggtgagtggcaggagagcaagtgaagcttcatctgtatttacagccactcctcattgctagtattaccacctgagctctgccttctgtcagatcagcagtgggattagactctcataggactgcaaaccctgttgtcaactgtacattcaagggatgtaggttgtgctctccttatgagaatctgatgcttgatgatctgtcactgtcccacctcacccccagatgggaccgtctagttttaggaaaacaagctcagggctcccactgattctttattatgatgagttgtataattactttattatatattacaatgtaataataatagaaataaagtgcacaataaatgtaacgtactcgaatcatcccaaaacctctgcccctggccccacctctgtggaaaaattgtcttcca

SEQ ID NO: 6156 - DNA, 1050 bp, Homo sapiens
gcagtggctcaatctcggctcactgcaagctccgcctcctgggttcacaccattctcctgcctcagcctcctgagtagctgggactacaggcgcctgccaccacacctggctaattttttgtatttttagtagagacgtggtttcactgcattagccaggatggtcttgatctcctaacctcatgatctgcccacctcagcctcccaaagtgctaaaatagattttttaacagattttatgtcagaaaaatcgtaatgttagtcaaactttatttttccaaactttccaggttatcttacttaaaatattcatatcacttactgcttttgcagagagcaatgccgagcctagaattagcactcaataaatttgtgttgagtgaatgaatatggagcttaaatatggctatttagaaaatgtattttagggctgggtgaggtggctcacgcctgtaatcccagcactttgggaggtcgaggcgggtggatcacctgagctcaggaatttgagaccatcctggacaatacggtgaaactccgtctctagtaaaatacaaaaaattagccagacatggtggcacgtgcctatagtcccagctactcaggaggctgaggcacgagaatcacttgaacccaggaggcggaggttgccgtcagccaagatggtgccacggcactccagcctgtgcaacatccagagtctagctccaaaaaaaaaaaaaaaaatttcccatttgggtgcggtggctcatttctgtatatctgtaatcccagcactttgggaggctgaggcgggaggaccactggagcccagtagttggagaccagcttggacaacatagtgagactctacaaaaaaaattttttttctttttttttgagagggagcctcgctctgtcgcccaggctggagtgcagtggcgtgatctcggctcactgcaagctccacctcccaagttcacgccattctcctgcctcagcctcccgagtagctaggactacaggcgcctgccaccacaactggctaatttttcgtatttttagtagaga

SEQ ID NO: 6157 - DNA, 1060 bp, Homo sapiens
ctcagtttgtctttttcctttggctatgttatctcccacaaaaggttttgtttttgatgcaatcaaacatacccatctttttccttatttggatctggatgttgagtggtatttaggcatgtttttctatgactttaagcaaagcaacatataatgaaaccaatatttttctcatcaacgctgtagcaatattgagcgatattcggggaactgctctaggtggtttcacttataatcagtttctaacagcctgttgacatcaagtgagaaatgactatacttgtttaaaatataaatttttgaaatttaaatctctcatacatttaatgaatcactggtgaatagttgtaagaggagataagttttgttgttgttcttgttgttttgtttttttgagacggagtctcgctctgtcaccaggctggagtgcggtggcgcaatcttggctcactgcaatgtctgcctcccgggttcaagcgattctcctgcctcagcctcctgagtagctgggactacaggcatgcgctttgggaggccgacaagggaggaccacttaaggccaagagttcaaaagccagaccaggcaacatagtaagactccatctctacaaaaatatttttttaaaaaaactgtttgggaatgatggcatatgcctgtagtccttaggtaattaggaggctgaggtggaaagattgctgttgcccaggaatttgaggctgcagtgaactatgatgatgccactgaactccaacctgagcaacatggcaaaaggagagagagagagagagagagagaacttcatgggcctgatgtactggctcatgcctgatcaaagcaggaggatttcttgaaaccaagagtttgagaacctatccctacacaaaatttttaaaaccaggcatagtggtgtgtgcctgtgttcctggctactttgaaagctgaggagggaggatggcttgaggccaggagtttgccgttacagtgagctctgattttgccagtgcacttgacagagcatgatcaagtcttcccctcaccaccccccacaaaaaaaaaaca

SEQ ID NO: 6158 - DNA, 1069 bp, Homo sapiens
gggttcaagtgattcacctatcccagcctcctgagtagttgggattacaggctcccgccaccatgcctggctaatttttggtatttttagtagagacggggtttcaccatcttggccaggctggtcttgtactcctgaccctgtgatccacccacctcagcctcccaaagtgctgggattataggtgtgagccacagcacctggccttttgtgtgtgtgtgtgtgtgtgtgtgtgtgtatacacaagatatatatgtatatatatacacatatatatgtatgtatgtgtatatatatatatatatatatatatatatatattttttttttttttttttttttttttttcttctgagacggagtcttgctctgtcacccaggctggagtgcagtggcgcgatctcatctcactgcaaactccgcctcccaggttcacgccattctcctgcctcagcctcccaagtggctgggactacaagcgcccaccaccacagccggctaattttctgtatttttagtagagatggggtttcactaggatgatctcaatctcttgaccttgtgatccgcctgcctcagcctcccaaagtgctaggattacaggcgtaagccaccgtgcctgacctggccatttgtatttttttttcgtagagatgggatttcatcatattggccaggctggtctcgaactcctgacctcagatgatctgccctcctccgcctcccaaagtgctgggattatagatgtgagccactgtgcctggcccacatcaatttttgaggaaacattaatcttgtttgttccctaactgaatagatatatcaactggttcagcctacacaattcttactgaaacattatagttgtgcaaacttcctacttgatgggttccaaaactgttgttcccagctcagctgcagaaaagaatagaaattttaaacaagtgggatcaagatcctgaggcattcttaaaattacaacaggagatggagcatggctttaccagcataatcctgaagacaaagcataatcaaagcaaacgccagcaagaggtataggaagtccagt

SEQ ID NO: 6159 - DNA, 1033 bp, Homo sapiens
ttttgggatgcttaaggcattttccttgctcactttttggagggccaaacaaaaataacatctgcttattatgaaagtgttttgagaaagttggagaaagctttagcagaaaatagcccaggaaggctccaccagagagtccttctccaccgcaagaatgctcctgctcattcctctcatcaaacgggggcagttttgcaaagtgtatcaatgggaactcattaggcatccaccctatagtcctgatttaactccttctgatttctttttgtttcctaatcttaaaaaaatccgtaaagggcacctatttttcttcacttaataatgtaaagaaacaacaacaacaacaaaactatattgacatggttaaattcccaaagtgctccatgctttagaaatggattaaatgtccaatattgtcacttacaaaagtgtcttgacctggatggaacttatgttcagaaataatgttattttattttttgatacggggcctcactatgttgctctggctggactcctgggctcaagggattctcctttctcaactccaaagctgggattacaggcatgtgccaccctgcctggcaatttttttaattgagacggagtttcggtcttgcccaggctggagtgcaatggtgtgatctcggctcactgcaactcctgcctcagcctcccaagtagctgggattacaggcatgcgccaccacgcccagctaattttgtatttttagtatagatggggtttctccatgttggccaggctggtcttgaactccccacttcaggtgattcgcctgccttggcctcccaaactgctgggattacaggcatgagccacaattgcagaccagtattttttatttttatttattttattttattttttgagaagggttctcactctgtcacccaggcagagtgaggagggaggccacccacctcggccttccaaagtcctgggattacaggcgtgagccaccacgcccagccagaatcaaagagttttaaggaggagagtgacatactt

SEQ ID NO: 6160 - DNA, 1030 bp, Homo sapiens
catcaccatcacttggccaggacattttacctgaattacagaatatctgtgatcaggctgaagtcagttcagagtcaagctaagtttcagtttctcttctctgcgctctttgacttccagggcccggattactcactcaatgagggtcttatccggaacttgacatcactccaaattcccccatcttcaaacatgtgaactcttgaaattctaccactacctctcccttcaccctgttttaccataatttctattttttttattttttttattggtttactctctactccttattggtttactttctaattatgctcctcatgtcaactccttatgtccttcttagtctctctgtgaccaattaaattggttccagtaaacatttattgatgtgacattctgattttcagcatgactattattagttatgaacagattaccaccatgacagtttaatattgcaggctttctccaggcaccatggctcatgcctgtaatcccagcactttgggatgctgaggtggaaggattgcttgaacccaggatcttgagtgtagcctgggcaactttgtgagaccctgtctctacaattaaaaacaaaattagctatgcgtgatggtacacaactgtactcccagctactcgagagactgaggcaggagaaacactcaaacccaggagtttgaggctgaaacatatatttatattttagactttgctgaaaaatgtgactacagatattgaaaaaaatgaatttttttaacctttaactttgctttaccttggtatctatcaagttctaccatgaatacaaaaatgctttggaaatcaaatctgtttatttcatttatctccagtcttcgctatcactgaaagggtttacagctccgggatatatgtttttattattaaataaataaaacattttataggtttctgttggatttttaatatttgaaaattaatttggctgggcccagtggctcacacctgtaatcccagcacttagggaggccaaggtgggtagatc

SEQ ID NO: 6161 - DNA, 1050 bp, Homo sapiens
ctacaaacaactgggaagttactatgattgaacagagttgggtggcttgatataaaataataatataccatcagcaaccaattgaaaataaaatgggaatacaaatctctttcccaaaggcaacaacacgaaggtaggaatagccacaatgaatgtgcacgacccgtatatctttcccatttcatgtttttctccctatcaggtttgtaccttaactcgagaagataaccgctctttgggtgttattcctcaagatgagcagctccatgtgctacctctttataagctttcagacacagatgagtttggctccaaggaaggaatggaagccaagatcaaatctggggccatcgaggtcctggcaccccgccgcaaaaaaagaacgtgtttcactcagcctgttccccgttctggaaagaagagggctgcgatgatgacagaggttcttgcacataagataagggcagtggaaaagaaacctattccccgaatcaagcggaagaataactcaacaacaacaaacaacagtaagccttcgtcactgccaaccttaggtgagccctatggaacctggtaatctctgcacaactttgatggatagatgtgtttggactttgccttgccttatttgtttagagttaaaactaagacactgaatatatttttacatataccagaaccaaaagtcaacaaaaaagtgacccatcagtatttcttggtaactttttcgacttatccttttttttttttttgagagggagtcttgctctgtcacccaggctggagtgcagtggcgcaatcttggctcactgcaagctctgcctcctgggttcacgccattctcctgcctcagcgtcctgcttagctgggaccacaggcgcccgccaccacgcccagctaattttttgtatttttagtagagacggggtttcaccgtgttaggcaggatggtctcgatctcctgacctcttgatccgcccccgcccccccgcccccgccttggcctcccaaagtgctgggattacaggtgtgagccaccgcgcccggcct

SEQ ID NO: 6162 - DNA, 1041 bp, Homo sapiens
aaaaaattagccaggcgtggtggcaggcgcctgtagtcccagctactcgggaggttgaggcaagagaatggcatgagccgagatcgtgccactgcactccagcctgggggacagagcgagactccgtctccaaaaaaaacataaaaataaaaattattagatgaaaaattatacaaaactacataaaatttttaattcgtgtttgtgatttgaaatgaacagaacaaaaccaaccaacacaacatcagcgttttcttatataattctttgtacttgtctttgaaaatactttttaaaaggcaacccctaccaaaagtaatttgtatttttcttcacatttggtgtccttgtttagggagtaacactgagaccgtgcaacctgaagtaaaaagtgaaaccgaaccccattttatcttaaaaagttcagacaacactaaaacttattcgctgatgccatccgctcctcacccagtgaaagaggcatctccaggcttctcctggtccccgaagactgcttcagccacaccagctccactgaagaatgacgcaacagcctcatgcgggttttcagaaagaagcagcactccccactgtacgatgccttcgggaagactcagtggtgccaatgcagctgctgctgatggccctggcatttcacagcttggcgaagtggctcctctccccaccctgtctgctcctgtgatggagcccctcattaattctgagccttccactggtgtgactgagccgctaacgcctcatcagccaaaccaccagccctccttcctcacctctcctcaagaccttgcctcttctccaatggaagaagatgagcagcattctgaagcagatgagcctccatcagacgaacccctatctgatgaccccctgtcacctgctgaggagaaattgccccacattgatgagtattggtcagacagtgagcacatctttttggatgcaaatattggtggggtggccatcgcacctgctcacggctcggttttgattgagtgtgcccggcgagagctgcacgctacc

SEQ ID NO: 6163 - DNA, 1039 bp, Homo sapiens
acacggtttcaccatgttgtccaggctgctcttgaacttctgacctcaggtaatccatccgccttggcctcccaaaatgctgggattacaggtgtgagccactgtgcccggccttagatcaattattgattatagaggtaccttcagtatatttgatgaaaaatatttacatgtgtatctgtatttaaactattaaaatatggaggtggatttaccagattcagacctattgtcacccatttcatatatttttttaaacatccatttcattttttgattttttttttttaatctttttagctaagggaaaaagacatccaaaaataatcctggaggtttttttttccgttgtttttgtttgtttgttttttgagacagggtctcactttgttgcctaggctggtctcaaatttctgccttcaagggatcactcagcctatgaatggtgtcttcaactgcctaaggggattggccaacagttatttgaattgtagtaagaagaggctattgccaggagcactagtcctcacttccaaaggacttctgtctgagagcggaagagctgtcatctgttaggacattatagagagtataagaacctcatataacaataaggcttttccttttccttatagaatagcactgtccaggctgggcgcgagtggctctcgcctgtaatcccagcactttgagagaccagacaggtggatcacctgaggtcaggagtttgagacccacccacctaacctggtgaaaccctgcctctactaaaaatacaaaaataagctgggtgtggtggtgggcgtctgtaatctcagctacttgggaggctgaggcaggagaatcacttgaacccagagacaggttgcagtgagccgagatcgtgccattgcactccaacctgggcgatagagctggactccgtcccagaaaaaaaaaaaaaagccctgtccaataagtagaactttctatggtaataagcatgtgctacatctgctttgtataatatgatacccactatgtgtgactattaagcccc

SEQ ID NO: 6164 - DNA, 1091 bp, Homo sapiens
ttggccaggatggtttcgatctcttcaccttgtgatctgcccgcctcagtctcccaaagtgctgggattacaggcgtgagccaccgcacccagccaaaaaagaacatatttttatccttaaaggtggtttcagaaaacttagcccttaatttttttaatttaattttttgagacagggcctcactttgtcacacaggccggagtacagtggtgcagtcacgctcgctgtagccttgatatcctgggctcaggtgatccacccacttcagcctcctgggtagctgggactacaggtgtgcgtcaccatgtactaccaaattttttatatttttcatagaagcagggttttgtcttgttgcccaggctgccctcaaattgctgggctcaagcagtcagctcaccgtggcctcccaaattgctgggattacaaatatgagccactgtgcctggcctaaattttatttagtagatagcctgtggtcattttggtttcatttcatttagttatttgtgatataaatacatagtgataagtatctattgtgattgtggtatgggacctttgacaatcatattgaatgaggtaaaagtgaaggataaagtgcttcaatatgtataattggaaaagatcttcaaatgacacgtgtttagctatttatgtgtgtgagggagattaaatcagagattaatacctttgtactttgcagattacagaattacttgcagaatgttgattctaataattcacattgagtgcagaatgcacatataaaaatattcaaggatagcttctcaaatgtccacaaaggggagcattaataaatatttaatgaaatacacttcattgaaattaaagtctcaagtataagtgatttagaaaagaactgttatatatttataaaagatataatcacattcacagtgattccacaaaatttgaataagtacctggtagtgtgaagcaactactctactgcaatgtaaattatcttcctatcaatttttcctagcagtcaaaatcttcattacctattaaattgtcttgtttctgttttttttttttttttttttttttggtagaatcttgctct

SEQ ID NO: 6165 - DNA, 1058 bp, Homo sapiens
attctgtctgtagatagaatagatagataaatagatgaataggtaggcaggtaatagtctgttaactgacaggtttattactctgtatttatttttatacttcaaataaagacatctctgcatgtagattacttcatctttcatacttctgcttttagttgtcttttcatcttacattatacttttaacagacatctcttagccttttgccagattgacctttcagttcctctcttttaaaagctctacttcttaggaaaaaggaaatgatcctttaaaaaatcagtgtgagatttaaaaggcaagaaatttatcccctctatacataataatcaggtatggatcttaatcattcacagagaaagggttgtggaggtgcagataatccaaggaacatatgaattttgctttttgtggatttttgtatttaattttgaatgtaagtatgcttgatctaggaacttactatagtaaaataaaagttataatttttctacactcaaaaacctgattgaggggcgtacagaaatactaatactctcattgctgttttgtatctattcaacatgaaccataattttcaagtaatccacagttccaactgaggaaaacctgcttttgtacagatcttttctggagctgagattcaagttatttcaaagcgtcttctgtaacaaaaagtatcaaaataaggataacactgagaatactatttattcaaagctttgcgtatataaatttgaacgtaatattttcatatgtctctatgcaaatctatagctcattagtaactgactttgtcttttttcagcttactttttactatatccagttatatttgctacagaattaaatgtttgtgtaaccttttttattaaggctatttattcactacttatgtctgtttttcagtcccagttgtgacatgatggaactaaggcgccgttatcaaaatttgtatatacctagtgacttttttgatgctcaatttacatgggtggatgctttccctttgtcaagaccatttcagctgggaaattactgcaatttttatgtaa

SEQ ID NO: 6166 - DNA, 2277 bp, Homo sapiens
tattctaacattttaaaccttattaaaaatgtgaagataaagttgatattaatgagatatttggaatgttgtatgacttctggtagcctcagataaaacttaatgttagatgaatgcactaaatgtcaatcttaagggaaacattcagtatattgtgtatagtctatagttttgtttaaagcattgtgtgactgaaaaagcatcccttcaaaagttaaaactaagtaattataaggtatctaggcctggcgtggtggctcacgcctgtaatcccagcactttgggaggctgaggtatctaatactgtttctgctatagtattacttcctatttttatttaaatttcagacatcttatatttaaagataattagtagtgcttctcattttttcacattactttagacttttgacaggattgaattatttgactataataggtaatgctgatggctagccctagtatggaagatttatatcataagtcatgtgctcttgctgaggacccacaagaacttcgagatggattccaacatcctgctagacttgttaaggtaaaaggacacatttgttttaactttagatgtattcactttgcttagctgtaactttgtacacataaaatctaaagccctacattttaatatttgttgattaatgagtaattttagtattaaggcacccagaatttaatgatgtagatgtttttctcattgcagattacaactatatcttatttgtacgctactagttcaacagtcattttgatgttttatatttgtaacatagtagaatattagtggtaataggattcagagtgtctttggatgttgttgaagtttgaattatagcttgtttctttaaaagaactctatctgaagaaatattttaaaaggatgagttatgatgtgtgtaaatcctattccattgctgaaatgcagtgtggaacacaatgaactgaactcttccttgactgacagataccagaggtagtaaaaatgatattggaaaggtttgtacctttccttctcaagtatcttattggtaatttgacagggtgcgtaatatatgtaaatgattctttgttttgaattagtttttagtgggcatgaaaggcaaggatgaagctatggccattggaggccactggtctccttcgttggatggaccagacccagaaaaagatccctctgtgttgattaagactgctattcgttgttgtaaggctctgacaggcattgatctaagtgtgtgcacacaatggtaagtactaattcatttcttgattagaagtgttttactgatagtttatgtagttgttcttatcgatcagccttttccccccggcttattttagcaaccctggtcaatgcaggtaatctcaaaggaaaatccccatttgtagctaaagtttatttggtgccaaaatgttttgggggaaaagggattaagaactaatcaaaataaactgaaaatttaaatgttttgttatgttgtactttggaagttggatgtatgttgaaaatacttttcatttcatgcatagctggagaagatcgtcaagagagaacttcatttcattataattcttttgttataaaatgatgtagttgcgattatttttgttcagccatattttctcttgaggcttatttgtcctgtgtattttagtgtatctcttgtgacttaatttgagaatattcttttttagcacatgaaatctgaacagctatccagcttcttcaggtattctctaaaatgcgggtagctctgtaatcaaacttgaaaatgccttgggggaacatattcttcctttaacttattaaatattgtacaaatgtaccaaaagaggaactatggcttctataatttttttttctttagaccaacctcaagttcttgcagcaaaatttctttacttgatgtgctacaagtgaactagggtctttaaaatgtattttagaattttttttccaacatgcttcttcccttgcaacaggtaccgttttgcagagattcgctaccatcgccctgaggagacccacaaggggcgtacagttccagctcatgtggagacagtggttttatttttcccggatgtttggcattgccttcccacccgctcagagtgggaaaccctctcccgaggatacaagcagcagctggtcgagaagcttcagggtgaacgcaaggaggctgatggagaacaggcactgaacgctaatccctttttctatttccgcttctcacaggcacaggaacacaggcacaaatgcac

SEQ ID NO: 6167 - DNA, 1525 bp, Homo sapiens
gttctagtcatggatatttgaaattggacaaccacaagtctgagagatttgaaatttcaggctatgtggcaacgtctttggtacatttcaaaggtctgactaaatcagtctttgggtggcttgaaaattgaggcaagatcacacactgtgtggtttgtggagaccggcagtgtttgtgcatccctgatatcctttgtgttgtaatttatcacccttttgtgtttcacagatctggctttgattggctgatgagtgtctttgtgatcagttaaaagtggtagaatgtatgtacgtggacttgcctaaataataactttaggagaagacaatctgaaacatttgtgaccttgcacagatcagcaacagacttttaaaaataaattatttttattttaaggtttcataatagtaattacattcttaactttgtatgtcaggatgaagaagagaaggatgatggtgaagctaaagaaatttctacacctacccattggtctaaacttgatccaaagacaatgaaggtaactttgataaggatggattttatttatttttttcaattaaaaagttctttctgagatggagtctcgctctgtcgcccaggctggagtgtagtggcgcgatctcggctcacttcagcctctgcctcctgggttcagtagattctcttgcctcagcctcctgagtagctgggattacaggcaccctgccaccacgcctggctaatttttctagttttagtagagacaaggtttcagaatgttggccagtttggtctcgaactcctgacatcaggtgatccacctgcctcagtctcccaaagtgctgggattacaggcatgagctgccgtgcctggccaattgtatttatatacatataaattaaaaggcaattttataaatcagtacagccaatatctgttgaatgcctataatatatgagggtctatagtgtaactatagtaactttgagaactaagaaggtaggatttctgcactaagtaacttcaaggggatgggactataggcgcctgccaccacgcccggctaattgttttgtatttttagtagagatcgggtttcaccgtgttagccattatggtctcaatctcctgacctcgtgattcacccgccttggcatcccaaagtgctgggattacaggtgtgagccaccgtgcctggccgtaatttggtttttaaaatagaatatttttttgagacagagtcttgctgtgtttcccagactggagtgcagtggaatgatcttggctcactgcagctttggcctcctgggttcaaatgattcttgtgcctcagcctctcgaatagcttggattacaggcacgtacaaccatgccaggctaatttctgtatttttagtagagatgggattttgccatattggtcaggccggtctcacactcctggcctcaagcgatctatccacccccgcctcccagagtgttaggattacaggcgtgagctactgcgcccagcctaaaatatatttaaaattaaaacatag

SEQ ID NO: 6168 - DNA, 1117 bp, Homo sapiens
gtcacacgaaaggctgggcgtggtggctcacgcctgtaatcccagcactttgggaggccaaggcaggctgatcacgaggtctggagttcgagaccagcctgaccaacatggtgaaaccccgtctctacaagtacaaaaattagttggatgtgattgtgcgcatctgtaatcccagctacttggggggctgagacaggagaattgcttgaacctgggaggcagagcttgtggtaagccgagatcacgccactgcactccagcctgggcgacagagtttggctctgtttcaaaaaaaacaaaaaacaaaaaaaaaaaaaacacacaaaatataattgttaattgtagctagtttgtttcctatttcaatatccgctgccccccgccccccgccaccttttttttttccgtgtttttctgctccatatattcaggtaaatgacctccgaaaagaattagaaagtcgagctcttagttccaaaggattaaaatcccagttaatagcccgattgacaaaacagcttaaagtagaggaacaaaaagaagaacagaaggagttagagaaatctgaaaaagaagaggatgaggatgatgataggaaatctgaagacgataaagaggtatgtactcaatctattattatactctatggtattaatattcatgtatagggtgttcttggaatacgtgagttaagattatgtgtgtgtaagcttttatttatttaatttaattaattaatttatttatttgagactgagtctcgttctgttgcccaggctggagtgcagtggagtgatctcagctcactgcaacctccgcatcccaggttcaagctattctcctgcctcagcctcccgagtagctgagattacaggcgcccgccactacgcctggctaattttttgtatttttagtagagacggggtttcaccatgttggcaggctagtctcgaactcctgaccttgtgattcgcctgcctcagcctcccaaagtgctgggattacaggcgtgagccaccgtgcccagctatttatttattttttgagatggagtttcgctcttgttgcctaggagggagtgcaatggcacgatcttggctcaccacaacctccacct

SEQ ID NO: 6169 - DNA, 1028 bp, Homo sapiens
gtccagcctggtcaacatggtgaaaccccatctctactaaaaatacaaaaaattagccgggcacgcgcctgtaataccagcttctggggaggctgaggcgggagaatggcttgaactcgggaggcagaggttgcagcgagcccagattgtgccattgcactctagccatggcaactgagggaaactccatctcaaaaaaaaaaaaaactaatttgggcattttgtttaacaaagactatcataatgcaaaagagtacatatagagtttaaaggctaatagtaataaacacccatatacctttcgcctaagttttataagacagactttgttaaccatgcggtgacatttaaaatacagtagatgctctgaccgtagacatcaacgatcaaatacctcaaaagtgcctctgaataccttacctgttcttttctaggtagatttgtggctttttaaaaaattatatttttctgatatagaaaattataagagttctttttgtttttttttttacagtttgtgtctctggcaattacttttatttacggtatattttgtttgcctctacattttcttctctctaccatatcagtttttaatattgtttaatgaaaaagttgaaaagatcaaaaagttgatagtgcagtgaacacctgtgtatccatcaactttgattcaataattgttaatatttgtcttgttttgtttttgtaacccagtttaacatatgaattcttcagtttgcctaaggaaaaaacatgctctgaaataaccacaattccataatcacacctaagaaaataaggtcgtaatagcatctattattactatgtaatatctcctcttatttgctttaatatagtaactcattagcagtgacataatattcatacagcagtgtttatcttcattacttgctttacttaatgaagacttaagccctttttacagccccattttctctcccctgtacgcccagtattattttattgctgctttagttgaatcattaaatagtattctcattatt

SEQ ID NO: 6170 - DNA, 1033 bp, Homo sapiens
gatagggatgaggaagaaatgaccaaacgagatgacaaaagagatatcaacagatactgcaaggagaggccctctaaagataaggtgtttattgaatactgtattctttataatatggtgatatcttacatcatctaaacataacacagttgtgaagtttattagtccttatacatctttattaccactaagtaaaattctgtcagttgtttttttgtggctatgtcagataactagtatgtctgattcttttctctcatattcgtataccagataaactcattttagctaggatgaggcaaatatcttattagattattgctatcttatgcacagtctccgtttctcactttttgggggtaaaaaatttgaaatttgaatactatgttttctacttctccattttcttaggaaaaagaaaagactcaaatgatcacaattaacagagatctgttaatggcttttgtttattttgatcaaagtcattgtggttaccttcttgaaaaggatttggaagaaatactttatactcttggactacatctttctcgggctcaggtaatctatcttgtgaatatttaaaaggaaaacattttttaaaagttacctttccagtgaaaagttaatagaacctctgttgactttttgatatattaaagcaatataagggccaggcgtggtggctcacacctataatcccagcaggttgggaggctgaggcgggcagatcagttgaggccaggagtttaagaccagcttggccaacatggcgtagctccgtctctactaaaaatgcaaaaattagctgggtgtggtggcacacgcctgtaatcccagctactcgggaagctgagacaggagaatctcttgaacccaggaggtggaggttgcaatgagccaagatcacgccactgcactccagcctgggtgacagagtgagactccatctcaaaaaataaaaataaagcaatataacacaagccagttgtaaaacacttcccttctccctctccctctgtttctactccttagg

SEQ ID NO: 6171 - DNA, 1122 bp, Homo sapiens
aagcagctcagttccatttttataaacaaaacgtggaattattctgtacgttttgactggctttttttttttcattccacagtattctatagatacattcaccatgaaaatagagacctgcctcattctttttatagctgcacagtacccattatacagatgtaccataatttacctacctagtctccattgctggtggttttcatttattggatttaccaactatgctgtaataaatcatccctgtgcataaatttttatcaatgttatactttttaacaatgaagttttttttttcaaaagtaacttggatcttactcaattccatggatttccatcataagtgaaaattacagctgggcatagtggctcacacctgtaatcccagcactttgggaggcggaggagggtggatcacctgaggtcaggagttcaagaccagcctggctaacatggtgaaaccctgtctctccaaaaatacaaaaattggccaggcatgatggcgggtgcctgtaataccagctactctggaggctgaggtaggagaatcgcttgaacctgggaagtggaggttgtagtgagtcgagatcacaccactgcactccagtttgggcgacaagagcaagactctttctcaaaagaaagtgaaaattatatcatagtttttctaagagaatcaagaaatgtattttcatctctgtattttgtttacttgcatgcataacaggtaaagaagcttcttaataaagtagtgctccgtgaatcttgcttttaccggaaattaacagacacctcaaaagatgaagagaaccatgaagagtctgagtcattgcaggaagatatgctaggtctgagtaatattaagattttgctttttaataaatatactagtaattaaagaagaaaaataacttactaaaatatggtatattttatattataggaaacagattattacttccaacaccaacagtaaagcaggaatcaaaggatgtggaagaaaatgttggcctcattgtgtacaatggtgcaatggtagatgtaggaagcctcttgcaaaaattggaaaagagcgaaaaagtaagagctgaggtagaacagaagctgcagttactagaagaa

SEQ ID NO: 6172 - DNA, 1077 bp, Homo sapiens
atgaaacaggccaggcatggtggctcccgcctgtaatcccagcactttgggaggccgaggcaggcagattgtttgaggtcaggagttcgagaccagcctgaccaacatggtgaaaccccgtctctaaaaatacaaaaattagctgggtgtggtggtacgcgcctgtaatcccagccaagatcgtgccacttcgctcaagctggcgcaacagagtgagactcagtctcaaaagtaaatacataaataaatgaatattgcagtgtgctttatgactaatgaaattgacagacattgccattttatggaattctatcagctttttattttcacagcttaaatattttaacctcaaagttaaatttgaaattttaggaagtaaaatgttaatttttggatttttttaaacagatgaagatgaaaaaaccatattaaatttggagaattccaacaaaagcctctctggtgaactcagagaagttaaaaaggaccttagtcagttacaagaaaacttaaagatttcggaaaacatgaatttacaatttgaaaaccaaatgaataagacaatcagaaacttatctacggtaatggatgaaatccacactgttctcaagaaggtgagaaattttgtacttttaacattttcttagttttaaaaatctaactctggtgtttttaatgtattttaatgttattaagctcttagtgattattctaaaagcaaataatgatagcattgtgaccttcctgagattagtaaaaagtgattcacaggctgggcacagtggctcacacctgtaatcccagcactttgggaggccaacgcgggcggatcacctgaggtcaggagttcaagtccagcctcgccaacgtggtgaaaccccatgtctactaaaaatacaaaaaaaattagccagacatggtggcgggcacctgtaatcctagctacccggaaggctgagacgggaatcacttgaacctgtgaagcagaggtttcagtgagtctagattgcaccattgcactctagcctgggcaacagaactagaccccatcttaaaaaaaaaaaaaaaagtgattcc

SEQ ID NO: 6173 - DNA, 1110 bp, Homo sapiens
tgagattacagtcatgagccaccacacctgccccattcactgcatttttagaccccatttattcttgggcagaattgaggtaaatgcttcgtcaccattaattttaagatactaaaattaatttattgttctttatcactagaaaaaagtataccaaactgaataccattgtactctaaaatcaaagtaacatttaagataatctaataaaatgtattttttccttctctattgtcttataggataatgtaaagaatgaagacaaagatcaaaaatccaaggagaatggtgccagtgtatgataaaatccatgtagtgatgaggaatggtgttaaataatgtaatatataaaaatcatgatataagaatgtttgaaggtgatgcatgtttgattttagtagtataaatgtattttagttcaaatgatgtataaagttttatgaatgtgagtttctgcttttgaaaattgcttgtaattcctagccttcaaattattaaacactccttgagtgaaataattttgcattgcaaagtgttttaggatgaactttgttatagttttaactccaataaagttcatcagtttaattgactgtagtatttaattaccaaatttcttttattaaaatgcctagaaatttttaatttatagaattattaggttttaaaatttttagttcatctgttaaaatttcagtcaaaatcataaaatagcatgatgcttaatttttgcaagttttttgaaactttttgttttttttactcatcaccaaaaaatcccctcttgatcagtctctaaaagcattcattaaaaattcagttcaggccgggcacggtggctcacacctgtaatcccaacactttgggaggccgaggcaggtggatcacctgaggttaggagttcgagaccagcctggccaacatggtgaaacccggtctctactaaaaatataaaaattagctgggcatggtggtgggtgcctgtaatcccagctacttgggaggctgaggcaggagaatcgcttgaacccaggaggcggaggttgcagtcactcaggatcatgcagctacactccagcctgggcgacaagagtgaaactccatctcaaa

SEQ ID NO: 6174 - DNA, 1044 bp, Homo sapiens
tggcatcggactccaataagataccatctatgcaaacactttgaaaagtgcacagtacaaacaccagcatgtctttacatctatttgtgccttctttaatttctttcataagtgtttatagttttcagtatgcctgtctttcacctccttagttaagtttattcctaagtattttattccttttggtgatgttgtcaatgggattgttttcatttcgtttcttttttttttttcttttttcctttttgagatagggtctggctctgttgcccaggctggagtgtcgtggtgtgatcatggctccctgcagcctcgacctcccagacttaagtgatcctcccatctcagcctctccagtagctgggactgcaggcaggtgctaccacacccagctaatttttgtgtttttagtagtgatggtgtttcactgtgttgcctaggctagtgttgaactcctgggctcgagtgattcttccgtctcggcctcccaaagtgatgcgattacaggcgtgagctaggactgttttcttaatttcctttttggatagtttattgttaatgtatagaaatgcaactgattttatgttcagtgtgggttctgtaactttacagaactgattagttctaagaatttttgtgtgtggcatctttagggtttcctatgtaagatcatgtcatctgtaaacagagatgattttacttcttttctgatctggatgtcttttatttgtttttcttggctaattcctctgggtaggacttccagtaatatgttgaaaaaaagtggcaagagccgggcgcggtggctcatgcctgtaatcccagcactttgggaggctgaggcaggcagatcatgaggtcaggagattgagaccatcctggctaacatggtgaaaccccatctctactaaaaatacaaaaaattagccaggtgtggtggcaggcacctgtagtcctagctactcgggaggctgaggcaggagaatggtgtgaacccaggaggcggaggttgcagtgagccgagattgcaccactgcactccag

SEQ ID NO: 6175 - DNA, 1046 bp, Homo sapiens
aagcaccaaatattaacagtggttattttgttttatttatttatttttgtttcttttttgagacagagtctcattctgtcacacaggctggagtgcactggtgtgatcttggctcactgcaacctccaccatcctgcttcaagcgattctcatgcttcagcctcccaagtagctgggattacaggcatgagccaccacgcctggctaattttttgtatttctagtagagatagggttttgccatgttgcccaggcttgtcttgaactcctgagttcaggtaatctgccgcctcggcctcccaaagtgctgggattataggcatgagccatcgtgcccggccaacagtggttgttttatctctggtatggaatatggctgtggggtgtgtgtgtacgtgcacacatgcacttgtaaatgttcttgctttttgctttttttttttttggagacagtgtctcgctctgttgcccaggctggagtgcagtggtgcgatcctggcttactgcaacttctgccaccagagttcaagcgattctcctgcttcagcctcctgagtagctggactacaggtgcctaccaccaagtctggctcatttttgtatttttagtagagacgcggtttcaccatgttggtcaggctggtcttgaactcttgacctcgtgatctgcccgccttggtctcccaaagtgctgggcttacaggcatgagccaccatgcccggcctgtttttgatttttaaatatatattacttttagtaccttttattttaatttgagtttcacttggtgggttgctcctgtaacacattcacatagtatgaaagggtatgcaggaaaaagtctctcatttccctatcccaaccactgattgcctttctctggaaatggctgcagtgaccagttttctaatccttctatagatagtttataaatctacaaataatatggatagacatatctgcctccatttttacataaatgttagcatattacatgtattattttttcttggaaacaaattttcttaagtcattaaaaaaatcc

SEQ ID NO: 6176 - DNA, 1048 bp, Homo sapiens
ctgtgaatttgactactgaagttacctagagtgtaagcagaaaaccaagcaggtattttaaaaaaggcttcttttgaaattcttgtcttttgcatcccaatcctgtccagcggtcaaggcctagtttatgtctttcctgacaacccgaatgtaccgttatctagtttcagtggctatcttcatcatttgattgacatttgttatgcatgtctatataaaattagttcatttttcctgtatgtatcccacatatttcccaaaagttcttgaggaaagtgaccaaatctttatccatccttatgtttcactatgttgttttaaattggtggctttcacattgtaaattctccagaaatacatattgactgccctttaactatgaaagataaccagagatttggaaacgaattggaataccaactaaaagaaatagagcattagaatacaggtctggtggctagctgcagtggctcatgcctgtaatcctagcactttgggacgctgagatgggaggattgcttgagcccagaagtttaggtagagttttgtagagaccctgtctctacaaaaaataaaaaaattagccgggtgcggtggctcatgcctgtaatcccagcactttgggaggctgaggcaggcagatcacctgaggtcaggagttcaagaccagcctggccaacatggttaaatcccatctctgctaaaaatataaaaattgggccgggcatggtgactcactcctgtaatcccagcactttgggaggctgaggcgggtggatcgtgaggtcaggagatcgagaccatcccggccaacatggtgaaacaccatctctactaaaaataccaaaaaaggccaggtgcggtggctcacgtctgtaatgccggcatttttggaggctgaggcaggtggatcacctaaggtcaggagttcgagaccagcctggccaacatggtgaaactccgtctttactaaaaatacaaaaattagctgggcatggtggcacatgcctgtaatcccagctactcaggaggctgaggtaagagaatc

SEQ ID NO: 6177 - DNA, 1021 bp, Homo sapiens
aattaactgaatttaaaacgtaaaaaaaaaaaaaaaatccaggattactgtccttccgtggaagtataacaattggacttctatatgaattatatagtttctttttgttttcctttagcctgtgaattgtcaaagtgcagggaggaagcataatgtgaaaagagaatgggctttcaagtcaggcagtgctagattcagtttctagtacttatagctgcaggaaatcccacatgtggatctttggcaagttgcttaacctcttacaacttctgtttccttgtctataaaatggcaaaggtggctgggcacagtggctcacgcctgtaatcccaccactttgggaggccgaggctggtggatcacctgaggtcaggagtttgagaccagtctggccaacagggtgaaacctcgtttctactaaaaatacaaaaatttagctgggcatggtggcgtatgcctgtagtcccagctacttggaagactgaggcaggagaatcacttgaacccgggaggcggaggctgtagtgagccaagattgcgccactgcactccagcctgggtgacagagcaaaactctatctcaaaaataaataaataattaaataaaatggcaaaggtaatacaggttcactatcccttatccaaaatccttggaactagttgtattttggaattcagaattctggggatttttagaaaggtagcaccccggtagggtttggggcctgaaacctgtaatcaaacaccttaatattaaatatgagtggtcatactaagcaggataaatgaagactataaagagcctcacgttagttcaagttaaattttgccatcaaatgagttcaggtaaggttttgcctccaaataagttacaaaaaaaactttcggttttcagagctttatggatatcgcaatttcggataagggattatggacctgtacttcccttatagggttgttatgaagatttaaacaagataagctgaaaacacattacacagtgctgggtaggtattcaata

SEQ ID NO: 6178 - DNA, 1091 bp, Homo sapiens
gaagctaaatggagacactgaagaaggatttaatagactttcagatgaattctccaaatctcataagtcaagaagaaaagatctaccaaatggagatatagatgaatatgaaaaaaaatcaaagcgagtatcatctttagatacttctactcataaatcaagtgataataaactagaggaggtatggaagctttttattttgcatttgacattgttgttgaactataggttgatttgaatttttttaggctaattagaattgattctataacatttcttgattagtgtctagtattcttagttgcactagagtctgtacaggtgaagcctgagccttttttcctttggcccttgtttatttcactgtatggcctttttcttggggcgaggtgggagcaatagttaaatttaaaccttttctgtacatttgggttcctaaagttattcggaattgcttgatggttatctacttgaatttcttttcttttttcttttttttttttttttgagtcagagtctctctctgtttctcaggctggactggaatggcacaatctcagctcatggcaacctctgcctcccgggttgaagcgattctcctgagtcagcctctcaagtagctgggattacgggcacgcaccaccatgcctggcaaatttttgtatttttagtagagacggtgtttctccatgttgatcaggctggtcttgaactcctgacctcaaagtgatccacctgtctcggcttcccaaattgctgggattacaggcatgagccaccacactgggctgataattagtaattctttatattatataaatacgataattgctgatattcatatacatttgagcttaatgcataatctttggggaaaagtgttgaatccttgtgttatggcctttttttttttaatttgtgaatttgctgtttggcaggaagcacatgtgtttgttgatctaaataaggtcctttaaatctgtatttctagcagtggaatgtatggcttgcttctcactttggtgggattttgcctggtaaaatctgtattataataggtttaacagtttattattttgtttagatcacat

SEQ ID NO: 6179 - DNA, 2123 bp, Homo sapiens
ttattgttcgatcttaaatgcaaacgagtttttatttaataatttttattgcagtgtcccctgcgttctaacaaaactaaaataatttggtatctgttctgtccttgaaaaagaaagtatgatagcatcattttaactattttcttagctttctgtgctttattctatttttttatagtcagtagttagatttactaactcattttattgatttctttgttcattgttcctgcttaaattctcactttccttttgggttcagttctcttcatattgtcccccagttttgcaagttgaaagttttaataattgcaatgaagtctgtgtgttaaaaattcaccccaagttttacatttttcattatttttttgaagcttgggaggatttttaagagcgggctacatcgtgggaaattaagaaaacatttgaattctttttgtttatttaagattctgaagacaatcctcagactttacttttttctgcaacttgcccacagtgggtatacaaagttgcaaaaaaatacatgaaatccagatatgaacaggttgaccttgttggaaaaatgactcaaaaggctgcaactactgtggaagtaagtagctttctagcatgatagattttagcttttagttggtatttacttttgacatttgttgaagctaaatttaagttttgggtacctcttcatgcctaatcttccttttctgctcttagtaagacacctatatatttttatagtctgagactgagtagcagaatagaataaatagggggaaaaaaagcacgtgaataggcaagtcctaataggaaacacacaagcagccatagagacagatttgaagtgtttctttctttctctctttaaagccgctcaaaaacaaaaacaaaaaacaaaatatttacaacgtgacaaagaaggcgatttatattgactagaaaagaatagtgcggagataatttgttaaagctgaggtgaaaaaaagatagatcctcatcccattcccccaaaccaaaaaaatttctcaaagatttaaaaaattaagctgtaaaataacttaaagcagacgtaggtgaataaagagttttttgatttcaggaaagggaatgcttttctaacatagaagttgggctgagcatggtggctcacgcctgtaatcccagcactttgggaggccaaggcgggcagatcacttgaggtcaggagtgtgagaccagcctggccaatatggtgaaactctgtctctactaaaaatagaaaaattagccggcctggtggcgggcccctgtagtcccagctatttgggaggctgaggcatgagaatcacttgaacccaggaggtggaggttgcagtaagctgagattgcgccaccgtactccagcctgggtgacagagggagaccctgtctcaaaaaaaaaaaaaaaaaccacagaagtcagaagaagaatccataaaggaaaaggtttataattttgactccatgaaagttaaaccaatggtatgtttaaaaaaagaattagggccgggcgtggtggcttacgcctgtaatcccagcattttgggaggctgaggcaggcggataatgaggtcaggagatcgagaccatcctggctaacacggtgaaactccatttttactaaaaatacaaaaaattagccggtcatggtggcgggcgcctgtagttccagctactcgggaggctgaggcaggagaatggcgtgaatccgggaggtgaagcttgcagtgagccaagatcgcgccactgcactccagcttgggtgacagagcgagactctgtctcaaaaaaaaataaaagaaaaaaaaggctgggtgcggtggctcacgcctgtattctgaacactttgggaggctgaggcgggcagatcacgaggtcaggagatcgagaccatcctggccaacatggcgatacctcgtctctattaaaaatacaaaaactagctgggtgtggtgacccgcacctgtaatcccagctacttaggaggctaaggcaggagaattgcttgaacccgggaggcggaggttgcagtgagccaagatcgtgccactgcactccagtctggagacagagtgagacaacatctcaaaaaaaaaaaaaagaaa

SEQ ID NO: 6180 - DNA, 1088 bp, Homo sapiens
gtagctgggactacaggtgcgtgccacaatgcccagctcattttttgcgtattttgtagagataagatttcaccatgtagcccaggctggtcttgaactcctgggctcaagcaattccgccctccccttggcctgccgaaatgctgggattacaggtgtgagccatcacacctgacctctatcagattttatcagtttttttttaagactttgaaaatgtgatctggaaaatataaaagttgaaacaaaatgaatttctatgggtaagagagggtaatattttagagttgtgttacaaaactacaaatttttattaaattaataaatcagaatactaaatccatgtgtttttttctttcttaaaaaatatcttttggctgggcacggtagctcatggctgtaatcccagcactttgggaggctgaggtgggtggatcgcctgatgtcaggagttcaagaccagcctggtcaacatgttgaaaccccatctctactaaaaatataaaaattagccggtgtggtggtgggcgcctgtaatcccagctactcaggaggctaaggcaggagaattgcgtgaacccaggagttcagtgatgtagcggggagctgagattgtgccactacactccagcctggatgacagagtgagactccatctcaaaaaaaaaaaaaaaaagaaagggaaaaaaaaaaccttttaaagaaaatgtcaaacatggacaaaagttggtagaatcatgtaaggaacccctatgtattcatccaccagcttcagtaattattttatctatatgctaacctacctactctttcagaagtattttgatgcaaaccctggatatcatattattatatccataaatgtttggttatgtatctctaaaaaggattttcaaaaaaaaaaataacaatactgttatcacatctaaaaaattaatatttagaaatattaattcatttcacattatcaattgtcttacaaatggttattttcttttattgtttgttttcttgaatctgagtccaaataaggtttttacattgtgtgattattaagttgcttttaatatatggattactcctttatg

SEQ ID NO: 6181 - DNA, 1029 bp, Homo sapiens
tggtctcaaactcctgacctcaggtgatctgccctcctcagcctcccaaagtgctgggattacaggcgtgagccacctcacccggcctgtattttttttctaaatcatttgaaagtaagtcgaaacaccgtgatatcatccctaaatatttcaacatgcatcctctgagaataaggatattctgctacataaccacaatataataagctcatctgtgaaaattaatgatagttctgtatcatcatctaatatttagtttatatccatttttttctcattatcctgaaaatgtctgtctgtctgggtatttggagagaaatataggaaatgctcactttgcacagacctttgttaactgaaacttgtatcccagaacctacatttcattttgtaagtttccatggaatcctgcaaagtaagaaatagactctgcacaattaacacagtagcatgcaaagtaagtaagaaatgcctgtgtgtgtgtggaggggttgtgtaagtgtaacaccatctgaactggcctgctgccagattcgtatcacatgtcaaaacataccacaccagaaccattggtgcaggtagctcagagattttttacttattcaagtataagtgaggggagtttcttggtgaagagaattttaaataagagttctgttatgtctgagtggagagagtgagtgagcgaacctggtcctggagacatctataagactagagcctgctggtgggattttcaaataataacaaaacagactaatttgggcagcacatccctgtgatggggaggaggaaacaaaaagggcagggcaggttcacttggatgtgacttatttggtgtagcacaaatgaatgctgctggggtatctgatggtttctacctggtaggtgttaatagtttagctaaatgtcattttgctttgagtgacttattgggctccattccgtttatccatatgtgtacatatacctatttgtatgtatgtttttaaaaattcaggacctagttaagttttacatgttacattt

SEQ ID NO: 6182 - DNA, 1470 bp, Homo sapiens
aggtgtgagccattgcacccagccacagttacttatttttaatgactcccaggcatttggccatttgggtggctggttttcttaaccagtgtcctattttctgaaatttagattatttctaataatttactattattaggactgccctaaacattggtatagcgaattctttatgcattgccatgtttatctctttaagatgagtttttaaatgtgattgcttggccaaaaggtttgtgcctttttttttactttggttatatattgccaaacccaccagtggaatgttcgtttgtcttttcccaaaaagtaccagtattggaaagaaagatagccttagcaacagggtgtcttaataacaacattttttttttttctttgagacaagagtcactctgtcgcccaggctggagtgtagtggcacgatctcggctcactgcaacctctgcctcccaggttcaagcaattctcctgcgtcagcttcccgagtaactgggattacaggcgcccaccaccatgcccggctaatttttgtatttctagtagagttggagttttaccacgttggccaggctggtctcgaacttctgacctcaagtgatctgcccgcctcggcctcccaaagtgctgggattacagacatgagctactgtgcccggccaataacaactttccttgccaactcatgatcacaataaggaacagttagtgtagcaagatataaaatagtgatgctcttatgggttactgatttgtatatcttcacttgtttactccaatatcaaagtgtttccagtggctacattttttagtccttggctggtgttgacttgtatttaatctccatcatgggctcttttactttttgcttgtcagtatacctgctgaaaacaacgcactacttattaatggcctgtctgctttgtgctgagataccaaatagtgctgttttagaatgtagaaactgagtataatgtatatttttgtacatttatttaattagtatatttatttaattagtaatacatagtatagttttagaatgtatatttattagaatagaatatatttagaatgttagtattagaatagaatgtatatttagaatgttagaatttatttagaatgtatatttagaatgtatatttatagaatgtatttaattagtacatgtaattagtaatacatagtttaattttagaatgtataaactgagtatgaatttatgatctcgaaaattgaaaatatttttgcttattttctggttttcatttttgttccagatacgttaacagaatagatggcctttagctaatagatatgaaaaaggtgtcttcttgtacttaacatgtttgcttatggtttctattttgcatttatattaatcctgtaaattcccctaacaggcagagtggcatgattccgactggatactctcagtgccagccaaattacctgaaattgaagaat

SEQ ID NO: 6183 - DNA, 1067 bp, Homo sapiens
tttgatttttaccttatcacagcatgaaagtacaaatgtcgaaatgccccaaaattgtattttttaaagttgaaaatgatcttgaaataatccagaattgatgaatgttgcaaatgtataaatgccttattcagtgtttgtattttccttatgaattttttttagaaagagaaaaaagagaagccaaaatctgataagactgaagagatagcagaagaggaagaaactgttttccccaaagctaaacaagttaaaaagaaagcagagccttctgaagttgacatgaattctcctaaatccaaaaaggcaaaaaagaaagaggagccatctcaaaatgacatttctcctaaaaccaaaagtttgagaaagaaaaaggagcccattgaaaagaaagtggtttcttctaaaaccaaaaaagtgacaaaaaatgaggagccttctgaggaagaaatagatgctcctaagcccaagaagatgaagaaagaaaaggaaatgaatggagaaactagagagaaaagccccaaactgaagaatggatttcctcatcctgaaccggactgtaaccccagtgaagctgccagtgaagaaagtaacagtgagatagagcaggtacatttgcacttcattgggtagaagatatctttcattgttgtttcagataaataagtaggtaactgctatatgtactctttaatagtaggagaaaatgtgatgtgtcagcaccttgtgggttgggggataccttaggctgactgggacttcatcttaaaaattagcatacgacagggcatggtggctcagctaagagtactctgtcttttttatttttttatttttttgagacagagtctcgctctgtcacctaggctggagtacagtggcacgatctcagctcactgcaacctctgcctcctgggttcaagtgattctcctaccttagcctcctcagtaggtgggattacgggtgtgtgctatcacgcctggctaattttttgtatttttagtagaggcgggctttcaccatgttggccaggctggtctcgaactcccaaccccaggtgatctgc

SEQ ID NO: 6184 - DNA, 1143 bp, Homo sapiens
tcttttatatttaataattaatatatacagatcattctctgtatatttcaatattttaatctttcccacagttttgatcatctatataattaatgctatcatatttccttcaaaccattagatgtccctggggctcatagctttcgtcaagtgtctgaccatttttgcctagatggagaaagcatttttggtagaaaagcatgaatgggcggtggctcacacctgtaatcccagcactttgggagcccgaggtgggcggatcacgaggtcaggagatcgagaccatcctggctaacaacatgaaagcccatctctaataaaaatacaaaaaattagccgggcgtggtggcgggcgcgtgtagtcccaactacttgggaggctgaggcaggagaatggcgtgaatccaggaggcggagcttgcagtgagccgagatgcaccactgcactccagcctgggcgatagagcaagactccgtctcaagaaaaaaaaaaaaaaaaaaagaaaagcatgaatggaaagaagggcaagtcagaggtgaaaacgccaagcccccatattagggtgagtccattgggttcatttctagagaacttgacatttaacaaacattaacctcattgaaatgactgcgaatgcccatgtagtcactttggctgtgggttcttgcagttgtctttctggcctaacctcacttgctcactggccttccagtgtccatgctccccctttgttaatttgtttactgctatatccctagcacattttagatgaatgtattaggtgttcttgaatcatattagtttcataccattaccctatttttgaggacctgtagcagttcaagcaattctcctgccttagcctcccaagtagctgggattacaggcgtgtaccaccatgcctggctaattttgtatttttagtagagatggggtttcaccatgttggccaggctggtctggaactcctgacgtcaagtgatccacccacctcagcctcccaaagtgctggaattataggcttgagccactgcacctggacttttttttttttttttttttgagacaaagtctcgctttgtcgcccaggttggagtgcggtggtgcaatcttaacctctgcctcgcaggtttaagtgatcc

SEQ ID NO: 6185 - DNA, 1050 bp, Homo sapiens
ggttttttctgatcctaaaagtaacacatgcttcttgtataaaaactcttgacataattcatcatcacatctaatggtagtatgacattttattatgtctgttttgtggcttatataagcagcccaaatgatgcacattttaaaattgtttgtactttttgtgtattataagtaacaccgtggtgaacttcttgttttattatttccttaggataaaatggtggggtaggtgataaattagaattacatacagtcaaaggaatggatttattactatagaaatatgattattatatactgcatcaaaaataaatatgttacacatgtgaaagatttggaaagttactcatttatcttgagatgtcttagaaatgaaatgtgtccacttctagtatcctttctcctaacacactctcaaacaacaggcttttggattccgtgcctcccactgccattagtcacttcaaacaatcagctgagaagctgatagaggagaagggagctgtggaagctctggcagcagcactggcccatatttcaggtgccacgtccgtagaccagcgctccttgatcaactcaaatgtggtaaggttctgcagcacattcctgacacttcataatttggggtatgagcaggatatgaaagggtttcatttaagcttcccagttgttttcattttctcatgaagttagtaaagtattaattgtattttacaatttctggccagacacagtggctcatgcctgtaatcccagccctttgggaggcacaggcaggaggatggcttgagcctacaagtttgagatcagcctgggcaacctagtgatactctgtctctacaaaaaaataaaaaaaaaaaaaattagctgggcgtggtgacatgctgtggtcccagctacctgggaggctgggatgggaggagggaggattacctgagctcaggaggttgaggctgcagagatccatgatggtgccactgcactccagcctgggtgacagagtgagactctgtctcagaaaagaaaagaaccaataattcccatgtttaa

SEQ ID NO: 6186 - DNA, 1398 bp, Homo sapiens
agacatttaaaattgttacatctttattcaatactgtgagaaatgtgtgcttaatatatttgttttattacctttggctgtagataccctgtagcaattgagttgaataaatggtttaataacttaataaatgaagtagtgatgagggctatttctcataatgaaactgtgttttcccacacttcagggacactggcttttggaccatgatgggtggccagtgttatttttgaccagtgacttgttaagcacttatgttatcaccttttctttgaagaagtggcaaatattttgtttttctcatgctttttaaaaattgaatactaattaaagcacacaaaaacaaaacattctctcaacaggagaaatggcatgattcacgacgctggcagctctctgtggccacagagcaaccagaactggaaggaccacgggaaggatatggaggcttcaggggacagcgggaaggcagtcgaggcttcaggggacagcgggacggaaacagaagattcagaggacagcgggaaggcagtagaggcccgagaggacagcgatcaggaggtggcaacaaaagtaacagatcccaaaacaaaggccagaagcggagtttcagtaaagcatttggtcaataattagaaatagaagatttatatagcaaaaagagaatgatgtttggcaatatagaactgaacattatttttcatgcaaagttaaaagcacattgtgcctccttttgaccacttgccaagtccctgtctctttcagacacagacaagcttcatttaaattatttcatctgatcattatcatttataactttattgttacttcttcatcagtttttccttttgaaaggtgtatgaattcattacatttttattctaatgtattatctgtagattagaagataaaatcaagcatgtatctgcctatactttgtgagttcacctgtctttatactcaaaagtgtcccttaatagtgtccttccctgaaataaatacctaagggagtgtaacagtctctggaggaccactttgagcctttggaagttaaggtttcctcagccacctgccgaacagtttctcatgtggtcctattatttgtctactgagacttaatactgagcaatgttttgaaacaagatttcaaactaatctgggttgtaatacagtttataccagtgtatgctctagacttggaagatgtagtatgtttgatgtggattacctatacttatgttcgttttgatacatttttagcttctcattataaggtgattcatgctttagtgaattcttcatagatagtatatataaaagtacattttaatagaaagccagggttttaaggaatttcacatgtataaggtggctccatagctttatttgtaagtaggc

SEQ ID NO: 6187 - DNA, 1066 bp, Homo sapiens
ccaccaaacctggctaatatttaaattttttatagagatggagtctcattctgttgatcaagctgtttgtgaacccctggcctcaagcaatcgtcctgccttggcctcccaaagtgctgggattataggtgtgagccaccatgcccgccctcttctaattatctgtcatgagatggatctccagtcattgcattgaggtttatgtatttaatatatttagtgttttccctataccggggcatggatttttgtctttctttgagacagggtctctatctgttacccaggatggagttcagtggcatgatcatagctcactgcagccttgaactcctgggctctaatgaccctcttacttcagtctcccacttagctaagactataggcatgtgccgccacacctggccaatatttctttaaaaatgttttttgtagaaaaattagctgggcatggtggcgggcgcctgtagtcccagctacttgggaggctgaggcaggtgaatggcgtgaacccgggaggcagaatttgcagtgagctgagatcatgccactgcactccagcctgggtgacagagcaagactctgtctcaaaaaaaaagatgttttttgtagagccagggatctcactatattgtccaggctggtgaatttttatccattttttactgctgaattcccagcacctacaacagtgctggcaaataatagataactaaatattgaacaggtgaacaaattttttttttttttttttttttttgagacagggtctcactctgctacccaggctggtgtgcagcggcttgatcacagctcaccgcagcctccaactgccaggttcaggtgatctcccatgtcagcctcctgagtagctgggactacaggcatccaccaccatgcctgtcaaatttttgtatttatttatttatttttttgtagatacggggttttgccatgttgcccgggctggtcttgaactcctgggctcaatcgatcccgcgaccttggcctcccaaagtgctaggattacaggtgtgagccattgcgcctggcccaaatcatttta

SEQ ID NO: 6188 - DNA, 1031 bp, Homo sapiens
cactggtccagaagcacttgacaaagctaaggcattggcagcaagtgctggaggtcatcacgtgcagtacaaaaagctagctgacatccatcaaggctccttggtctaccttgagcaggcattcaatatccctgcacttctgaagtgcacctgagcaaaagggtaaaggctgtgggcctgagagtgggctggtgtgggagagccccatgcagatggtttgccacacatcccttcttgtagacttggcattttggaagaactctttgacagagaatgagttgattttagttttatgctcccacctaaaattttttcactatttttataagatgttaatttcttgagtactttatttataacatgcctgtaccttgggtaaaccaagtaaacttttttttgtcttaggcaaagtttagactgttcgtatgatgatacactttcttttttatgtgggtttttttttttgcttgttttttatttttatttttatttttgagacagaatcttcctctgttgcccaggctacatagcagtggcaccttcacagctcattgcaacttccaccctcctggcttaagcgatccttccacctcagcctcccaaatagctgggaccacaggtgcctgccaccatgcccagctaatttttgtatttttagagagacggtgtttcaccatgttgctcgggctggtctcgaactactgagctcaggcaattctacccaccccagcctcccaaagtgttgggattaccagtataagccactgtgtctggccttttaaaaatttttgcatgacttttcatctttttatgtgtgtttcccatttgtttgatatgagggaaaaatttctaatagcttgagaatcaaggggatggggattttggttgtaggcattttataataattaaccccttagcagtggtgtagaaaaataggtaaattttttgtttcaagacttaaaactacctcaagaagaacaatctaatgtaacagtatttgtaacgcttccagaggtctcagatgaggaatt

SEQ ID NO: 6189 - DNA, 1017 bp, Homo sapiens
cactgctataaagaactacttgaggccaggtacagcgcctcatgcctataatcccagcactttgggaggccaaggtgggtggatcacttgagcccatgagtttgagaccagcctagacaacatgttgaaaccctgtctctaccaaaaatacaaaaaattagccaggcatggtggtgtgcacctatagtcccagctactggggaggctgaggcaggagaatcacttgagcccaggaggcagaagttgcagtgagccaagactgcaccactgcactccagcctgggtaacaaaacaaaagaactacctgagactgggtaatttatgaagaaaagaggttaattgactcacagttcctcaggcttaacaggaagcatgactaggagccctcaggaaacttagaatcatggcggaaggcgaaagagaagcaagcatgtcttaccatggcaagcaggagagagagagagggcaaagggggaaatgccacacacttcaaaaccatcagatctcatgagagagctcactcattaccacaagaacagcaaggaggaaatctgcccccagtgatccagtcacctcccaccaggtccctcctccaatttaatgtgagatttggccagggacacaaatccaaaccatatcagtggtaaataatatagaaccttgtgaaactactaaacgaaagaaaaccaaacaaacaaacctcaacacatcagaagcataggtcttgaaaagatgaagataattttagaggtcagagggtaaagaggaggcatattaaggaaagacaggaagtagggagaataactgtggggctttatgtgtagagaatttggagccaggaagagctgtcaagtttattctggtcaggtaaagaaagctggaaaaggagggttgcagggactattggagcaaaacagtaggctaatttaaataagcatcctagagagaacatgtaagtaaacaagcagcccaagaaggaaggaagtatacaagatttagagacttatgatctacatt

SEQ ID NO: 6190 - DNA, 1055 bp, Homo sapiens
tgccctcagatcctcctgtccttccctggccctgctctgtattggctgtggggtgggggtggcggtggaactgacccctggcgtctgcatttctcaggctcccagggctgtggctgactttggccaatgggaggcaaggacgggagactgagagcttgggaggaagggagagaggtatgtttcttctccttactccctgcctgggatggcaccttgggcaggactctgttttgcccatggcctcagctcccaccagatgcctctagtccctgggctcaggaaatagacaacctccttccactatcgctgtagcccaaggagggaagtatttttttctttctttctttctttttttttttttttttacagagtctcactcttgttgcccaggctggagtgcagtggtgcgatctcagctcactgccacctctgcctcccgggttcaagtgattctcctgcctcagcctccagggtgtgccactatgcccagctaatttttgtatttttggtagagacggggttttgccatgttgaccaggctggtcttgaacttctgaccccaaatgatctgcctgcctcgtcctcccaaagtgctgggattacaggcatgagccactgtgcctggccgaaggaaatattttcttgctattgctaatctctgggttacctcgctatcccccatttagcttcacttctcctccatcacctgtatgaggaattccctctgtgttaaatatctggagaagtttcctgattggaccctggctgttgcagcttccaaggccacctctctttgtggctggtatccttttcccatgcatcttctccaggacttccattctgcagttatctctctgaactcagtgtcttcttcccatcagtataggggtggactttagtatctcctatgtttaggcaacatctctcctttgactctgcgtcttctccagtggttgcccttctctgctcctcttcacaataacacctcctgaaagggccacccatgcctgccccctcctttcctcaccccctctgtggctggacttctgttccta

SEQ ID NO: 6191 - DNA, 1011 bp, Homo sapiens
gccaggaggagaccatcactctgacattcatcttcttttaaagagcttacctggtttgatcaattccagttaggataacctcccttttgattaactaaaaaaatcaactgattagtaacctgatcacaggagtggtatcctatcatattcactggactcacccacactcaagaggattatacacatgtgtacaccatgggatagtaatattgagggctatcttagaattctgcctaccacatttgtattgactcttatgaaaggacatgggggccctaggatttttctttttttaagctgtattgagatatatatatatatatatattcgccataaaaattcacccattttaagtgtgcttaaaatttttagtaaatttagagttgtacaactatcaccactaattccagaacattttcattactccagaaatttttaaaaatgctgtaccattagcagtcattctccatttcccctccttccagtctctgacaacccctgatctctgtttctatgaatttgcctattctggacatttcatataaatggaattatacaatgtgtggtcttttcctattttgtttctttcacttagtataatgtatttgagattcatcaatattgtagcatttgttattagtatatcattgttttttattgatgaatagtattccattttatggctataccacattcttgtttatgcattcaccagttggtgggtatttgggatgtttctacttttttgctgttgtgactaatgctgatgtgaacatttgtgtagcagttttgtgtggacctatattttcctttctcttgagcatgtacctgggagtggaattgctgccttatgttaaatatgtttaagtttttaataaactgccaaagaccttaggagtttttggtggctttcttgctaactggtatgacaagatgtttaagggtcttttgtgtttctgcttcatacctgcactcagccgtatctttcaaggccatagttgcatgcaaaga

SEQ ID NO: 6192 - DNA, 1099 bp, Homo sapiens
aatatatatgagtaatttgggagttcttaggtccatcagacactccattgcattctttgattcctcctgcacaaccctagtatcatgcaggttttgtggctattaacctggtttgtccctacgcattatgttttgggattgtgggaatactttatctttttctgtggtaaattggatccttagatttttttggttttgctgtctagttggtccatctgtttttatgtgacgatctggggagattcaaagactatgttgccatcttcccagaaattgatctgagattctaaaaggccatgtgtaaccattctggcagtttagcaatatgtatcaaaatcttcaaaagtggatatcatttatagtagccagaatagtctggattattactatgtaagagacaaccccaaaactcagtgacttaaaaacaacagtggcagtggcttctttcttgcccaggcaacatgttccttgtgagttagctgagggccttattctgtgccatgctcagtgatggagcagccaggaacatcacactcatcatggctgagggagagaaatctctgcagagtctttcacaagccattaaaatgccccatcctagaagtaacaaagagcatttctgatcaaatttattgtctctagaaacagtcttgttcgtacctcacccagccacaagagggtagggaatacaatcataccatgcactcagaatgtatgcagctggaaatatttgagcagtgcctgtattgattaatattattttgatccacagattcttctgatcagattttatcctaaaataatcaactttgttcatttcactgtttataatattcaaaaattgaaagccacttaaatgtccagacattaaaaaacctaattatggtaataaccattaagtgcttagggccattattaatgtgattatattgatctgtattcattcacatgaaaagaggtttgctataataacaatatttactgagtactcaccatgacccaggtattccttctgaagttcttcataatgatacaatgattcctcttttttttttgagatgcagtcttgctctgttgccagcctggagtgccgtggcgc

SEQ ID NO: 6193 - DNA, 1177 bp, Homo sapiens
ttttgtagagacagggttttgccatgttggccaggctggtttcaaactcctggcctaaagtgatctgcctgccttggcctcccaaagtgctgggattacaggcgtgagccaccatgcccagcctctaatcctttttttttaagttttttttttgagacagagtctcgctctgttgcccaggctggagtgcagtggtgcgatctcagctcactgcaaccttcacctcccgggttcaagcagttcttccgcctcagcctcccgagtagctgggattataggtatgcaccaccacacccggctaatttttctatttttagtagagactgggtttcaccatgttgaccaggctggtctcgaactcctgacctcaggtgatccgcctgcctcagcctcccaaaatgctgggattacaggaatgagccaccgcgcccaaccgcctctaattctttgtttaatataaagtgttcattacaaacttgttctcatttgaaaatcaattaaaagcttttggtgaattttgaatgaagatagtaattagaatggtcttttgtattctgaatcagattaataaacatgtagttaaatgtcagttgagtgttcaaagctaagttagaaattaccctgtcctaagtactgtgaaaaatacaaaaactaccttttataaacatgatctgtcctccatgttctcacattgtagatatctgggaaaaagaaaaataatataaactaacagaatacttaaataatagcttgacagtaatttagaagagacaaaacctattccagtattgccatcctaatgttgtataattaaacatacatgatttataactttgaaataaattacatgatttttacaatttcaaaatcaattgcatatcatggcactattggaggtaagtctgttatttcccatgtgcactcatttggatgtttaaattctgatatgttggggaaaaaaaaaagcctataatgacttcatgaagcaaataattttaggaatttagaagagggaagttctcaggatggattggttagggtaagagttaggtagagaaatcgagatttgaagactggggaagatgtagggcgagtttatttggattgcattggaggcagagagtaactccatttggccgatgggggaaaatggtcaagggagggaagagaataatgt

SEQ ID NO: 6194 - DNA, 1045 bp, Homo sapiens
tggtgatttcagtcaaaagtcagccagctaattagaagtcataaactgaaaaagaaatttgtgtctttaatgaagagttacaatgtctaatccattggttctcaaccctggctgcatatcagaatcaccttagaagcttttaaaataaccaggcccgggtcctactctgaccaataaaataagaatctcagagactgggccataagcattaaaaacaaaacaacctcaaaaaaatacctgtcatctcagccacttcaggagtctgaggcggaaggatcacctggaattcgagaccagcctggccaacaaaaatgagaccctatctctacaaaaaaattaacaatgagctgggcatggtggcatgcacctgtatttccagctatttaggaagctgagacaggaagatccctttgagaggtgaagccagctggacttctgagttgcgtggggacttggagaacttttctgtcttacaaggggattgtagaatgcaccaatcaacactctagctaggattgtaaaacgcactctggctagctggaggtttgtaaaatgtaccaatcagtgcttgtgaaaacgcaccaatcaggctgggcacagtggctcacgcctgtaatcccagcactttgggaggctgaggcgggcagatcacctgagttccaggagttcgagaccagcctgaccaacgtggagaaactccatctctaccaaaaatgcattagtcgggcgtggtggcacatgcctgtaatcccagctactagggaggctgaggcagaattgcttgaacccgggaggcagaggttgcagtgagccgagatcacaccaatgcactccagcctggctagaagtttgtaaaatggaccaaccagtgttctgtagaatggaccaatcagcaggacgtgggcggggacaaataagagaataaaagctggccaccccccagccagcagcggcaaccggctcgggtccccctccatactgtggaagctctgttctttcactcttcacgatacatcttgctgctgctcactctgggcctgtgcca

SEQ ID NO: 6195 - DNA, 1075 bp, Homo sapiens
ttttcccgggcagcttacctgctcggcctgggtctttctggacagcaggcgctggaggtgcgcgtcactgtccgccgccgtgtccgcggctgcgccagacagtgtagaacctgcggcctcgatgtccttctcccgtgccctattgtgggctcggctcccggcggggcgccaggctggccaccgggcagccatctgctctgcccttcgtccccactttgggccctttcccggggttctggggcaagtttctgtccttgccaccgcctcctcctctgcctccggtggctccaaaataccaaacacgtccttgttcgtgcccctgactgtgaaacctcagggccccagcgccgacggcgacgtcggggccgagctaacccggcctctggacaagagtgagtgcgggaactactgagggcggcagagggtggtgtctgctgggccgaggctggttgggaggaagctacatccccttcccctggggatccgaggtcccatcgagtgttgtcatcgtgcctctcagtgtctgcctccttcgctggtgtgtgagcccctcaaacggcttaggactgtatctgattaattcttaacgcctcgtcccagaagcggccttttcccttttactgccctgctctctgaatggtttagacactcatgtgttgggaagatttgacttttttgagttgttaggtggacgcccgctctttcttgcattctttgtttctctcccacccccgaatgggatgtggcagtgaaaagccagcggagactccttttaggattctttatcattgaggaggcgccgactcataccacgctgttaggctgtgtggtggttgccaagaggaaccagactcagatccagatcccctcttaagaaacgtaacggtatcgtgggggaggacacgtgtatggaaagtgaactgtaatacaaggtagaacatgacaaggtctagaacaaggtagggtgtccccggctccagagagaaaagaagaggtagcatcagttagtggcagcgggctttgctcagcaaaacttaagtttggatggattcgttgacagagaggcatgtgaatg

SEQ ID NO: 6196 - DNA, 1070 bp, Homo sapiens
actaaaaccttctagttcttgcaacactcattagactgctgcctttagtgttattgcttcaagtttcttttgctttttttcagcatttatctaagataaggaaacgttaaattttgacatctctcttctagatgaagtaaagaaggtcttagacaaattttacaagaggaaagaaattcagaaactgggtgctgattatggacttgatggtaaggcccaaaacatcttcatagaggtattttattacctcttacggtacagcttggtcaggactgtacgacccctcatgtgacctggctgttgtagtctggagacacgtccctgctctttgcttctggctgagtgggagactggcgaggctcacctggtgagccatactgcacggcagaggagctgcagctgcggccttccttcatgctgtgctaggacttcagttttagcccagatcataataaaccagctgtactgccaaaaaaaaaaaaaaaaaaagaaaaaaaaagactctttgatgagtttggtgtggtgtgtctgtgtgctttttaaaatgagaactacaccttacatcttttcattttgtgtttctacagctcgtctcttccaccaagctttcataagctttagaaattatattatgcagtctcattccctggatgtggacattcacattgttttgaatgatatttgcttcggtgcaggcaagtgtttagagactttttaaaatcctattgaacataccttctatttcttctcatacttcatgctcatttctctagaagggcttatttggtttagagtgggtctggtaacatcctctgtaaataattcagtgctttcacaggatgacttctaggttgtttgcttttatattgggtccctgagctggttattacatcacccatatgtcttagactggaggaagactggggcccagtgaaataagctctcacacaagttggaattagtgcatagcagattccatctgtttttgccactggcttccttctccctcatatcaggacaaagttcttgctataaaagaaaaaaaaaaagtcaaaatatcatagtttcat

SEQ ID NO: 6197 - DNA, 1513 bp, Homo sapiens
agtatggacttggagctggatgtggtgacttgtgcctgttaattctggctacttaagagattgagatgggaggattgcttgaggccaggagttcgagaccagcctgagtaacatagcaagaccctcatctctaaagaaaaaaaaaccttttttttttttgagctggagtcttgctgtgttgcccaggctcgagtgcagtagtgcaatcttggctcactgcaggctccgcctcccgggatcaaatgattctcctgcctcagcctccagagtagctgggactacaggcgcacgccaccatgcccggctaatttttgtatctttagtggagacggggtttcaccatattggccaggatggtctcgatctcctgacattgtgatccacccgcctcgacctcccaagaaaatgtttttaaaattagctggtcatggtgctgcgtgcctgtagtcccagctgcttggaagctgaggcaggaggattgcttgagcctaggagtttgaagttacagtgagctatgattgtgccactggactcaggctgtatgacagtgagacactgttaggaagatcactttcaacccaggagttcaaggccatcctgaacaacagtgagaccctgtatctaaattaaaaagaaaaaaaaaagagtatagactttggagctagatggcctgggtttgaatttcatctctgcatttaactgtataacttaaggcaagtaacttaatttctctgggcctctgactttttctgtcaaatggagatagtgataatacttaacctcatagatttgttgtgaggattaaagaggaggtacttaagaggaggtaaaacacttagaacaaacctgctggaaaagaggaacccagtaagtgatggtggtagtggtgatggtgatgcttgaattttggtgttggaatttgtttataatactatttaagtagatggtattgctcatgttaacttttttattttaagatgaagtggctgtaattgatgaaattcaaatgattagagatccagccagaggatgggcctggaccagagcacttctaggttggtggtcgtaatgctataaaacccgtgctttatgacatctgcgctgagatgcatttttatctgcttgccattgccaaccaaatagagtcacctagaacctttctttttgacacaaaaaagtaaactaagtatgagtttttattttctaaatattattttaataatgggaaatctattttttcctgtgctaaaactagcataaccatgtaattaaagttaaaatgttcaaatctcatatttacacaactacaatttatgttttggtgtgtttcatgctagtcttttcttttttgtatgtgcatatggtgttttgagaacattagttttgtatcttgctgtttttcatgtgacatttttcattatgtattaatatgatcgcatatctctattgaagggcaatactgtaatttgctccatagagttgaacctttttttccctattactaataacgctg

SEQ ID NO: 6198 - DNA, 1061 bp, Homo sapiens
acagctattctagtgaatagaagctctttactaaggtgtagggagtctctggaacatgcaggtcaacagttgcttgttttcttaagataaggtctcactatgttgcccaggctgcagtgcagtggcacaatcatagctcactgtaaccccaaactcctgggctcaggcgatccttccacctcagcctcctgagtagctaggactacaggtgtgcgccatgatgcgtggtgtgttttctttttgagatgaagtctcactctgttgcccaagctggagtgcagtggtatgagcttggctcactgcaacctccgcctcccaggttcaggcgattctcctgtctcagcctcccgagtagctgggattacaggtgcccgccaccatgcctggctaattttttgtatttttagtagagatggggtttcaccatgttggccaggctggtctcaaactcctgacctcaagtgatccacccgccttggcctcccaaagtgcagggattacaggcatgagccaccacacccggccgctccgtgtgttttctgtttaaaaattagaatatgaaatctagaggcttttccttttttcctgatctttgtcattactgaactatgaaagagctcaatcacattaatgacttaggatgccccttaggactgtgatttggaagctgtgctccatggagctcctttagggccagctgctggatggatggatggatggatggatggatgggcgggcatctctccctgctctctctgcatagctccttacttagctcttttatgtattgggcttccactagttgtttgtggccaaaaaaaatagagccactgcctttataagataacttgagaactcatgcttggcctgtcctgcctagcaggtagtgtggtcacatttctaccctttatggctatcctacttggcatttattaaacttagcagagtggaccagactgaatttaacaaaattgtggcattatttaactacaattgatctaaaactgctcttcctctctgaagtattaaccttgcttaggttaagcatttagagataattt

SEQ ID NO: 6199 - DNA, 1113 bp, Homo sapiens
tacttggaaagtgtacacaactgtacaaatgccaggtgttatcattgtcactcacccagctcacacctgtagacaccttgagtagccaagtggaggacggcagcttcctggctaacagagtaggcagacaacagagccctgagcctgggcaggggtcctgagtgccattctgcctttgccttggattgtgtgagagctcctggaccatctgcatgtctgtgtgccctggccaaatggacagatgaaaatgacaccatgggctgctgaaatgccatgttctgaggactctaaagtgtcatggagctcctgtgtatggtatgtgaggccagaaggcagatttcatgattgctgttttactgatggaaatacacaagagatcgaagtgacttgctcagggtcatagagggaggcagtgcccatggccgaggcctgaggtctttcgatttctagctcagtccagtcccaccactgcagtatctccaagccacagcattgggatttggttgtctcacagtgaaagtaaacctgtctgcactcagatccttttctccctgttgtcgggaggtgctgggacagtgggaattgtgagactggaggtccagaggctggctgtttgctaagccatccaccaggaggctgagaagtaagcctgttgtgcctgccctgccacattccagggctgttctgttctccccgagggaatgggggcctgctttatttttagctagttcagtgtgacagccttgttctctttctgggcaaggacttggccacttttaccagtcaggaagctccctttagaacctccaggccctactcaggttctcctaggaagagggggccaagggaaggggagctgaagttggagtgccgctctgcttgctgggggcctggggcatttggcttaactgcacagccctaggttccacctgcctcatgtggggttcataacagctaccttacacattgtgcagatttggatggaggagcttagagcacccagcgtgggccctgtccacattcacgttgctagaacgtcagtttcttcatcaagaatggggatcctggctgggcgcagtggctcacgcctgtaatcccagcactttgggaggc

SEQ ID NO: 6200 - DNA, 1108 bp, Homo sapiens
gcatctccctctccaggaagcccctggccctggctctccctggactgagaggatagagcacaggaccaggaatcagggagcttgctgtccaccccagtctctgcaagtatgtcgccctggccagttgaggaacctcctggccactcattcttgcccagggtgttggaagtgatggtacctgctctgcttctgcagacaggatgctgtaaggaccaacaggtaaacgcgctgtgccaattagagaggcctttataggtcaaagtcataggaacgcacccacttgacagatgggaagactgaggtgcccacaggatggcagagccagaagtcaaatgcaggtgtctacatggccccgactgtgccctgtcatcggaccgggaggggtcctgaggaagtctttagtacggctttgctagtttgagtcttagagagtgtctgcaggaaataggaagcgggaagtaggtttttaaagaaaaaagtgtttatgatataattccatttttgtaaaacaaaaagaaccatccatctctttatgtatgagtgtttgtttagggaggaagatagtcctagtacatagagctctaaagtccttgtacataaagcagggatatctctggggagactgggggaagaattaataatttttacttttatgcatttttatgatgttggaatatattttacaataagtatatattactgttattgcttcttttttgttgtttttttgagatggagtttcgctcttgttgcccaggctggagtgcaatggcgtgatctcggctcactgcaacctccgcctcctgggttcaagtgattcttctgcctcaccctcccaagtagctgggattacaggcatgtgccaccaggcctggctcattttgtatttttggtagagacagggtttctccatgttggtcaggctggtcttgaactcccgatctcaggtgatccaccagcctcggcctcccaaagtgctgggattataggcacgagccaccgcgcctggcctattattgcatctttaaaaaaaaaaatgaaacagtgtaaatgtttcaagtagttttgttagaatctttcatttgccatttttttcaggcatattgcc

SEQ ID NO: 6201 - DNA, 1049 bp, Homo sapiens
gctaaatgttctgtgaaatcttccttctaacttcatttgttcatacatttgctcattcattcattcaccattccatcaatctgctctcccatccatccatccatccatccgctgatccatctgctgatccatccatccatccatccatccgctgatccatccatccaatatgtgtctactgagaccttatgccagtcactggggataccatggttgggcaaggctgacctgctgtcattgactttactgtctagtggcttgtgatactttagaaagtgtagtgtttatgggtctcgcagatactgtgtgggttgctcttatgtcttcagaacatgaagaactccagaacaaatgaagggttcattttagggaaatctctccatcagggaatcaaagcttccctctcttcttatcccagataatagcaatcctaatggacaggtgggtctcagacttaaaggcagagattccagaccccctttggacagatttcacagatgcagaattgaggcagcccccaaaacaaagaaatacagaggggaggtagaattgaaagaaaaattgtatcctttcactctgcatcctgtggctcataccctgcagtggggcgttgggggagggccccctgaggattgtctgtttctcctccccagaggagtggtatcagcccctgcacctggctgagcggagactgagaagtcgcagtctggcctgctcagtggaagctgttcttcccggcagacccgcagttactagtttgtggaggtgaatgctgtgcttgctccagcgtggcgccctcacaggaatcccctgttagctgtgttctgtgctctagggtggggctcacctgctgtaggcagcagagggagggagagcaggaggaagtcaggtttcccttggggttgtgagtacacgaccagtgagtacagctttcacacacccctgcgatttcttccctgctctcgaggctcttatttaaaggagtgatttggggcatcttgtatgcagcctgcaaaatggacgccaggaaactgcagctgttgcaactg

SEQ ID NO: 6202 - DNA, 1053 bp, Homo sapiens
ctttattattgttcatgcatctgtgggtcagttggacagttctgctcatcagggccaggattggctgacctctgccggcctcattcctgcatctgcagtcagctgttgagtcagctgggaggcagatctcagacgcccttccccacatgtccagcagttggctgtcagctggggtgcaggggcccctggccctgtgtctcatccttcagtgggccacctggctgttcaagtggtggcagcaagggctgcgagggagaggggaagacttcaaagcctcctggaagcccaggctggggataggttcagctttgcctctgccacactctgttggcctgaacaatcctagggctgggctagatcccaggggaggagaaattgactccatgtttcagtgggaggaactgcagtcatgttgcaaagaaggattttgcacatgcagggaagggaatgatgcagctgtttttgcaaataccccacaccttgacataaattattattttttgtaggagattttcattgttgcagccctggtgaagtctgtgtattgtgacaggtggtttactcacatgctctcctcccagtgtggctccaagtctgtggtggtcagagatgtggtgcccactcttcctctgagtctgtgctgtgtcctaaagggaggagttgcagcttctcctctatgtttgctatggggttctccccttgaaagtctggagtcttggggttactggctgccaagaggcacttagctgtttttgacattctttacgcttttgactgcaacagagaatggtgacttcttggccctggatcttggaggaaccaatttccgtgtgctgctggtgaaaatccgtagtgggaaaaagagaacggtggaaatgcacaacaagatctacgccattcctattgaaatcatgcagggcactggggaagaggtgagattacaaaaccatagtgcatgtgcactgcacacacggccagtggcaccggcagtcacgtgatgaccaaaatccgccacggggtgcccacatggatttgtgtccttgtggcccagaa

SEQ ID NO: 6203 - DNA, 1033 bp, Homo sapiens
caggtgattggcccgcctcagcctcccaaagtgctgggattataggcgtgagccaccgtgcccagtggcctttaaggtctttactgacatttaatgaaggaggaaaaagaggaagaaccaatagtaccataaagagatggtaactaaaaaatgagtatagtgaagaaccgtgctattcaagtctagctgatgctgtcgcctaccaaatgacctgaactaagaccccctttgggctgagtgcagtctatcatcaaagtaatcccagcactttgggaggccaaggtgggaggattgcttgagctcaggaggttgagaccaccctgggcaacatagggttgagaccctgtctctactaaaaattaataacaataataacaacaataatagtaagacccccttggttaaaaagcggggggatcagcaagtgttggaaggggttaaggacatgtcagcaccaaactggggtggtctttgtggtggaatgagaaggactgggtgggacttcgtagtggtggcccacccctctgtgattccattctgtttcatgttcttccatggaccacatgaaataggaggaatcctggagttccaaattccaggggactcttctcagctttgggacactgggcttgggcatgtgccatggaaatgaatcaatcctttgttatttcttgagatccttgagcatggagagggcaggaaatttgaagtcccaagaacaggttgacctccagtgtgttgtggtcactgaattctccctcctgtgtggcctcatcactctgctgtgggcttgaccagtactctgggtatttgcaaaacctttagaaaaatctagaaactttccttttttttgtcttcttgttcctttaagacttagcccagtcatttgcttattctgcagatagtttttgggcactttcctgagggcccagtgctatgctatgctgtgctgtgccctggggactcagagctgaaaaagacacacatgccctgtcctcttggggctgtcactacagcagtggtggtgggaggc

SEQ ID NO: 6204 - DNA, 1097 bp, Homo sapiens
agtcccacttgtacctacaaggcgaggatccagcttggggcagaggcctggctgggggtgtaacccgcagtggtcaggtctgctgaggccttgactttgcaaagtgggcagggctgatcatggtgctacggactctccacagagcaccaagcctgtttccttgataacagggtaggactttcaagtgggtaaaggtgtcatggctggggagtgttgactaatcaggaagaaaaggacttggtgggagttgggggcaagtagggaggagctgagggtgggtaggtggtggaggcagcaaatgccagaggcaataggaactctttctgggctttctccaaggatgaacctgcttattagagcttggcctgtgatttcttacatttcttatagtttaatggttaagagtgtgggctgtgtaccaggttgcctgggttcaaatcccagctctgacacttaaaggttaagtggcctagacataacttccatgcacctaacctacctgaagagttgctaagcagattagatggattaatacatctgaagagcttagagtggtgcctggcacatgatgaacactccatcaactagtcatggattagtcgttcttttcctgccttcctctctagccttgctgctcaagagccatagactaagaatgagaagggctgttaaagacacctctagtgcagccttttaaatttaccgataagaaatcagaggcctgaagagaagtgagttgcctgaaagcccacagcaagtcagtgacaggccaagaccagatccaggctgcctgactccagtttcttcctcgggcccccatgacctttccaggcgccatgtatgtttctccctggtctcagggtgagggtagaagataacctttctgaaagaggccacgtccctggcctcccagtgaagcactaggtgaagccaggccaaaaagaaagcacttctctggagacagtttccaggagatttttactttcgagaagagctttattatttttgtgaaaatcatacatgcgcatagcttaaaagattcaagccatttgggaaagtacaacgaaaacagcaaaagtcccctttgattctaccac

SEQ ID NO: 6205 - DNA, 1094 bp, Homo sapiens
tcccacttcctgcctgggagagcaggaaccccctactcctggggccactggaagtccctctcaggatgttgcctgtgaccttgtatgagtgacacaggctgtttcccatctcctaccagagggttggccatgctgacctctccggctgtgctgggtgcagtgtggggagactgtgggggtgcttggggtcagagtgttcatttctgggcactcactgtgtgccaggtgctgggtgcaggcatgggcacagtgtggctggtggtgggctgaggccagcctctggcccaccctgtggcagattgggaccatcccctgggtgcagtagggttggggtgctggctgccgaggctgcacaggattctgagactaggtcacttcccagagtcaaaagacaggaacttcttggccagtggaccttgacttcatggctcaaggcctcctaccctgggaggatttcacaagaacacatgtccaccacccccccgccaccaccccccccatcaccagagcttctgattcagtgggtctggtctaggcccaggcacccgtaattaaaaaaaaaaaattataatgacagggtcttgctctgtcacccagagcaagtggtccaatcatggctcactgtggccttgacctcctgggctcaagtgatcctcccacctcagcctcctgagtagctagaaccacaggcatgtgccaccatacctggctaattttaaagttttttttttttttttttttttttttgtagaaatagtgtctcaccatgttgcccagcctagtcttgaactcctgggcttaagtgatccacctgcttccgcttcccaaagtgctgggattatgggcgtgagccaccgtgcctagctttatctgtaatatttttatttttattttattttttaagtttattttatttttgagacggagtcttgctctgtcgcccaggctggagtgcagtggcgtgatctcggctcactgcaaactccgcctcccaggtttatgccattctcctgcctcagcctcctgagtagcttgggactatgggtgcccaccatcacgcccagctaattttttgtatttttagtagagacagg

SEQ ID NO: 6206 - DNA, 1031 bp, Homo sapiens
gatttccaggacacctgtctctgcaggtgaatcctgagtaatgtgaaaccttcttctgacatctcttacgatctggacaggttctctgagctggggaaagttagcaaacacagttgggagaggcccagaaagaaagagaacactctagccaggggtttgggagaagtgcagggggagtcagtagggccccatgtgggcgaggaagggctggtggaggtatgtggagaccactggcctgggaatgtgggagactatgggagctggcttctcctgcagggaaccaggatgatgttgtgggagggaggggagtctgtgagttctagaattttgctttccttttggttgtcttcaaaacattcttttatgtgctctaaaggcaaggtttctatgcagttacctttgtaaatagaataagtttctatagaatcagtcttaacttttatgagtcagggattcagaaacttgtggggtggcctgtgataatttttcctccttcaatgatatctcgagtttgagaactctcgatgcaggattatcatgttggaaagctggctgtgatctccaggtcagtgaactgcagttctggcctccataggagaggtgtggcaggtggtggtctatctctacttcacagatggtgaaagagggccagacaggggagaggaccttgcttgggatcatggtggtaagctaggggccagttagcagaaggatgaggccttgatttctcactctgactggtgagctctgttgtgggttgagtcgtggcctcatcaaaaaggtatgttcttggccgggtgcggtggctcacacctgtaatcccagcactttgggaggctgaggcaggtggatcacttgaggtcaggagttagagaccagcctggccaacatggtgaaaccccatctctactaaaaatacaaaaattagccgggcatagtggcacatgcctataatcccagttacttgggaggctgaggcaggagaattgcttgaacctgggaggtggaggttgcagtgagccgagatggcg

SEQ ID NO: 6207 - DNA, 1026 bp, Homo sapiens
acaggaatatacccctgagcggttaccctgggaggaagcaagccccactccagcccaccccacccagctcttcattcctgggctccctaagcccatacccagaattccagtctcctttccccattcctaccccgcagctagagctccaaccccagacagaggatgctgctggcagtggcctgagctggggacttcctgtctcactgccagggccagacatccagggtgcatccgggagcactgtcttctgctctgactgacctctggctactgagtcagcggggtctgggggggcctggccggaggtccacccagggctgagatctgggaagaaaatcaccagacaccattacccatgtacgctggggacacagccttgggaggcaggcccgtggctctcttggttcagacacatggaaggtggggagagagagacagagaggtctggagagtgagggagaaagaaaaccagggggaggagggtgttgggtggagatgaagttgctcttgactctccttcccatggctgtttctgtggttctccgattaaccatgagtcattcttatccttaagccttggaaggctctgttccagactgggatcatcgcagagttccttctttgggcttacaggcgtctgaagccataaaccatttctcagatttattctcccagcagatatattaggccagtccctgtgctcagggagggtccagttgcatgaagtcaaactctgtgcatccttcagagtccttctctggtttccccaggaggaagtaattgctctgcatcttgtctcagaatgccttggtcagttatttgttctaccgcttctacctgcctgtccccaaactcttccccaaaacagcccagggcatgccatccccactcccaccctgtgcttcatttgtggttgttctggattagaaattccactctctgccctggctggattgaataactggggtttgcaaaactcccagcctagctccttcacagcctggaatgtgctgtgtgcctgtggga

SEQ ID NO: 6208 - DNA, 1053 bp, Homo sapiens
aggcagatctgaggggaccagcccatgacgggggttgtgcagagccgggattggaggatggcgggagccagctctgtggggaaccaggagtgtgctttccagacctcaggccccagctcttcccccatcagcgcctctctcctggtctgggacccttaacgagcactccagctgcctgttatttgatttgcttgctgtgaagaaagaagctggaatgtcccaaatggagaaaatcagatgacacctaggactgggcagccgtgtgcagtgaatgagaagggagtggaatttaaaagagccaaatgctgggccgggtgcagtggctcatgcctgtaatcccagcactttgggaggccaaggttggtggatcacctgaggtcaggaattcaagaccagcctgaccaacatggtgaaaacccatctctactaaaaaatacaaaaattagccgggcatggtggtgggtgcctataatcccagctactcgggaggctaaggcaggagaattgcttgaactgggaggcgaagtttgcagtgagctgagatcgagccattgcactccagcctgggcgacagagcaagactccgtctcaaaaaataaaaattaaaataaagagccaagtccatcttctaggcccaaggggaagcagaggagggtctcagcagccacctttaaggtgagttttgagagatgccaggtagactccctaaccccagtaataacatcagaaactgtaatagaaatgtcctgtagttatagggtgcatacaggggccaatgctatgcgtgtcaccactatatctctttcaatcctcacaacttccctaagggactgacattcacaccacccccttttacagatgagaagactgatgtcactgtacctccctcccactatctgtgattcattcctttggatgttaaggaatctcctgggagaggaagtggttgaaacttccaagctaaaatgttaaggaaccccaggcagactccttcatccctaaaaataacaacaattataataacatgtctcatgtttatacggtgtgtgattt

SEQ ID NO: 6209 - DNA, 1041 bp, Homo sapiens
cttctgcctcagagggctcagaccaaaactagagcaggagggctggtgagcggtgacatgtgtggcatgtcctgaagtgctgggggtgccctgagaaacaggtacccccaacaagtgcctaacaccacctttcccttccctctccttcccagggtcagtgtggagagtacccacaccgggtaagtgaacccctaaaatttagcagggcactttgatccatccctggggcacagcgcccagctcagcctcatctccctggggtctccagttactaacagatcatgggggagcaggagcacccactgccctctgcactcagcagtcagagaggggagcttgggatggtggtgcgtctggtgggaacagctgatgtgtctctccagccatgtgctatatggagccgctcatcacccgtgcgtgtctgtacatccgcccctttgtacgtacgtctgactcggtatgttggagtctcctgctgtgtgtctggagctctgtggctgctctgcacatggccccctgtggcagcgtgacttgtgtgagtctgtttgactccccacccaacaagcatgtgtgtgcgtgtgtgtggcggtaggggggtggtgtctggcagcctagccgtggccaaaacagtgggacttttctattagtcactgtatcagatgatggtgtttcacatccaaacctcgatgatgggagataatcggggactgactgcagcaattcaaggataaaatctctccttggcctctttaaaagcagaggaaacccttctccaagcagggtggggatttcaggctgagatggttcctctgcccacccccgcctgctccttccttttccttgctccaccccaagacacagaacccaaaagactgctgttgtcctgttaggaatcttcaaacttgtgtcccagcagcagggtcgatcttgggacaggggagagcaagatacgcacagcttcctccagtaggagccccagtgagctggacccagaaaaaaatgcccctcattttgtggattggcctcgttgctcccagacct

SEQ ID NO: 6210 - DNA, 1024 bp, Homo sapiens
tggacgtaggaatgtgggcccagctcagccagggttcccagtgtttcatcagaagccaccaattcaaattttatatgtaaagtctcttgctcagttgtttagtgagccaaataaaattccatgggctttgacctaaggatcccatttgatcctctgggtcagataaagacagcaaaaagctgagacaggaaacgagggctattgttcccattctatggctgagagactggggcttagggagaactgtgcctcgccacacagggagggtgacagaggcaggcccaggctgaagattcaggccatctggccaggctgggagcaggcctttggttgggccaggggctgtctcccacccactcctctgcctctgcccccccgcagaatgtctctccgcagcaactcctctttggaagccccaccttcagggacctaacatcttggcgttcttctcactgccaccagcccctgcatgtcatcaccactaccacagcatcatcaccatcatgccaccgcttcctccccccatcaccactccttcccggcagaaatcacagcaggccttcactgggtgcatggcctgagggtgggggacggtctgcagctctgggggccttccctctaacattcgtttccatgaacctcagggcgaacagagccaggccagcatccaaggtccaccagggcccccaggcccccctggaccaagtggacctctggggcacccaggactgccagggcctatggggccacctgtaagtattcccttcctctctccttcaagacttatcccaagaactctctggaaacctccaaaccttgaataggcagtgggtcccctacaaaaagcagaaatgccttggcagggccattggatgtgggtgaaccatgcaaggggctattcatccccatcacactcaccacctgttgcactctggctctgaaacacaacctgggccatgttccctgccttccagggaggagaccgccaatggcctgcctgccccgttcccagccccagcagaga

SEQ ID NO: 6211 - DNA, 1034 bp, Homo sapiens
tcggcctcccaaagtgctgggattataagcgtaagccaccgcgcccggccttgtccttcattcttaaatacaaacgcataaccaaagatcaccagacatttaagaaaagcctacatggaagtgaaagatgaaaatcaatcaataaataaatagaacaactgcctgataaaataatttagaggacagaagataaatttaacacattctaattagtttcagagagatttgaagacatggtgcattcattaaagtacaggatgctataaaaaaggaataacctgagaacaaaaagagctcttggaaattaaaaatatgattaccaaaattagataaagactgaagaaaaaatagaagaaaaaagataagagacttggactattaatccaggagatccaatacctggtttacaggaatctcagtaagagacaaagaaagggggtattgggagaaataaagaaattggcagtgggttgaggggggagggataatcaaagacataatagaaaaaaaatccatgttataaaagtctaagttttcaggttgaaccaacttattgccaaatgctgagcagggttcaatgacttcaaaatattgaagcaaaatgattttgacactaaaaatgttaatactctactaaatgataacctaaagatcgttcaagtaagatagttctgtttctgtaagaaaacaaagtttaggccagatgtggtggcttatgcctttaatgccagcactttgggaggctgagatgggaggatcacttgaagccaagagttcacaggcggggggatcacttgaggccaggagttcaagaccagcctgggcaacatagtgagaccccatctctacaaaaaaatcagctgggtgtggtgtacacctatagtcctagctattcaggaggctgaggtagaggattgcttgagcccaggaggtcaaagctgcagtgagccgtgattataccactgcactccagcctgggtgacagagcaagactctcaaaaaaagaaagaaagaaaacaaagtttacttccctg

SEQ ID NO: 6212 - DNA, 1041 bp, Homo sapiens
ttcagggaggcagaagctggagctaaggtaagtccagggtttccagggctgagcaaactgatgaaaagtcaggactttcattcatttgttgaatattggagcacctgcctgccagtgactgtggcaggagccaggcagcagcaaggaatacaaaagtgcttcagtgaagatgtcagctggggcagaaccagttcacgttaagcatctacggtgtgtgctgtcgggcgcaggcatcaggatgtggatgtgattgtaggccctgaacactcctgaattttacaaccaggcggggaccccagggtaacacagtacatcacttagcacagctggctgctgaattgcatggcagaggcccggagagaatgggcgagggagtcagggacaaaggaggatagccaagtgtggagacagaggtgcagccagacccatgtgtgcaggggactgagcccactggctggaggacgactgggcatccagaaagagcaagaaatggatagactccaaggggagaggggccgaccatgaagggagcctgggaggactgcagtaaggccagggggcaatcaggagcagttgcagattctgagtttaaatgtggagtttaaggaccttggctccagcaaccgtgtggaggatggtttggcagacagagggctggggcccgaagaccatcaagaaagctgtattggatgagggtgggggtggagtgggggtgaaaatgaagcacatgggcctgaaatgagacaaggcagaggaaactgatggtgtctgcagtgacaaagagggaaaaaggggaatcgggtttcaggagtgaatggccattttactgggcacgtgttagccctggggccccagaaaggtcatgaggtgcaggtccctgttgaaagctaaggaggaaaatggcttgcagatggctgcttaggaggtggggctgcagcagagagaagagcactgggcccagacacgcaggaagaagagaggccattgtgggaaactgaggtgctgttaaaagaaaacccacagtgtcacggaaaccaggca

SEQ ID NO: 6213 - DNA, 1065 bp, Homo sapiens
tgccaccctcagaatgcaggtcttcaccaggcaacatcacattaggtaagagaatgcccctagtcattatgtggataggtgcttataccaaataccagggtcacagcccttgcaataacttgaccctcatccttgacaactctggagaacattacaaagcattatggctacaagctgtgttattcatttccagttgccatgaacatactttgttttggactgaaatgtcatcgtgcactaccctgaaagtcattttttacttgattggatgtttgacattgccaataggaacatattccttttatttaaaaatgacttttggctgggtgcagtataatcctagcactttgggaggccgaggtgggtggatcacttgaggtcaggagttcaagaccaacctggccaacatggtgaaaccccatctctactaaaaatacaaaaaattagccgggcatggtggcgggtgcctgtaatcccagccacttgggaagctgaggcaggagaatcgaatcgcttgaacccgagaggcagaggttgcagtgagctgtgatcgagccactgcactccagcctgggcaacagaggggcatcctgtctcaaaaaaaaaaaaaaaaaaaagactttacattagaggaataccattctgctagtaacatgattatacttttaaaatatatgaaataaatcagccatgactgtaacaagccaaactctgtccggcatacaatagcagccaggtgctcgggaagatggcaccatgcaggcaaggcccatctccagggtccttggttctcagcagagcagcctccagttttaggggcatcattgttcagtccaaagagggacactctgcttctggtgcacaaatatacgtggtcgtagagtcagcacgcatggcgggcccctacccagggcctcggtgtattgtgtggcctgggtcctgcactcaggcgttcacgtgtgatgacactgagccccgtctaggcactggaaggcagggagcctacagcctcccctgatggacgaaggggtcccttggatttggcttctacccatgtgaggaagt

SEQ ID NO: 6214 - DNA, 1052 bp, Homo sapiens
ccacactgcctttctgtgtctggttcagagctcttccttcttggcatgttttctggactacatgcacatgggcagctatagattaatctgcaaaacctagtcacttacctacccataatatctgggaaggtgtggtatttgttttaaagaaacattgtttctttgggagggcagtttctgtctggactttgaggtggacttagttatccctacagttctttaactctcagcttttaataaaagatgaaatcagatattgatgcagttgggtcacaattctttagaatgcttctaccccagggccgcttcctgttcctagtcatggttttccagtttagtagtggagtttcttgaggctaacttacagaaatttctaactgaaaactttaagagttattgatacttgttttttcagtcagtcacttacatcacctagcctactctctggaatttaaatttatttctctaggctggtcctggaagttgataaccttttggcaaagcttagatttaggagaaggcttgagtccctgttcagcgggtctgtggattctctttgcttatggctctctgcctgcagccctggcagaccatactgtatgtcatggatacccagtggaaatattactgagatgaaacacatttccaagggtatttaaactctcactctgccacctttctaagggtgggaggctggcagagatgctgcaatgcttgataatcatttggccacactgaaatttccaaagggagctcttgccggtgcttaaaaccaaaactcctggacacttagaaaattccatgaatctagcacaaaatatccattcttgcccaagtgtatcccctttctctccagcttaatcttttttttttttttttttttaaagcccaggccaagggtacttttaactggaaactggggaggagggaagaacactagcagggagctaagaggcaggttgctgggtaagccatcctgctcctacctggtgcctgtatctacattgctgagtgctgtgcgccagtgcctttccttcatctgcagatggagc

SEQ ID NO: 6215 - DNA, 1035 bp, Homo sapiens
gctttgattcttggcccagtctggccctcttcctctgtaggcccgggtctccaaggagagtacgtttttcagtttcagagggttttcctgaaggggcagtaacctgtcagagagagagtggcctatgggagacccggctcctgaaggtggccgggatggttggagccctttctcttgggttgtcagagatgggagtaaagcttcatggcccagggaatcttctgggcatctctactctcccagccagaggcccaggaaccaactccttggcttctgggtagagtaacctgaacccagtggccgagcacctcttaaatgccaggaagggcactgggccgtgcccctggaatgtgtggatggaggaggatttggaggattctgtcctcaggaggctcagcccctgggggcaagacaggacataaacacacaaagttccccgatacagggtttcaataccagtcctgaactggtaatagtggaaagccaagaggctacacaccattaattgctatgtgagtaatgtaggctgcgagagtgccagggcagcagagatccagttccatgcaagcaagcaaatgtgctgaaatgttccagctccatgcccgcccttccttattaccttgctccaagggcagggagcagcaggggcgctgaggaggttctcctgcactcatccccacccactcccaggtttgtttgtttcctgctggtggatttctgaaataacccatttggtttcttggcttgggctgagcacaggacactcctagttgccctgtggctcctggggtttggggtctagagccagccttgtaggaggttcagaggtaagcaggaggaagtcctcacttcctttctgaagagcctctgtcgcggggggttggggtaggtcgggaggctggcaggcactgggccagtttcctatgagtgcagacagaccccaggtggtgcatgcacccccctccctttcctggccagtgttgggggtgggcacagtagggcccaggtggcttgaggtgggtggttcctggcaca

SEQ ID NO: 6216 - DNA, 1007 bp, Homo sapiens
tctggggccctgccccctccctcattgtccctggcaggtttctgtttttctggagcacttcgtggaggtggcagtgtgctcatgctcgtggccttgggtgcagttctgggagtgggagttgctgagctcacccgaagcccttggctggcactgtgagaacttgtgtgaacacacttgcctgcctccaaacaggtggtgcacagacctgggttacccaggcacctgtgggggatgccccgtgtgggcagagacgtgagtgcgtgtgtgtgctcaggtttacatctgtgtgggcagagacgtagaggagctggatacatatatacttgaggacagacacaggaggatggtgggggtgagcaaacaacccagggacacagacatgtgcggggacagacatacatgaacccatcagcgtgggccacgtatgggctgcagacacgtacatagaaatacaccattgctgggatctgaatctccccacatgggaggcagacatgtaagtggacagacatataggtagacccagcagagcacagacggggatgggaaccgacattcccagacaaaagactcggagccacagggaagccgctcaagtgcctgggcagaatggagttggctgtgagctcctggggggcacagacacatatgcttgccagagccagcggacagcagaggccaggaaccagacacaggtgggttctgagaggtaggccgaggcgtgcattgcctggttatcactgtttccctgcgtggcacagtgcccggaagttgtcctgtttggggtggtgatggtacaggtgctctgtggtggagcttatttctagactctcactttggggtttgaggaccccaaaaagctcagtctcctgtgttttactcagagtcatttggcctctccacctctgcattacaaggctgtgtttgtgccttaagtgccagcaggtgctctttgaattttgattctcatcttccctggatctccagaggcttcctgaagtgaggct

SEQ ID NO: 6217 - DNA, 1050 bp, Homo sapiens
gggacctccatacacggggtcaggaaatggcaggctgggcgggcgtatggaagcttgggcctgctgactgctgggcctctgggaggggagccagtgtttgctaagaatagtcccaaatcatggctttcgtttcccagagggcagcccagccatgtgctgcccctgtcttgggccaaggcacttgcagatggactttttatgtttcctgtaactggtgctcagcacaggattgagcctgggagcagcaggcttagtctgggaggaggctctgtttgtcttccgaggcctttggctgggacccggggaaagagaaggtctggaagcactggcctttataatccctgagttccttttccactcagggcttttcctgacacatctgcctcgaccatcttcctacctgcaaatagacctgttgtgattaagaacactggctctggaaagaaactaccagggtctgaatttctgctccctccctcattagccatgtggcccagggcaagaaacttaacctctctgtgcctcaagtcccttgtgtaacagggttaaggatagcaactcccttatgagaatgtcacaaggatgaaaggaggtaatcgcagagagcctccgaggctgtctggctcctaggaagtactcagtaaacattaggtgcttatgttattaccacgatgttattctctcagcagaggccaggatgcttgcacaggaccagttggtgggaagggaccagcgtggcatcttgatgtgggttcctgagctttcttggccctgggttcagtatgaggtgcaggggctccgaaggtagattaaactctgtccctgccaggaggtgagtgaggtacatgcagacaccatgtctggttctgtgatggggtctgtgctagttatggttggagcctgagggagggaatggctggcctggggtgtgtgtgatacttcacgtgggctttgagggatggccaggagtttgcaaaggaggagggcaaggcttccccagcagaaagagcagcgtggcagaggtgtgacagcccttgtgaagcgttttgt

SEQ ID NO: 6218 - DNA, 1026 bp, Homo sapiens
ttttttttcttgtttttgagacagagtttcactcttgttgcccaggctggagtacaatggtgtgatctcagctcactgcaacctctgcctcctgggttcaagcgattctcctgcctcagcctcccaagtagctgggactacaagtgtgcaccaccacacccggctgatttttgcatttttagtagagatggggtttcaccatgttggccaggctggtcttgaactcctgacctcaagtgattcacccgccccggccccccaaagtgctgggattacagatgtgagccgccgtgcccagccacaaacttcttttattacaaccacggaaggggcacacatgggtcctgtctctggtatggattcacacacacgtgcacaaattgaagtccaataaaaagcatttcccacagacccaccatgtgccatgaaagagcttctctccagcacagactggttggtgttgttctggtcttgagctctcaacaagagctttgccgtgttcttcacagacgaggactctgggactgtggctgtgcagatgttttctcatggcagagttatccaagaacatcttcgtgctccctttatgaggcaagctgttgttcttggggcatcatcttatttaatttttcttggcttcattccagcaagttatgccgattgtttaggatttgagaggttactgccaggtattcctccaggaggaagtttctttcctgtcatatactttgaaaatcaggaggcaggttctcttcaatggccagttcttcaaccactgttgaggtatcaaagtcaatatcttttttttttttttctctgaggactacatggtgaccaaaaacttgccctccaggttcttgatctgcacctgcttctgctcccacttgttgttgcctgggttggcgccatcaccacccaccacatttctgctttgacgtctgccctgtagtgactgaacccttcatcctgggacccctgaggttggtgccaacccctgcacttcccagggacagccctctatcaggg

SEQ ID NO: 6219 - DNA, 1049 bp, Homo sapiens
tcctcccgagtagctgggactacaggcgcccgccaccatgcccggctaattttttgtgtttttagtagagacggggtttcactgtgttagccaggatggtctcgatctcctgaccttgtgatccgcccgtcttggcctcccaaagtgctgggattacaggcgtgaaccaccgcacctggctgtgcccaattttctcacctgcagaatgggcatgaacatttccccctgcctatcttcaatgttttttttttaaactgaggtgaaatccatttaaataaaataaaccattttaaagcccacaatttagaggcatttagtatagtcacaatgttgtacaaccaccacttctatcacattctaaaacattttatcaccctaaaggaaaactccacctattaagcagttactcaccattcccttctccaccacagtactttttttctttaaaaaaaaaaacaaaaaaacaaaaaacagttttgttgagatatgtgcaccataaaatacacctgcgtgaagtgtgcactttggtgaatgtcggtaaaagtcctgggcatgcagccaactcctagacaagtctgacaacactttccatcacctagaagggccctatgctcccttgtagccggtcaccactcccaccttgggcccaggcccactcatctactttctgtcactatgattttgttttttctggatttttcacatacgtggactcatataacaggtagcttttagtgactggcttctttactcaacatgatgttttttgagattcatctctgttattggatgatttaatcagttccattccttttttattggtgagtagtattccaatgtgtgggatatgttaaaaatagtttaaaatttctctctctttttttttttaagaagggcctctttcctgttgcccaggctgcagtgaagtggctcagggtcgactcactgcagccttaacttctggcctcaaatgatcctcccacctcagccttctgagtagttgggactacaggtgtgcaccaccatgcccggctaatttttgtattttt

SEQ ID NO: 6220 - DNA, 1172 bp, Homo sapiens
cttgcccagcctacgtgggtggaggatgggatgcctgtggcctctgaggaaggggctgcctgggctcagattttcaccctcctggccccaccccaaccccaaccaatgagactgcagccagtggggtcccaggtgctctgagtcttatgtcatgctgctttccttgacactgccatcgatgtgtagatgaaccccatcccctgcatcctaaagttggttgttttcattgtttttaagttttccctaacttaacagtacaaagtagtgccttaattgtaagacatgggttctgggagataggaatcctgtgtggtggttccagggcagccacttgcttacccaggaaggggttgtcttgtgacttggggtctcatcctgggctcaggaatcctgtagggggaggggaggacctggcagggagctctgcataggtgggtttgtggatgtctccctttctgcagctcagtgctgctcaaatgtgggtaatacgtggacttccaattcacagccctattgagatctaattcacatgctgtacaattcactcatttagtagcttttagtacattcaaagagctgttgtctcaccacagtctaattttacaacattttcatcaacctcaaaagataccccagtacccattggtagtcactccccacccccagcccgctagcatgctctgtatctctatagatttgctaattctagacatttcatataaatgaaatcatacaacatatgggttttttgtagactccctctctctctcttttttttcttgagatggagtctcgctctgttgcccagtctggagtatagtggcgtgatctcggctgatggcaacctccgcctcccgggttcaagcgattctcctgcctaagcttcccgagtagctgggatcacaggcacctgccaccatgcccagctaatttttgtatttttagtagagatgaggtttcaccgtgttggccaggctggtcttgaactcctgacctcaggtgatccatctgcctcggcctcccataatgctgggattacaggcatgagccaccacgcctggccctctctctctctctcttttttaaaggtctcactctgttgctcaggctggggtgcagtggtgcaatcacggctcactgaagcctcaacctcctgggctcaggtgatcctc

SEQ ID NO: 6221 - DNA, 1045 bp, Homo sapiens
ggctttcttaagcatgaagcagcattggttgctgtatacaatgcaacaaccttttggaaaggtaatttggcagtatctcggaaagctgtttaagtgcacatctttagctcagcctcctgaattctggtaacctgtcctaaagaagtaaactatcaggatgcaaggctgtgtgcacaaggattttgcggcagtgaaccggagactcgctgtctcctttcagttctgtgttcttcccaccgcagggcatctgcacgggccgttccctctgctgccgggcatgtgtcttcacacggccggggccttcctgtcttcatacgtcggcataggccttccgtgactgtcatatctaaaatatgttccttccctatctttctcatctagctcagcctctcagcccctggtagcccacatcacaatgtatacagtgtatcataatcgtgttccctggtggactccctccctccctccctctccttctcttgttggaagatctgctccatgagggtccgggtctgtgcctgtctggttgacagggtcagtacttcgcagctgtttgttgaatgagtagtgatgcaatgaaatggcttttgccaccattaagcagacagggttggaattacgtgtattggctgggaggggtgtttgtattaagcagacggggttggaattacctgtattggctgggaggggtgtttgtgttgtcctgttaagggcaaaagcttgttgcacaaggaagcttaagaggtgggcttggatggggatgggaagggcataagcgttttctctatagacctttgacttgtgacaataagtacaagttacttttgtaataaaaaacatctggcaggccgggtgtggtggctcacacctgtaatcccagcactgtgggaggctggggcaggaggatcactgaggccaaggagtttgaggggagcctgggcagcatagtgagattcttgtctctacaaaaaaaaaaaaaaaaattagccagctgcggtagtgtgtgcctgtagttccccagatacttgggaggttgagatgggag

SEQ ID NO: 6222 - DNA, 1676 bp, Homo sapiens
ccatgcctggctaatttgtgtgtgtgtgtgtatttttagtagaaacagcgttttaccatgttaaccaggatggtcttgatctcctgacctcgtgatctgcccgccttggcctcccaaagtgctgggattataggcgggagccatgtgcctggcctattaaaaacattttttaacgaggccttaattttcttttaccatggtaaaatatacgtaacataaaatttaccattttgggcgtttaaaattgtataatttaatgtcattaagagcatccatattgtgcacccatcaccaccatccagccccagaacttttccttctttccaaactgaaactctgcacccattaaacactaactccccactccctctcctccaggccctggcacccacagttctacttcctgtctctgaatttgaccaaggtatctcatattattggaatcgtacaatatttcttcttttgtgtctggcttaaacatataacataatgtcctcaaggttcatccgtattgtagcatgtgtcagaattcatttcttttaaaaaatgttaacatttattttatttttctttagagatggggtcttgctctatcaccagagctagagcgagcacagtggcatggtcctagctcactgcaacctcaagttcctgggctcaagcaatcctcctgtttcagcctcccaagtagctgggaccacaggagtgtgcgccacacctggctaatctttaaaattattttttatcgaggtgagatcttgtgttgcccaggctggtatcaaactcctgacttcaagcagtcctcttgccttagcctcccaaagtgttgagataacaatcatgagccactatgcctgtcctgttttgtttttttttttttgaggctgtaattgttcttttgagcatatttgaaaggtatcgcacagactgggcgcggtggctcacgcctgtaatcccagcactttgggaggctgaggtgggtagatcacctgaggtcaggagtttgagaccagcctggctaacatggtaaaacccggtttctactaaaaatacaaaaaattagccagacgtggtagcgcgtgcctgtaaacccagctacttttgaggctgaggctggagaattgcttgaacctaggaggcagaagttacagtgagccaagatcgccccattgcactccagattgggcaacaagagcaaaactttatctcagaaaaaaaaaaaaaggtatcatacgtctttgggattgagtgagggggtcagcttgatggtgagagtggcaataaatagcatttgttatgtttaccaggtgctagcactttccttacattgtctcatgtaatccttaccatatccctatgaagtaggtattaacattatccttattttacacataagggaactaggctcagagaagttcggtaacttagccaaggtcacacagtaagtcacgggcaagctaggtttggatgccagttctgcctggctctacagccagtgctgtgtgtttctgaccccagctctggcccttccttcttcaataccaggcttagagttatttcttcaaatccttcttgtcacctctctggcctgagtgtggagctgattggtgccatggtatgggcccctcctcccagccccaggtccccttcctgggccccagcttcttctgaaagcc

SEQ ID NO: 6223 - DNA, 1032 bp, Homo sapiens
aatatcatggactgggtaatttataatgaacagaaatttatttgacttacaattctggaggctgggaggtctaagagcacagcactgacatctgcttggcatctggtgcaggccttcttgctgtgtcctcttatggcagaaggcagaagggcaggtgagcatgtgaaacagataaaactcactccccaaatcccaattttaaaaggcattgagggcggggcgtggtggctcacgcctgtaatcccagcactttgggaggccgaggcaggtggatcatgaggtcaggagttcgagaccagcctggccaacatggtgaaaccccatctctactaaaaatacaaaaattagccgggtgtggtggcgggtgcctgtagtcccagctactcgggaggctgaggcagaagaatcacttgaacctgggaggcggaggttgcagtgagctgagatcgcgccattgcactccagcctggagacagagcgagactccgtctcaaaagagaaaaaaaaaaggcattgaatccaccgtgaggacagagccctcatggcctaatcacacctcttaaaggcctcttaatactattataatggcaattaaattccaacatgagttttggaggggccattcaaaccatagcagtactgttagcctgttagtcacatggccccaggtcgctgcaagggaggtggggaatgcagtcttggctctgggcagctgtgtgctcagctggctgtccctgcttctgggggatgaaggcattgtgagatttttgattaaatctgggccatttccaggctgaaaagctggaccagagcttcagggcttgagtctctcacagagagatttcccaatggggacatcagtcctgccttgggaccagaaagccacatgctgtaggccaggaagggggaagcaggggctgagcccgagggagaaaggctttagaggtgttagcagacagctcagtggcagtggttagaattagggaggcagcgacctcttcttagtgtggtcagagcatgccaagaaagtgt

SEQ ID NO: 6224 - DNA, 1034 bp, Homo sapiens
tgtcatctcagtgtgtggcagccatgaggcctccttcctgccaggacttggcgcttgcttcaaaggctccccagggattgcaggctgaaggctggaagtcagggctgccccccgcagtggcagccccgcctgcagagcaaaggactgcatttccacacgtcctctaatttctgtttttaacttttaaactattttttttctagtttagaaaaatataaaaacacttgagaaacacataatttagcaggtgaagggttcctgtgatcccagcccccagacagctttattttaacatttagattggactcttcctagttttaaagagaaagaggctgaggggcagaggtcatgaaggatgggtctgtgggacccccaagagatgaaggagtcggggccaggagcctctgcctccatgaagcctgtcacctgggaggttcatgtctttgactttgctcagccgtcacctcttctgtaaactggggatcctaattctcggctctcttgagggctgtagcaaagacacaaaaatcctaccagactgtacaagtggaattattgtcaggggaacacgcgctgcagtgggcagagtgcgcctgggcagagggccagggttaaggacacggggccggaggagcatggggtgctttgaggtgggtggggtgagggttctctgggtgaagagttgtgacctttgcccaacttggaaacttatacaaataactaaacttaaaaagaaaatgttcctagggtaatcatgttcattgtaagatgtttagaagcgatggatgagcaaaacagaagaaaataaatatcaccctgcagctcactactcaggaataagtaccattgctgttgaagtagatggcccccagtctttggtgcctacttgttgagaaccagccttggcccatcatcagtaaccagacagggtggggaggtaaagtgatggagagactctgccctgccctcttggatcagattcaaaagggaaggagataggtcagtcaggtgctagtggcccaaagctggtgggg

SEQ ID NO: 6225 - DNA, 1810 bp, Homo sapiens
cgggtcatatgagaagggtatgtctccattagtaagaaattacaaaactgtcttccaggtggctgtatgctttcactgctcgccagcagtgtatgtgagttccagttactcatatcttcctcagagctcggtatcgtcagtcttttaaatttgtcattctagtgcaggaccctgatgacatgatcccgaacatctatttaatgtgcttatttggcatctgtatgtatcttcaaatcttttgcccatctttacattttaaaaaaattgacttgatattgacttgttaagagttggcacctcttttttgggtcaggattaaatgagataatatacgtcaaacgccttgcagtcagagattgacccattggccctcctggtgtacccctctctgcgctcagggtctctggctctctcaggtggctgttcaaaccccacctcaccccagtgagtccccgacccctgccccctggcagacacatgagtcacacactctcgaccaacacagtgactgactagcataattccatactgacacatctctgtgtgttcacaacacagtcttcctgtttgcctcaggccagaggcagtgcagcccagccagggagccttgggtctggagaaaggagccctgagtcccaattctgtccttgtggccacttgctgtgtgaatgggggcatatcactctcctgttctgtgcctcagttgcctcatctgtggaaagagagcattttactatgttttattttttgtaaatgagacagagtctcgctatgttgcccaggctggtcttgaactcttgggctcaagcagtctgcccacctcagcctcccaaagtagtgggattacaggtgtgagctactgtgcctggcctctaatatttcagtccattcaggctgctacgacaaaacgccatgaactgggtatcttaaaaacaacggaaatttatgtttcatggttctagaggctgagaagtccaggactaaggcattgattcattatctgatacaggcccactttttcattgatcttgccttcttgccgtatcctcagatggtgtgaccaggcagctctctggggtccctattataagggcactgatcccattcctgagggttctgccctcatgaattaattaccccctctcccccaaagcctccacctcctaataccatgaccttggggattaggatttctttctttctttttttttttttttttgtgagacgaagtctggctctgtcgcccaggctagagtgcagtggcgcgatctcaactcaccgcaacttctgcctcccagattcgagtgattctcctgccttaccctcccgagtagctgggattacaggtgtgtgctaccacgccgggctaatttttgtatttttagtagagacggggtttcgccatgttggccaggctggtctcgaactcctgacttcaggtgatctgcccgcctcagcctcccgaagtgctgggattataggtgtgagccactgtgcccagcctgggattaggattttaacatatgagtttttaggggcaaaacattcagaccacaacagctagatgaacttcagggatgtggccagctctgaatctgctttttgggggatacagggcagggggtcttgagtggttaggcctcagcagcgatagggtcttgcagcaacagccatttgtggagattgctgtggtctcagcatctctaaggtgggacttgggattgtgccagagggtctgggattccggccggcggggagggcaggaaaaagggacggggtgggcgtagtggctggggtcagtggcagacag

SEQ ID NO: 6226 - DNA, 1115 bp, Homo sapiens
ctcacctggcaggtaccaccgcctgcccctgcccgagcaagggagtcccctggaggcccagttggacgcctttgtcagtgttctccgggtaactggggcacgggcgcgcatgggggaggagtcttgagagtcgtccccatggaggtgctcagggtgggcacagcctctcgccttcctcagaggaaggcttcattctgtgttgtgtatgtgagcatgttagggtggacgtgtgttggtgtctgtctctgtatatgtctgtgtgtgtcagcgcctttgtgtgtgtctgtggggagtgtgtgtacatgtttatgtgtctctctgtgtgtctgtgtgttcctgtctgtgtgtctctgtgtggggatacatgtgtttctgtgtgtgtatgtgtctgtgtgtgtatgtgtttgtgtgtgtgtacctgtatgtaggtgtgtgtttgtgcattctcttatggcagagtccatcactgaccgctggcccagctgctggccgtggctgggctgccaacttgctgtgtggtcccggactaatcacctcacctctctagacctcagttcctcctttctttagtggagctaacgactcttgccctatagactgttcagctgacatttcctgagtcctggcggagtttctctccagcccccttcagggcattatcttatttcactggcatcttgcagaaggtgttaatactggcctggtgccctctgagtcgctctcacttccagttctttgagctcctccaaggcctggggagggagcaggtggagctgatcaggctgtggctttggcagaagaggccaagacacctattggagcccactttgctgcagactgtggggcagggtgggctgatgtcatgcttttctccctgctcaggcctcagcccagggtttcctggtctcactggggcctgatcctcatggtctttcccaggagacccccagcctgctgcagctccgtgatgcccacgggcctcccccagccctcgtcttcagctgccagatgggcgtgggcaggaccaacctgggcatggtcctgggcaccctcatcctgcttcaccgcagtgggaccacctcccagccagagtgagtggcccggggcccagcgtc

SEQ ID NO: 6227 - DNA, 1029 bp, Homo sapiens
tagctgagtccctgctttcagttcttttgggcatatactcaggagtggaattgctggatcctatcgtaattctgtttacttttttgaggaaccaccatgctgtttgccgcagtatatgcaccattttacattcccaccagcaacacacaaaggttctgatatttccacatcctcaccaacacttgatttcttttttctgttttttttagagatgggagttcaccgtgttggccaggctggtctcgaactcctgacctcagatgatccacccgcctcggcctcccaaagtgctgggagccactgtgcccagccgttttttttttttttttttggataatagccatcctgctgggtatgaagtggtatattgtggctttgatttgcatttctctaatgattagtgatgttcaatatctttttatgtgtttattggccacttgtatatcttctttggagaaatgtctgttcaagtcctttgtccatttttgaattggattgttgttgagttttggttctttatatattctggaaactaatcacttataagagaggtgatatgtaaatatgttctctattctgtgggctgactttttactcattgatagtgtcatttgatgcacaaaagtttttaattttgatgtagtttgtctgttttttcttttgttgcctgtgcccttggtgctatatccaagaaatcattgccaactccaatgtcatgaagcttctcccttgtgttttatcctaagacttttatagtttttaactcttaggtttaggtctttgatccattttgagttagttttttttatatggtgtgaggtgagggttatctaagtttattcttttgcatgtggatatctggtttttccagcaccgttagttcaagagtctgtctttccccattgaagggtcttggcacccttgttgaaagccagttgaccatatgtataagggttttattttccagctgagtttagtctttgcatcggtgccttgaatgtgatggtcaggcctctccttcttcacacc

SEQ ID NO: 6228 - DNA, 1089 bp, Homo sapiens
ttgtggttgttaccagaggtccttgtttctgctgcaagatccacctctgaaaccctgactccaggaccctgcctggcacaagtaggggctccacaaatgtctttctagtgagtggatggagggaaggttgagtaaatcattgcataaataaataggaaaacctgactctacctttattattaactattagtcttccaggacagagcgttcttctgcagcaagcaaaagagccctgggtcaggggttggaagccctggctgcagccctggctctgccagtaactccctgtggaaccttgggcaagtcactttggcctgctggacccctgtttttccatctgtcacctggagttgttacccttgctctgtgtgctttgagggatggtggtgaggaccagtctggggcccatggcaggtgggatggggtgtggggtgtgcagggtggctgggctgccaggcaggctctatgggctacatgcggacacagtgggcctcttgaggaacgagactgtgtcctctcagcattgaatctctgtgcctggcctagaggtgctgctgaacagcgtctgttgaactcacagcatgcagagtggcccacggcaccaggtcaagtcccttcacactttgaaattacttaacaaaatatgatgtcacctttggaaaatgggttactggtagggattgagggcaattttgtccttccaggggttaggtacagaaaagcgtcctgtactggggccccaccgctgggctggcctgaggatgcagtttgcagggactcggtggggacccaccacacgcagcggctggtgctgcacgtgggaagagggtgggctgccagccctggaacctgcccttcagccactggccatctttggggactgtcacttgcctccccacctcagctggaggcagaggtcaccaggccaggtttctttctgttgagtgggtgagcgaggggatactaaggagtcttcagtaatggcagggggtggcagggtggggagtgttgctgtctggcttggcttgatgaagaccctgaacctggccttgttggctcttccttttttttttttttttttttagagac

SEQ ID NO: 6229 - DNA, 1064 bp, Homo sapiens
aaggccgactcctggcagaggcccttcagcacctggatgcaggaggtgaggggaggctgaggccgagaggggccggggcgatggctcctgcagatggagctgggtcacagccactcagtgcctgtacatggcctgcggggaccccgtgacaggcgggaagagcccccatccccctttctgcaggaggcttctgtttggccaagagtttgtctaatctgactttgggtcccgagcagtttgtctgtgcctggcaggcagttgatgagtttgatgaatgaacaaatgaatgaggaggagggaggggacagagtggtgagggacagagcagggcagcctctgggggtgggaccctgtcaccacagccacccttgcgtgcatgacagctctgggcccacctgggcacttcatgcccacaattgtggtcagccctcacctgtgctccgcgagggcctagggtgaggctgtagtggccctgcccctttctccctccagccgtgaccttggaccagtgagccaactcctccacagctgctggccttagcactaacatggaggtgatgtggatcctgtgggtgccagccctgaaggctgcgttggggacttggggagacatacagtgccatctgctggagcctgtactaggcaggtctagcacactgtgattgtcgctctcccattttacagaggcagagactgagcacagagagggtgggtgacttgttcaaggttggcattagggctgattgattggctccagagcccactgtatcctgacctaagacacctcccttgctgtccggcctcctggatcctctctgtttggcctcctggctcttcttgcactcagttgttttagaggcagagctgccaccttggcacctctaggtcagaagagaggcctccttccctccttggcaaagcggcctgtaattactcctctgccaggaagctggcccctccagacctcaccagcagatcctggcagttctaatctggactggaggctggaattagctcctgggaagtgggtgggtggagagcaggggccggtgacctggccagag

SEQ ID NO: 6230 - DNA, 1030 bp, Homo sapiens
gcatccccagttttgcctcaccctcttacactggatgtcaggctgagctcctccttgaagaaagcaacggaaccagcgaattctcactaacatatgaaggattgctgcatctagggaaacagtatagagcaaagtggaattgggggcctgtgaaggagcctggatctcagcctccactttctcccctaacccctgtgggccccacctgacccctttgggcctctggttgattgaacacacctcacccctggttgagtgctggcatttaaagagtcagtggggagggtggggtagagacagcactgactccaggcctcttcccccatgcttgcagggttaggggaacaaggttgtagttccgaggtcagctggggtgggcagaatggaacccagagcccccaccgcccctagggttggtgttctccccagactaggagagaaggccccgggggttctttcccagcccagcagggtatggaagttgtcttctctaggtgcaagaatgctctgtgtggcttctggacaccagtgtagagctgtgtacaccggggtggggtggaggggggtgggggtgggggtggctctgccattctctccctgggatgtggggacacacaggagtgagtgggtgtgcctgtgtgtgttcccaagttcccctgggcctgctgtagcctgtgggaggacgcttagcaatgacatgaatggcactgacccacatttcagtagctcctgctggtcagcagcatctcagccctcatggtaaatgagtgaacccagcacagcaaaggagcaatcagcagagttagggagcctaccgaataggagacggcatttgcaaaccatccatctgataaggggttagtatcccaaatccataggaaacccaaacaatacaatagtaaaaagcaagtaactcaaaagaacacacacaaatgacccacaggcatatgaaagaaatgtccggtatcactaatcaccagggaaaggcaatggaaaccacctcacacctgttaggatggctgcaggaaga

SEQ ID NO: 6231 - DNA, 1060 bp, Homo sapiens
ctttttgtttgaatttggccatattcttgaactcacttaataactaagttttctgattgattagtgctcatgtaggaaaaaataaatatttccttttgtttgaatttggccatattcttgaacccacttaataactaagtttttaaaaacttgtcttggattttggagatagatgatggtattatctgcaaataataactatttaatttctttctaatatgtataattagtatttctttttcttgtcttttgttataaaggctagaccttcctgaacaatatttggaatagtgaccatttttatactttctaagtctaatgggaatatttcaccactaactgtaatttttgatctaggtttcaagtaggcgcatttgtcaaattaaagaaattttcttttattactggtttgcagattttaaaaaattataaattgatttttaattttaaaaatgttttcttgacatctattgaggtggtcatatattttctcctttaatatgttaattttaaaaagtacattagcagattttccaatgttgactgatcctttgcattctttttttttttttttgagatggagtctcactttgtcacccaggctggagtacagtggtgtgatcttgactcactgcaacctctgcctcctgggttaaagctattctcctgcctcagcctctctagtagctgggactacaggtgtctgccaccacgcctggttaatttttgtatttttagtagaaacagggtttcaccatgttagccagactggtctcaaactcctgacctcaggtgatctgcccgccttagcctccccaagtgctgggattattggcatgagccattgcgcccggcctacattcttaaatgtttattactacgtcatggtgttgtcttcttttatcatattgctgaaactaaatttctaatattttatttaggatatttgtgactatgtttatgagtgttttttttccaccatgttatgctttttaattttgttgtcagggttatgatagttttatacatgtgttaggtagttttgtctttttcaacattt

SEQ ID NO: 6232 - DNA, 1042 bp, Homo sapiens
tattctgacgttgttttttctctttttttttttttttgagacaagtcttgctctgtcgcccaggctagagtgcagtggctcgatctcggctcactgcaacctccgcctcctgggttcaagtgattctcctgcctcagcctcccaagtagctgggattacactcttaagcctgtgagagggcaaggaagggagtagtttctggaactttgagagagttgagatgaaggagaaggtaacctgtaggaatgccagccagtgacccagtaggaaaggcatcaaggggaataaatacttcaaactcttttgctaccctctgatctcctgctgtagcctcccattggtctaatacaactggaaaccagaggttaaggagtctggttgatttaattcagagggtggaatccggaggcacatagccgagctggaaaatgctggatggaggatctggaggaggagatcatctggaggggagaacatccagcatgctggagttgagaggtctagtttgtcttaaaaggcacaaatgaggagataattcttgaacagaatcttgaaggtggatagcatatggattatagaaagggaatgttcccactgattttaacaggatagattcagaggcacacagttgccacagctttggcaagcccaaagctgctttgttccagtagtagccttagaatcttaattgcctggagggcctttaaaagtactgcagtccagctttcttgctgcctaggaatccctctacaatgccctgtcaggagtgagtgctacatactttctcagggggttctttccactgttggacagctttaatttttagaaaatttttcatgtgtccagatcactgaatgcatcagctagaattaggtttgagtgtatataacagaaaaacctaaagtaatagagattttttaaaagacataaatatatttctttaagagaaaactggcctggcgcggtggctcacgcctgtaatcccaacactttgggaggccgaaatgggcggatcacttgaagccagaagtcaagatcagcc

SEQ ID NO: 6233 - DNA, 1026 bp, Homo sapiens
tcttttgaattcgttttgacagatgggtctaaaaaggaatagatcaattctgtattgaattccagtcttaatggcaccgagtctttgagacaattgaggcaaattggaaattctgttttcacattcttctgaaaggggatgcctttcagaagtgtcctgaagggcgctggggagggcaaatatgaggatgccagggtaagtctgctccctgtctggctgtgttgggccagagtggaagaaagcctaagactctgttacccagccctttctgaaaatgttttcaaatgctttcccaacaatcacgaccacaagagtcaacagtctgtttggatgactgaaaacacacaggtttacgatctgtaaagatagtaggtaagtgatttaatcttgttgtataggtaggccagagggcactcgcagccttctgattgatttaatagattgttgaagattaagagttgacttaacatctctcttagaaaactgagaaatagctcattactaaggtgtgttttattaccaccgtctgtaagaaaatacaacataggcatgggaatcaaactacttaaagcctcttccagctcctttgtgactgggaaggttacttttccttgttgcttattgaagagaaaaggaaaatgtttatcattggataattcaggttcactgaatatttaatgagtgtttattatctgcagtcattttcttattaccttatctcatttaatattcacaacaaccctgtgagtggacgatggtatcttttttttttctcctgaacgttttgttgaattatcccaatggcttctatttttgcagatgagcagagtccagttgcatagaggtttagtgttgtgccacacatcacacagcttctaagtgagagctaaaattagagccgaaggttttgattaccagtccagactttctaggacaccacagctgcctttctgtagaacagattaacatgactctcagagtccgcaagagtagtggtgaggtgtcagttcaggggaatactcaaag

SEQ ID NO: 6234 - DNA, 1027 bp, Homo sapiens
catggtttatacctcattgtggtttgtttgctggtttcatctctgatgatagtgtgctgaaatttcacacttttcattttgctttcttctgccaactctgctcataatagttctcaaaattcctaggactggataggaaaggagagaagaaggaagctattgcagaaaaaggccactccaaagccatatagagaacaaaaaataagtatagacaaaggcaaatgttcctgctgttagaaggcagttgaggatgaggacaacattattatcagattgcctttattgtagctaaatgctattaatatctttttcacattgctgataataatgatttttcatctttattttattgtgctaactctattgaacttttttcttgatttgctataagaatgctgttgggtttccactcaacatttttttcttttgtatccagaggagtttcttcctgtttcttctttatcagaacctgtcttcccagagattcttgcttactgaccagtgaccttacctttctctgcagacgccttctggcaagaggggagagcctctggaacagtgtacagtggggaggagaagctcactgagctccttgtgaaggtgagtgtccagttcttgagggaagcctgtgaggtctgtgccagtttacatgacctcctttttttcccttacttttgtaattagaaaaattacttaaggaaagcttattggtacaataaaaccataaaagtttctcttcacccaaacataggcgaatatgtataatattatcaaagacatcttcagtctgtaaaatagtaaaatgttatttatgttttcagtctttgcagatgtcctgtctagaaggcagattactagggaaggtagtcctgtcagatgagatttttgtggtgagacagattttgtttgataagaagagataagatagggaaactctttcataattttctcaaatcatgtgacccaagatgagcagtggtctcatgtatacttcaaataattctcattcttagcttcttccatttct

SEQ ID NO: 6235 - DNA, 1060 bp, Homo sapiens
ggggtttcaccatgttgcccaggctggtgttgaactcccaagctgaagtgatctgcctgccttggcttctcaaagtgctgggattacaggcgtaagccaccacgcttggccgtcttttttttttttttttttttttaatctgcttggttgttttttatagtccttttccttggcttaacttttgtttacttaaatatattacacataaatatgttgtattctgtgtctgataattccaatatccatgagccttacctgattctgctggcttcagtcatggttccttgtttccttatatttgtgattttattttatttatttatttttttatgagccactcatttttctgggaacctagggattctttgaggcctagattgaagttaagtctggaagttctcttcttccagagaagatttgtcatacctttttgagttgctggggattgccaccacactggaaccaaattaagtcaaatccttagcttgtcattttgtaccacagaggtagtgtgaattctgaccacaaactcacataaaggcttccttgttacacattcttgaaagattgctatttttctttacttgaacatcagggttgagaaaaacagtttttcttttctcttttgcagtagtgggatttatttcttgtacactgtagagtgtggtctttttccagccatctcctgttggactccttatcttgggcagtctctaatgtatcttctggtccatcctttgctcatctgtcagtgtaggagtttgaagtctgaagggtctggtgccacctcagggtgaaagctagttttgccactcacttatcttgcaggattcttgattttgctttgtttgggggtttagcaagtttctttatgttaggttagtgataggtttaaattttttttttttgatgttttatcaagttttttagttatttcagttaggaaggttgctcaaggtatataatattgctagaaatagaagttccataattgttttttccatgttacagaccttcgtctatttgaaagcccctttctccctgaatcttctctgcccca

SEQ ID NO: 6236 - DNA, 1025 bp, Homo sapiens
aaatagccttgtgtttatagcccatctttccacccatgtcttgcagtttttattatagggctataaaggaaattctcttatgttctttgttttttggaacaagctggctgtcaaatacaaaataccccttcatgtcgacgcttgtctgggaggcttcctcatcgtctttatggagaaagcaggatacccactggagcacccatttgatttccgggtgaaaggtgtaaccagcatttcagctgacacccataaggtgagctaaggaggagatcaagtgttaccagttgattattttgactattattgataaaataaattggtagcttccccgcaaagtataaaattaactatagaattctcatcagatgcttgttttaaactctctctttgccgtcaccagatcagctggttcaggtgatggggtatagtggtagaggtgacaagcagtagtgaaaatgaacctgttacctttatctcaaattggctaagagaatttctgtatccactgactgtgtgtaactagaacatgctagtgtagtggcccttgttaaaaaagctccctgaagccttgagctgatttgaggtggagggtagaggagtgtgagggttggtagtggagttcccatgctggtagataacattagagctgctgtgcaactgggctcctgagcgtacatgacgggaaaatgttgacggaagagtcctttggaaaatgggaagaacctgtgtgctcaggaacattcagcatttgagatggccacgcctgccacccttggtggactgagacaaagtctagatcagttgataacgctattgaatatacatccagatgtggaagaagtattagcagcctcaggaatgtgtaccttgttttgattgcattttcagagcttgttttaaactcaagtatattaaagacttgtttttcaaaatcggtgtgatctgcagccgattttcagtcagcatctgttttttccttaccatccagatagctcctgtgtccttttcccataaccatccatttc

SEQ ID NO: 6237 - DNA, 1051 bp, Homo sapiens
tcacaattccagtaaaccccactaaattcctccagggcgaggtagaatttcttctgtgccctgaagtcctttaagaccccagccatgtggccctgtccccatgagagcacatgggggctgattatctaagataaaagtgtctcattgatggtgacgtggttgaaggaatggtggtggaatttgtgaggggatgggtgggacaaagcagccaacactgttcatcctcttagcatggttctcagtcatgccgagaagctctgaggccagcccatgcctgacaccccaagcatgagagagccgagattcccaggactaggaacaacttggatgactacacttgtcagaaatattgtgaaagggcaaccaggaaattcccgtatttggggctgcatcattttagaacattttttctttcttcaaggttcatctctctctgtctcttctttcctagtattcatttctgcatcacattactacacgcccggaaacgagtagctatacaattcctaaaggacattcgagaatctgtcactcaaatcatgaagaatcctaaagcgaagaccacaggaatggtagggacacttggagttttttttcttctcttggaaatttaggtgttggtggagagtttgaaggaatcatatgacccggagtctgttcctgcctctgcccctttgccacagacatcttttatttgttgactggagctgatgatctctgcatcacccaccccttagggttgctgaagtctcaaatgagatacactataaagtaccttgtaagttagagacttctgtataaaagcagctggtggtagtgtccatttgaaaagaaaattttgtcacaggaaagatagtaaacatgttttttctggaattttcttaggctagtccctttatgcagaaaggcagactggaaagtccctgtgaaaaattgactatgccagctgtttttctgatagaatgatgggatgccttaggtggaaatggggtagggcagtgcacatgcgaagctaggactcggggagaaggggctcattgctgcagtttta

SEQ ID NO: 6238 - DNA, 1059 bp, Homo sapiens
tccattacataatgattttgcccttgttataaatgttaccctaggaattgttttaaccatttccttttctaaactctctagctttcaactttacttaaacattgtgtggtagctctgacctgtcctgattctttagagaagctggggtacagtttatgagatagctagagcttctttgttatctcaggcaggaggcgtttacataacagatgtttcctcagctgggtgtgaggtatactctaagcaggaggctttttcagccttctctctcttttttttttttttttttttttttgagatggaattttgctcttttgcccagtctggagtgcagtggcatgatctcagctcactgcaacctccacccactgggttcaagcgattcttctgcctcagcctcccgagtagctgggattaccggcacccaccaccacgcctggctaatttttcaattttctttttcagtagagacgggttcaccgtgttggccaggctggtcttgaactcctgacctcaggtgatacccgcccccccgcctcagcctcccaaagtgctgggattacaggcgtgagccaccgtgcctggccctgtctctcttaagagtaggttcattgtctgtcttagagtcacttctattgcaactcattttctttttccagggcacagatcgaccaagctgccgttccctattctgcaggacaggactattctagcatacctgcttcgtccacccaggcagggtttggggtggtctcttctgtgcctgcagtccccatttgacacttggttgccaccatctttggagattattgtttggaatgatgcttccattggctttttcttgttaccatggactaggaagaaaacatggtttccaaataatctgggagcttttggccatggtgccgccttcctgaattggcagtggtcagagcacacctgaaccctatcctgggctggtgatgagcagaaatcagacctttttctatgcttttttgaatatcagagtaggatgaacacccagattcaaatatgtcaccaaagttggtggtggtcctt

SEQ ID NO: 6239 - DNA, 1035 bp, Homo sapiens
agcactgtactactgacccaacaactgtgactagctggccacgccattcagggctggtgtggcatttatgtgtgtgtgtgtgtgtgtgtgtgtttttcctgtttgcccagcagtgcattgtgggttccaagagtgggtagtgtgtgtatgtgtgtgtgtcagagggagacctggcaggcacctctttgagagtagctgtggtcagagctgtttggtcagtgcattatgttgaatgaggtccaggaacccagagccacccagcagacaccactgtggcttgccagctgccaagatggagaagcatgtgcccctgtagagcgtctccccagaaccagaccccgagccactcgcttcctctgtgctgtgacaacattggtgccaggggagatggtgtttttcaaagggacctactgtagccactttaatttacaattaagagccttagtttgacttaacacttttgtaggcttttcattgtgtatttttgtgtatgtgtgcatatagcagctactctgtagcagaggtgggtagagacacttaatagtatcatgtcgcatgcagatgtcacatcggcctctgcaaaaactgtactgtcttgtttctgcattagacttaagtagtcatgtgaatatactgctatgtcacttttaatattacgagttttatacttggaaaatggtacttgcttcttttaaatctctgtcttctctaacctcccccttcccatttcaatgctcccttcctaatttcagcaataatctcaaaaagcaattaaatagttaaatgaccctaattgtaattactgtggatggttgcattcatttgattacttgggcacacacgagatgacaaatggggcagtggccatgcttgaatgggctcctggtgagagattgccccctggtggtgaaacaatcgtgtgtgcccactgataccaagaccaatgaaagagacacagttaagcagcaatccatctcatttccaggcacttcaataggtcgctgattggtccttgcaccagcagtggtagtcgta

SEQ ID NO: 6240 - DNA, 1035 bp, Homo sapiens
ctcccagttcagtcaccccttcccccggaagaattcaaagaggaagggcagggtctatgtcatggacactgctacttgttcgatgaagctggccaggtttatgtcccgttctgaaaggccggcacactcatgggtgctcagcgtgatgtggacctgaaatgaaaccagaaattctgcttccactgacttcacttaagaacaggagggagtcactagctgctgggctcagccctgctaggagctccagaatagcagctggccagtacgatctctcctggggactccttcctgacatgtctgtaacaacatcttctacatctcccctttgctgtctctcaaaaataatcatgacttcagctatagaataaaagcttaatatctgaatgtcaagagcaacctaaaagctaaagacaaaaccaaaaaccaatgccaactcctaaacactatccattcatagacgacctcttccacccttactgtttttataaacagagaccagcagagcttttggcacatggtagacatttaatgactgtttctattcattaagcaaataatttgataggttggctatgtgtctgtatttttttttttttttttttttgagacggagtcttgctctgtctcccaggctggagtgcagtggctcaatctctgctcactgcaagctccgcctcccgggttcccaccattctcctgcctcagcctccccagtagctgggactacaggcgtccaccaccgcgcccgcctaatttttttgtgtttttagtagagacagggtttcaccatgttagccaggagggtcttgatctcctgacctcgtgatctgcccacctcggcctcccaaatatgtgtgtattcttagttcaagtttattactttttcattcttccatacctccagcaagattaaagccatttagagctatgaacactgaataagtatgcctgattcccacagcctttcctttcttgggttttgccttcttaatgtctacttaaatgtctactttaaccacaactatctcatgcatc

SEQ ID NO: 6241 - DNA, 1046 bp, Homo sapiens
tccataaaaatccctttaggattctgattgtgaatgcattgaatttatagatttaatttgggaagaattgacatcttcatattatcgggtctttccatcttggagtgtgatatatcaccccatttattcaggccttctctatgcccttcagtaaagttttactgtgttcctcatgcaggacttggacatgtcttgttcagtttattcttaggtgttttatagtcagcgttggctgctatgcacgggatgattgcttcattacatttctaattggcctttgcaggtatataggagaagtgtggattttgatgtggtatcttgtctccagtcatgctgataaactctctatttagttctaatatttgtcaatggattagaaaaactttgaaccagtcatgctgtcgcacacaggatgggcctccagggaaggggcaaggagctccgcagtcctgatggccgctattgaatccacggatcctgttagggctgctgtagagactgccgtgcatatggttcagagctttggacaagacagcctttagatcctttcccattctaagcttctaacattcacaattccggtgcctgtctgcttcatgcactatctcccagttgcataacgaccaaagccaagttcccttccttccctccctccttcctttccttcctcaactatactttggtttctacctgccaagctgtgtcaggttctgggaaggtggggagggagagatcacgatgattgctgcagagataagtgctccacacccttgggatgcaaatgatgttacttaaatcgcctcagactagaatgtggtagaacccccgtgccccgccatgggctggatatacaatctacacttggggggctaccccgcctcctaccccacctccctaagtggttcatgaaccctagggtttgcccgatcccaaaggagggcttccactctcaaggaacccagagccacgccgcctctccccactgctgtccttgcctttgccgcgcagggtgccgccatcaggtcctgttgtgcttctgctcaggg

SEQ ID NO: 6242 - DNA, 1091 bp, Homo sapiens
ggcttgtgggtgtgagagtatgtattaaggagtgtgtggggggtgagaatgtgtattaagcaggtgggcggaggtgggagtttgcagggaggggagggtgggtgtggtgttgcactggggtgtcaggtgtgtgtgggggcgaggcatggactgggtgtgtgccggaggatggatgtgtgtttgaggagggttgtgccttttgtaactcaggaggtgtgatgtataggctgtgtctgtgtttgggtgtgtgtggggtgggcaatgtcacatgggcacacttgtggtgtgtttgtgtataaataggtatgtgtaatgtggagacagtgagtcaccaccaggcatgggaagctccatccattgtattccgttggggattccacttcaggatgggacccaggccatttgcccatcagcacttaagagacctcattttgccccacacctgcactgtgagcagggtttggcctgagtgccaggttctgctgttggaagggcagaggacagcttcccctgctgagtgcagatgggataggcctgcctgcaggtgggtcctggtgctccagggggaggaaggttggcagagatggaccctaagccagcccagcagcttgggctactgcccccaggaagatcagagtcccagacctggagtcttctgcagtcaactcccagcttccccagagcatgggagcggctgtggtttggagatctgctctctgacctgggtcagcttatgcttcagcctgtctcccccaaagggagtgagttctcctctagagtttgctggagaaggggccagcagagcttgagtgggtgggatccccagtggagaaccccatctcaggctgacgtggctggggcctgggactctcagcggtagcaatttaaagaggacagacacacccacacacatgctggactccactgtcgttacaactttcttggtcacagaagcgcttacctgctttcccagggctgtccacaggaaggacttccatcacttcaactctaggataagatggactgttctggagcagggaggcctataggaaaatcacagtccctcgccccaccctggtgtgcatgttgct

SEQ ID NO: 6243 - DNA, 1062 bp, Homo sapiens
tgctccataagcatttcctgcttcagaaactgagaaccccagatgccaagcagggcccaggaggtagagaagggccccactggcagaggcagcctgggcatgtgcgagaaggggcctgtggtccccccccttgtcacccactccgaagctcaagtgcgccctgctgagggtgttagagacagactttgcaggcctggcccccgtgtcatgcatagcttcatttctcagaggcagggggaggccaatcttgggggttggggaatgaggactcctgtctccatgtagggtatcagaacaccagcccaccctaaaacctgatgcacatgcccattcattcagcctgagcaagtgctgagctccgcagtcagaagcttaaaaaccatgggcctgactcttgaagaactgatgggctttgtgctgcttcttgaagcatgggccaagtgcctggcctgtgatgctggggtgcaagggggattaggatgatgcaacagatatgaatcattcaagcatgagccaagatgtgtgtgtcttgggaggggtcttgcgcgatgtttagagggcaggctgtgcagtcacattacttgggttcaaatcctggcagtgccaccatctggctgtgtgtcttagagcaagttgcttaccctctctgagcttagttctgagcttagttccttcatttgtaaaatgggagtagtaacagcaccaatctcattagatttggggataaatgagatcatgcttaaaagtgtgttgcatattctgaagtgctcagtgacattcactactgtcatcatcatcatcatcatcatcatcatcatatgggcaccatgtattgcgtggaacgaagggaaatgtctggatgttgagaggaagaagctcttgtggtctgggcagtcagaaaaggcttcctggaagagggaaggtttgcacttgactggcccttgaaagatgagagactttgggtaaatggagagtgtggccctggtaggggatgtgtacgtgaaggtatgggtgtgaatgtctggcacatctacccaggagacaaattctacattcagcttc

SEQ ID NO: 6244 - DNA, 1052 bp, Homo sapiens
atctaaaggccatggccagatctgactccaggcctcagccctctatagcaactgctaccagcttcttagcaggagctgggcttggtgcaggagagcagttctggccatggggtctggctgatatagactctgggtggcatcatgtccagtactgacatctttgggagattaaacatccccaggcagcaacaagcctggcccagtgaccatcctcagctggtggctcactggtccttgtcaggagtccctgccagaggctgatctggaattcctccctggcagcccaggaaagccggggctgctgggcacagtgacccctgctgcaaatttgatccagccccacattttcctcctggtccatcccacttctgtatgtagacacagacacagacacacacacacagacacacacacacacaccaggaaagccggggctgctgggcacagtgacccctgctgcaaatttgatccagccccacattttcctcctggtccatcccacttctgtatgtagacacacacacacacacacacacacacacacacacacacacacacacacacacgaaatgacagcagaaaaagccccaagttgaggattgggaaaactggattcttttttttctttttttggaaataaaaaactggattctaatcctagccatgtagctaatctgctttgtgacattgggccagtccttttccctctctgagcttcctctgtccaaatgaagaggttctgccctggaatcagaaaacctggattcaagtcctggccccatcactaactgcaatttcatgagcctccatctcctcactataaactgggcccccaattggttgtggggacattaaaggaaatgggcatggtcagtgaaggtcggttttctttcctttccacccagaaggaaatccacaaattgctggatcctgccttctagtgggattttggattgctggatcccaaatccacagagcccgccttctttctttctgatattgccttcttgacatgggcatattagacataaggtacagtagggttatcctac

SEQ ID NO: 6245 - DNA, 1034 bp, Homo sapiens
tggctaatccctagaggctttagacgagggagttaaggcttctgcctgctcagacttagaaatggaggcctggtaacaccctgttcatttccctgcccttgagctgtcctgggatggtggaagagagggtgggttcagatttgagtggcgtgtctcccagccaccctaagccaacctctgcccccacagtgccagtgacccagggaagactgacttatcatctccctcaatgtgccagaaaacctctcagctagtagataccttagtgtccagggcttacttgcgttgggatggcattgggggtagtggggcaggttttagcagcggccttgggaaggggaaacattttctataaaggaacattaacagaggtgacgccccacccccaggagaacctcgttatgaagagggggtgcctgaggtggcaggaggccccaggcacagggagggaatgggcctgagggtggccatcgagttcgggtgggtgggatgagggtcgcccgtcctgactgagcagttaggggctcctcatgcatgtcactggctgatcacttaacctcttgggccctgtttccccatcactaatagttccagcctcatgggaggctgtgcatgttagtcaaaaggtccatgccaggccctgcccagcgctgaggttagcttctggtgcttagctgcagtggcccagtctggagagcccactccacccccagtcctctgttcagcagtgcaagagcagggcatccacgggggcgggcagtgggcacacacccctgctggatgggtgggagccccagagattataagcagagcatatggtggctggtgccagagggcccctgggtgaccctgaagcccagattcctccggtcatcttcacagggttccctcctgtgatctgcatgtgagcacacacacatctggatttggcagaccctgtatatatactaaacccctgggcctgccctcgggaggctgcccattctgtgaggggactggccttgggctcatggagaaataaacaggtgcccagt

SEQ ID NO: 6246 - DNA, 1058 bp, Homo sapiens
aaacaagagaccagcagaggcgctgaggctagaacaagcaaggcatgtcccaggaaaacacgcctggtggggcttggagcacagtgaaagataggtgagttggccgggtgcagtggctcacgcctgtaatcccagcactttgggaagccaaggcaggtggatcacctgaggtcaggagttcgagaccagcctgggcaacatggtgaaaccccgtgtctactaaagacacaaaaattagctgggcgtggtggtatgtgcctgtaatctcagatacttgggaggctgatgcaggagaacccaggaggcggaggttgcagtgagctgagatcatgccgctgcactccagcctgggtgacagaatgagactctgcggaagggagggagggagggagggagggagggagggtgggaggcagggagggagggagggaagactggtgagtccatgaagttagagggttctgggtagcttaggactttctccagggtcacagagaagccgcaggaggctgtacaccactagagggcagggtttctctcttatgagatcactctggtgttaagaggaaagtggattttaggggcaaaaggaaaggtagggagcccagagagaggaagggtccaggcgggaagacctgggcttggagactgcagcgggtggtgggggtggtcgtgcagtgtgaggcacatcttccaggttcatctagcagcaccaggtccctccagcagcacggactggaagtggggtgaaggaaagggagccaccaggcatcctcccagatgggacctgaacaactgggtgcttggcggagtctaagattgcagctcaaactcaccccatgccaaccctgggtcagggagaggtgacctataaaatagcaggtctgagtcacaggtggggagcctgccattgccttagggggacagcagcattaacaaaggcccaccctgagaaaggcactgtggtcccagcctgggtggggctctcagggtgtccccagagatagctgtggatgtaacctggctgggcatgtgtgtgtctgagggggcttgccacc

SEQ ID NO: 6247 - DNA, 1076 bp, Homo sapiens
gaagcctctggaggcagttggttgggggcgggcaggcaggaggccctccctccacccccccaccctcagcccggcaacttctgggttccatgggttttagttccgttctcgttttcttcctccgttattgatttctcctttctccctaagcccccttctgcttccacgcccttttcctctttgaagagtcaagtacaattcagacaaactgctttctcctgtccaaaagcaaaaaggcaaaggaaagaaagaaagcttcagaccgctagtaaggctcaaagaagaagaaaaacaccaaaaccacaagggaaaagaaaaacccagtttcttaggaaacgcaaacgatttattatccagattatttggataagtcctttttaagaaaaaaaaagaaaatgaaaaacaacacaaaaaaaatagaaaactcttttcttgagtgtggatgagaatgggcacgctcacacttctggccaggagtgaatgtgcctgtgtgtgtgtgtgtgtgtgtgtgtgtgtgtgtacatgtacgcgtgtgcattgaggagagagagactgaacagagagtactttgctgctaacgaatccatcttggactaaattctgacaaggcctcagtttccccagttgtgcagggagtaggtcagacagggttttcactgtctagatttagctggttagattttcctctaaaatcttaagcagatgctgaatccataaagccaaggagtgctgagggctggagtgggtgggccctccctcccacagccccagggagatacatctggactcctgggaatctggattaagaaagttgggatgaaagaggaggactgctcaggccagttgtgagccagggagaatgttccagtctggttttggtctggtggctcctagaaagggatgtggcccagaagtgggactcaaacagagagatgaagtaggggaggggagtcctccacgggcatctctctcctggcggctggatagctttaccctagggtggggccagccctgacaccctcatcccctcctcagcccagcagcctctagagcagcgtggtgctctcttgatggcc

SEQ ID NO: 6248 - DNA, 1033 bp, Homo sapiens
gtctaataaaatccgggttgcatttggctgtcttcctgttggtaattgggaatgactccgttgctcttctcaaaattccatggaaggtggaggtgtcactgtcagttcagagctatctgacccccaggagatgagcaagcccaactgcctcattttatagaagggaaaactggttcagagaggggtaaggacttccctagagtcacacagcaaggaggagcctgtggtccatctggatcccggtccttgtgcatccggatctgttcaggagtttgtcatgtgagtctgccaggggctaggtaatggttgagagggatgacacagagatgaagccccagcatccctgtccgtctctgaggagttcagaagggggtatccccaagggtgctgaggctgtgaggtcagttcagaaacctcacctaggatatatgactattgtgcaggctgaaagggagtgatgggcaggttgggatcatatgactccgccccaggctgccaggcatggttgggcaggtaacgcactgggcaagagtaccatatctaaaggggagggtggctccattcccatgtatgttgtagatttgtgtatttgctgagatatttccagcagatggcagtaaagggtcttgtgctaataaaagcagtaccttgctattgaggagagggtgccttgttctcacgtgcacagacgtgctgtaagaagactggcaagggtcccatttcagctggtcccctccaccctgtggacctcaagtctttccctttatgagttgagtctggcctgagaatttcccagcatggattgcctgctccatgagtagattctgcggtgtcttaagtttggggtgagagcaccctctggccccatcttggacagtcatgttgcccaatcagcatgttaaaggctctgaaaagccctgcaggaagcagctggtctcatattaacacagacatcccagatagatttggccttggaacttgttttcacagcctgactatgtggtgcctataggccctgccagccctgactttc

SEQ ID NO: 6249 - DNA, 1048 bp, Homo sapiens
tccggaggcccaaggagattgaacgtcctcagtgctgtccttcttatttgtttatttatttattatatatattttaagagatggagtcttgctatgttgctgaggttggagtgcagtggctgttcggaagtgcaatcatagctcactgcaacctccaactcctaggctcaagtgatcctcccacctcagcctcccaagtagctgggactacaggcatgtgacactgtgcccagctttttaaaaaaatgaaatataactatattttccaaaacaaaatattggtgagaaaagtgccattgttttgcagtttttaatgtaattttttattgatacataatagaggtatatattttcagggtacatatgataatttaatacactgatatcatttgtaaagatcaaatcagggcaattgggatagccatcaccttaaatatttgtcttttctttatactagaaacatctaaattattttattatttattttttaatttttaatagagacagggtctctttatgttgcccaggctggtctcgaactcctgagctcaaacgatctactcacctcagcctcccaaagtgctgggattacaggtgtgagtcatcgcgcttggcccgaatgattctcttctagctattttgaaatgtatgatagattattgtaaagtgtagtgaatactgatccatcaagcactaggtcttactgattgctgttccgattctggaaaaagcccccacgttcctagcccacttcctatgcactcactccagggtgaaggatgtgaggtcctcttcccagcactttcacccaacggcctccatcactactgcactagcccgccccactccttggagtttaaccagggcagaatgttctcatggctctagacttctgatgtccttgctacttccttctaagagtcttatgtgggtcttaatctggggcctctgggtggaaagagggattcatggaacccctgagatcatatgcagaagtttctgtgctttgggagaggggctatagcttacatcagatagtcaaagaggt

SEQ ID NO: 6250 - DNA, 1029 bp, Homo sapiens
agtaatacagggcagctccagagaaaacagactcctgacctcaggcccatggtactcaagggccaagccacagaggagcttggggaggggacataggtaggaggatgaaagcctgaaatgagggtgacgtccttcaccttgatgcaggcccaagaggtgctccactcccacagtggagaaacggaggcctggagccatgagtggcggggcaggcctgaagggcagaggaaaaagaggcagcagggcagagccacccaccatgtgacatgggcttgctgggtaccaggggttgaggtggagtcagaaacggaagcagtgtcctctgccaggctccttccactgccttctgtatcctggcatctcagtgggcagagagacttagcaccccccttaatgtaggggttggagggagaagcagctggctttgagttgaaggtggaaggagaggcctacctcctgccgaggtcccctttgccatgtctgattggggtgaattaagtgaaaggatggacaaagaaggataaagaatatgtattcgatgggcttttattttctactgctcaatgttatggatgagaccaacagaaagtacagccgaggaaggagggaaacctgcgccccacgcccagggtgggactggtgggtcccgtcacccaagcctttgcccttctctgcctgctcctttcatttctggccatggtctagaaatcagctccttcccagggatgcctcctctcctacccccactactcctagaacaataataatagctctcctctattgaacacttattccgtcccagatgcttgaccaagatttggcagctcacccacagtagccctatcaaataggctgcattcttcccattttacagatgaggaaattgaggctcaaggatataaaattgtgtatgcaaaaatcacacagctgtaaaaggcagtgcctgagcctaggctcaactccagaggttgtggcttccaaggttctataccctggaagctcaggtcatggggctcttccctggcagac

SEQ ID NO: 6251 - DNA, 1041 bp, Homo sapiens
tggctcatgcctgtaatcccagcactttgggaggccgaggcaggcagatcacgaggtcaagagatggagaccatcctggccaacatggcgaaaccctgtctcaactaaaaatacaaaaattagctgggcgtggtggcacgcgcctgtagtcccagctactcaggaggttgaggcaggagaatcgcttgaacctgggaggcagaggttgcagtgagcagagatcgcgccactgcactccagcctgccaacagagcgagactccgtaaataaatacatacatacataccagactgagcaacatagcaagaccttgtctctatttaaaaaaaaaaaaaaaaggaaagaggccaggcgcagtggctcatgcctgtaatcccagcactttgggaggccaaggcaggcaaatcacctgaggtcaggagtttgagaccagcatggccaacgtggtgaaaccccgtgcctactaaaaatacaaaaattagctgggcatggtggctcatgcctgtaattccagctactcaggaggctgagacaggagaatcgcttgaacctaggagacggaggttgcggtgagccgatatcatgccactgcactctagcgtgggcgacaagagcgagactccgtctcaaaaaattaaaaaaggaaagaaagaaaataccatatacactttttagaatttttgttaaagtcgtgtaagcttctgtggcaaagggagggttttgttttgaacttttgtaaggtgtcatgtattcagtacagttttctcgttaacatttgcattttttggtatgaaataggattaaacactcacaggtaggtgctctgttcataataggccatggtttccaagattgtttcctgaactttttgttccagttttgggatgccaccaagtgataagtttgggtattacatttagatgaaaaggttaatttttttttttttttttttttttttttgagagtcccgctctgtcgcccaggctcactgcaacctccgcctcccgggttcaaatgattctcttgcctcagcctcctgag

SEQ ID NO: 6252 - DNA, 1029 bp, Homo sapiens
ttgaccaggttaaaggcagagtcagggctgggcacggtggctcactcctgttatcccagcactttgggagactgaggcaggtggatcacttgaggccaagagtttgagagcagcctggccaacatggtgaaaccccatttctactaaaaatacaaaaattagccgggcatggtggtaggcgcctgtaatcccggctactggggaggctgaggcaggagaatcacttgaacctgggaggtagaagttgccatgtgccgagatctcgccactgcactccagcctgggtgacagaatgagactctgtctcaaaaaaaaaaaaaaacgcagaggcagcactgaatccaggaattctcttgacctcctactccagtttgctttatcctggcacctgtctacctcccatggtagtaggtttgatgtatttttttctagggtgattaatctacggatagattcaccctgtcagaaaggttctaagagggaataaaagctaatacattgcccttttgtgtgaacatgactcctgacccactgcagcatgatgccgtgtggttcttatagcaccaaagccagatttgcatcaaatcattcaccatcttgttcagcatcattggctgactggctggccaagatcagggtacaggctgtaagcatgtcatttgaagagcaaagaggttacttaaaatgcacatttctggccaggcactgtagctcatgcctgtaattctagcactttgggaggccaaggcgggtggatcacctgaggtcaggagttcgagaccagcctgcccaacatggtgaaaccccatctctactaaaaatacaaaaactagctgggcatggtggcgatgtctgtaatcccagctaatcgggaggctgaggcaggagaatcacttgaacccagaaggcagaggttttagtgagccaatattgtgccactgcactccagcctgggtgacagagcaagactctgtctcaaaaatatatataaataaataaataaaatgcatatttctgggcccaccttag

SEQ ID NO: 6253 - DNA, 1046 bp, Homo sapiens
tttttttttttttgatcactttgaagatgatattggaaggatgccctcttggttatatattcaagctctttggatacagtatctatagttgtttttttttttaattggttattgtgacttctgaaataaggtttcctttgtgtgaaactcagcatgaggccagaatgtgttagtcctgtctgcttgccatgtaatacctggccaacacaacaacccatgattgatgggtgaatgcttgaggcctagtagtgctaacgtgaagtactgcctgaaaaaggacagctgtgtcctctctccccgtttgttttaggattttcgcaataaggtacatcccccaaatggtttctgctacctttttaaaaatcaaatgtttctacgtgagctgtaaatttttgagaatatgttttgctgtatcagcccttgcctgacaaggaataacatgaactagcttatgtttcatgatcatcttccaagtgctgtggcaactgagttggccacttcttgttggcagttcttggcaccagtacaattctaggttctgaacttgcaccatactcttatcgtcatccaaattgcagtgttttggttcagttggaaaatcaaggttacagtttgcgttcacagaatgaaatttcccagcagtgttctgtgattgtcagagtgatgtaatttgatatattaaaaatcaacaattttttcctcagctttgttttttagactgaaaatgatttggagttttggtgaacctttatattttgacactacaggagccagccacaaggccaaatgtgtcagctgccagtgtttgcttgacatacaggagaacattaaggaactctcaggttgggaggagggaagtgttgaccaggacatcagacggaggtttcttgtttttgtttttttaaacactatttttaaactcttaagtagagggactattttaatattctaggtatagaataaatagcttttataacagtcttagttctaaatgaagcagaacccgtctttgtaaacactgagaactagaccctgaatgtacaagc

SEQ ID NO: 6254 - DNA, 1007 bp, Homo sapiens
gccagtgggggactttctcacagcttacatagccatccagagatccacagctacgtcactgaattgttaatgcacatttgtacttggtttctctgtatctattcacaggcaacaaatacttatatgtgtgatctttcagggaatgttttgtttatttgtttttaaaagtattgggaatcagattaagacaatcagtttcagagaaccaggaggtttggggttaagagatactcaaaaattttcacaagccaagtagggcatatatcagatttggccaactgaatggcgtctgtcctgtcatccatatggtgcctggaaatatttaccagtcaaggtcaaggtcagcatctgtggttaaaaatatagcattctgacctaaaaaagttattttgcagatgaatgtgttttcaactcaggacctatccaaatgaggaatttttaaatattcttttttttttcctatttttagacatcaattctatagattctgactttttctaacctcttatagacatgccaaatgctggcaaaaagaagtgctttttggatatggcagcacttgtaaaaataaagcagtaagcaaaatccttttaaacacagaaatcctgagttcttctcattggtggactcaagcaattctgtagcaaataaatcctttgaaagagctccaaattggtggcattatcctttcaaaatctcagggatttgggatgaagtgaagaggtcaaattactttttagaagaagggaatctaaaaaccatctctcctaaacaaatggtagactggctttacttaagggatatttgtctttataggagtacataaatttatcttaatgatatttaagtagtttttttttttttttgagacgaagttttgctcttgttgcccaggctgtatcgcaatggcgcgatctctgctcactgcaacatccacctcccaggttcaagcaattctcctgcctcagcctcccaagtagctgggattacaggcacccgccaccaca

SEQ ID NO: 6255 - DNA, 1049 bp, Homo sapiens
aaatattaagaggaacagaaaggtcattttaagtgtaataattgctctgatggggaaagcatgaggtgctggacaatcccatagcagagacaactaatccagctgggccaggcatcagagaaggctttaatgaaggatgaggtttaggctgagacctgaagaaaaagtaagtggggtgggaaggaagaactttataggtggagggaatacaatttgcagaggcccaagggtgggaaagggcatcttgcttttgtggggctgcgggtggttcgttatgattgattcataggtgataagggcaagaataaggcagagggtaggactcgtgggctttgctaaggaatctgaacttcaaccagaggacagtggggaaccactgatgagcttgaggcaggagcatgacaagatctggttatacttcagataatttacttggagggaatagtggagaattggtggtggcgagagccagattccttaggaagcctttgaggtcgtccaggtaagagatgactataggccaaattaaaggtgtggatatgactgggcgcagtggctcatgcctgtaatcccagtactttgggaggccgaggtgggcggatcacctgaggtcaggaatttgagaccagcctggccaacatgttgaaactccatctctacaaaaatacaaaaattagccgggcatgatggtgggtgcctgtaatcccagctacccaggaggctgaggcaggagaatcacttgaacccaggaggcagaggttgcagtgagccaagatcatgccattgcactccagcctgggcgacagagtgagactgtctcaaaaaaaaaaaaaaaaaaaagatgtggagacagaggatggacttgatttgagaagtggcagcgggtagtggctcacacctgtaatcccacactttgggaggcccaagtgggaggatcgcttgaggccaggagttaagaccagcctggccaacatagcaagacccccacctctaaaaaaaaattacagattagccatgcatgttggcacacacctgtagttctagctact

SEQ ID NO: 6256 - DNA, 1038 bp, Homo sapiens
tgggcaaagaactactgcgcctggcctacagcgagccgtgcggcctgcggggggcgctgctggacgtctgcgtggagcagggcaagagctgccacagcgtgggccagctggcactcgaccccagcctggtgcccaccttccagctgaccctcgtgctgcgcctggactcacgactctggcccaagatccaggggctgtttagctccgccaactctcccttcctccctggcttcagccagtccctgacgctgagcactggcttccgagtcatcaagaagaagctgtacagctcggaacagctgctcattgaggagtgttgaacttcaacctgagggggccgacagtgccctccaagacagagacgactgaacttttggggtggagactagaggcaggagctgagggactgattcctgtggttggaaaactgaggcagccacctaaggtggaggtgggggaatagtgtttcccaggaagctcattgagttgtgtgcgggtggctgtgcattggggacacatacccctcagtactgtagcatgaaacaaaggcttaggggccaacaaggcttccagctggatgtgtgtgtagcatgtaccttattatttttgttactgacagttaacagtggtgtgacatccagagagcagctgggctgctcccgccccagcccggcccagggtgaaggaagaggcacgtgctcctcagagcagccggagggaggggggaggtcggaggtcgtggaggtggtttgtgtatcttactggtctgaagggaccaagtgtgtttgttgtttgttttgtatcttgtttttctgatcggagcatcactactgacctgttgtaggcagctatcttacagacgcatgaatgtaagagtaggaaggggtgggtgtcagggatcacttgggatctttgacacttgaaaaattacacctggcagctgcgtttaagccttcccccatcgtgtactgcagagttgagctggcaggggaggggctgagagggtgggggctggaacccctccccgggaggagtgcc

SEQ ID NO: 6257 - DNA, 1075 bp, Homo sapiens
tactcctaaggccaatgacagcatcaaaatcgagtgcctgaaagatctatgaaaagacctaatgctctgcaaaagcaaggttgtattgttattattagtcataggtatggaccctatcctcattcttgtgagaagattgtacctctttttatttggcatactggcatattgctttgctgaagcttttgggtgacagccaagagcttttccacagttcaatttaatttgcatgtttcatagcctctagttatgtgttttgttctcttaaaaacataaggccaccccaaattttgattgcattcccctttccgtcgaactacttaaaggcttcccaagttgtccttaagtccatattttgataagacatcttctgactttgcacagtttttaagactgtttgggtgtgatattcatttagcattttaaaaaatttgtgccttgtatattttccactatgcaaatttgtcaggctgtgagtgtctcccttgtggggatacttcacgaaggtgttctctgtgctattctagggtgggtaaaaatgaagtgctgaatttgtaactgaaagcacaattaaaacgaagtgttatttctaaagggcaggaatgttatgggaatggtgacttgtacatgaatttagaattgtaagattttgaaaaaaattgaacctgattatttaaagtgtataaacattttatttttctacaattcttctgaagccatcatgtatacagctgtttccataggatagtctgtgattctttacaagaaattccatttaaaagatattgaggccctaaaaagagagagacttggccaaggttacgttagctaatacgtaagttttaggactcccactcatctgagatattctcacctcttattgtgttcttttcattgtaaagtgcaaatgctcctttacatctctctcctcccttataaaatttactattgtccattatgaaagtattgctatttcaaaaccccatgaatgggaattctcctgtaagtaggtgttgatttgagtacatatattaggtgaatatgggagcaaacaacttaccagaaagaatagatg

SEQ ID NO: 6258 - DNA, 1023 bp, Homo sapiens
ggcgcctgtagtcccagctactcgggaggctgaggcaggagaatcacttgaaactagaaggcggaggttgtagtgagccaagatcatgccactgcactccagcctgggcgaaagagcgaaactccgactcaaaaaaaaaaaaaaaaaaaaaaaatttttttttttttttttttttggtagagacagggtatttctaccaggctggtcttgaactcctggactcatcttcccaaagagctagtattatatacgtaagccactacgtctggccaaaaattcctttaaatggagatggattcaagaattcctagtgtgaagatctggcctaaaattcctttaaatggagacagattcaataattcctagcgtgaagatgatactttcagggataatttctataattcgttactagaaaagtttctctaaatgtgtagagaaaaaaacatttcctagtttgaatcttgatttgtgtaattcctggctcttaacccttttctattgttgtcttctgtcctctctgaattctgatgggatttattatctttaggacacaaattgacaccgacatgatttctaaatgttttatttgtgggcatctaatcttaactggggagataaagcaatgatgtgtatcttattacctttgtggctcatagactctagcacaatgctgggtacataggtgacactcagacaagcattagttagctatgcacccctttttctgcttgctagggaaaagatatgccctttatctcctctccctatccccctacccccagtttggcttgcttaatagccttccttaggtagccacatttggagaattcctttaagcttagtattgccagtgctgtctttggttgtatattacacttctttatggtggattgatggaaagagttggtaccattggattagctcagcagtggtcattagctttctgacaatagccagcaaaagtataataattacccagattattacaagtatatgtttgaatcagattccacatttgttggt

SEQ ID NO: 6259 - DNA, 1030 bp, Homo sapiens
gatcatcttgttctctgtgcccagatactacagtgatgggaattatgggaatgtcaagaaggaatgacttctctttgattcatgaagcagctaatactcttaaaacagtttcgattgtgctgaaacaagcaggactaaataaaatgctcagtaaaaatagtaatgaaaaagattgtaaagctattatgttaaaagtaatttgaggccaggctcagtggctcacgtttgtaatcccagcactttgggaggctgaggcaggaggatcacttgagcctaggctgcagtaagctttgattgtaccactgtactccagcctgggtgacagagtgaaataccctatctctaaaaaaaaaaaatttaagaaattgatacagtggcatctacctggcatgattggtgggggtatgggccatgctggacactgcagaagagagaaaggaactatttcaaagaggtgctgccaactgtagattctttctgtatatatatatttccaaagaaggcagatttttggaagtgtttattttggaactagtcttgtgtatttccattctgtccccactgtatcctgtattttgcactgccagaattctgatagctgccgtgaagcagggctgtggcaagtggccaagtgtgataaaaacctatttttcattttaaaacaatacagatgtcagaatactttaaagaagtatttaaagatagattgagtagaatggaacaaatagtaaaaatctaatgagaagattgaaggtttttcatttgcttttgatggaattacattttttggaaacagaagaataccaggttatgtctttcttgatctgttagtttctctctctttctccctttttcctgatctgtgaatgctggtgctagacactgctgaatagacaggaaaaatggattttctggtgtttttttttcttttttgaggggacccctagggtatactttgtgtgagtatctgactagatatagatatagatgtcaatagtttggttttgtttatttattttcttgttttaac

SEQ ID NO: 6260 - DNA, 1034 bp, Homo sapiens
ttatggtaaaaaggctgttcttgaattgtgtcgtggttttatggggcaagcaaaagaaaagtaaggtctagaaatgaggggacatactttttgagacaggtagttggtgtgaaataaatatttgttttaataataattctgtacatattagtcaatgtatattcttactttgaagtcattgttttaaaaagacaatctctgataaaattttatcttctcaatttcatgctgttgtctttcatttccaacactcttgataatggtttgaacatttttgcagagtacacagggcagagcttcattcaggttgtccctccaaatgatttgctgtagtgcattaaccagaaatgctgaggcagcaagggaaacactaataaattggatggtttccagggactgtcgctacggcaagcaaacacaagccaaaattaaaatgttagttaggcacccaagatataagtctggccagatatgctattaacagtgaatcttccattctcattaaattatttgagatctgtacaatttgaagattgttacaaatggtgaccaattttaagcatattttaattaggggtggtataatagtcttttggctaaaacttaattagaatgaaaaaatacttttgccttttttatttgatagattccagtgcctcaggaatgaacctccagtaatgggagagttttttttgttttgttttgtttttgagacgaagtctcactcttgttctctaggctggaatgcagtggcgcaatctcggctcactgcaacctccacctcccaggttcaagtgattctcctgcctcagcctcccgagtagctgggattacaggtgcctgccaccaggcccggctagttttagtatttttagtagagatgggacttcaccatgttggccaggctggtcttgaactcctgacctcaggtgatctgcccgcctcgctagtgctggttttcttgctaactacacaaattatacttctgtagtaattttcacaaattattttaccgtgaaaagtataggtatggg

SEQ ID NO: 6261 - DNA, 1026 bp, Homo sapiens
ggtcttccatgatctccttgcatgaaaattttattttattggttgttctgagatgattttaatatacactacagtgtttttgtagtcatctagtgccttgctgtagtgatgcattactgctatttctaggcaatgtcatctgtgggtgggcataatggttatatttgctgttgagacttaaaaagaagcatttcattttgtttgaaacgaaaatatctgtgatacatataaacaaatcagtttgggcctcttattggtaattgcaacttgaattactatccacttaggctccttatggggaatgcaacaatatttatggttaagtgtacatttgatagtatattgttctcacagtaacatcattgtgggtttgaagatctgtgctaagttatgaaacaatggaatttatacactttatttgaagataaattgggtttatagggaattcttggtataaatattaacgtgtagattagtataacatactgtttattataattagaaaaagctgtgggcacttaaatcccagctacttgggaggctgaggcaggagaatcacttgaacccgggaggcagagattgcagtgagcggagattgcacctttgcactccagcctgggcaacaagagtgaaactccatctcaaaaaaaaaaaaaaaaaaaaaaaaaaaggtacatgacttcttatgaactagatgccaccttttccccttaacctcagctgtttctttttcttttctgttttattaaggaactttaacctcccgcttgacttagtctaggcatagctaatattacagtgaggtaacaagattgagttgtagttattggcacttttttctttctttctttttttttttttaacatgcaactatttttacaagcaaaattctagtgtaaccagagttgaaaacatgatagctatagttactttttaaaaattaatttttcaggggtaactttgacaacccatttttggggggagtttgatttataagtcaaagaagagagtagcttgcactgaaag

SEQ ID NO: 6262 - DNA, 2006 bp, Homo sapiens
ttttaaataaaatttgcattatttcttttctcaagactactggacatgggagaaaaagtcccttttccttatcaaagcttaatttcctttattctattactgttatcttcagaaaatgtttatttttggctgggtgtggtggctcacgcctgtaatcccagcactttgggaggctgaggcaggtggatcatgaggtcaggagatcaagaccatcctggctaacatggtgaaaccccatctctactaaagatacaaaaaattagctgggtgtggtggcaggtgcctgtagtcccagcaacttgggaggctgaggcaggagaatggcatgaacccaggaggcggagcttgcagtgagccgagattgggccactgcactccagcctgggcgacagagcgagattctgtcttaaaaaaaagaaaaaaagaaaatgtttattatctagtcttttttttgcagctaagtttttaaaaattagcaaatttgtcagaacgaagattaaattaataaacttagttttctgttctatatatgatgctatgattcttattttttctaacatattcagaatcattcatttttaaaaaatttctttctatgataaaagtactaaatcttttatcatagaaattgagatgtacagaaaaatggaagaaagaaaaagtgctactcagagacaaccattgttaacatttttatgtatttccttttagacattttttaatggaattcatcttgctttgataaaagaataggtcatctttatatacaacataaaaccatataacttaccatcgaagatgactcaaagaagaaaaaaacccatgtaactatattttgctttttttgctcagcattataccaaatatttaacaaacttgtcatacacatttaatggcagcataatattccagagtggctgtatcagtatttgtgcttgcaacgtgcttttcaaaatatatatattttttggtagcacatttgaggattttaaaggtaaacattctttcctcgttttcacctgatgacttttgtagtttgttgctctgcagatagaataggttaccgccctcaccatgttcttttacactcacaagtaacagccacaaattttaataatgttattcagaacatctttaaaagtccatctgtttcagatggtatcttcgagaacgtttaacacaaactgtcagattcttctaaggtcattggaaagcccatccttttgtctctagatttgctcatcaagaatattaagaaatagcttgtgattctttaatatagttatgtagatatactatatttttaaaaaatcaattccctattacacatgtatgttgtttccagtcttttgcagttatttgcattgctatggtgaataaccttgtgcattcatcattgcttgtgtatgagtttatagaatgtattccttgaagtagaaggtatcagaattactctctgcttacatctttgccaatacaatgtggtactaaactttctgactggtgaaaaaatggtatctcaatgaagctttaatatgtttttctcgtataagtgaagtgagattcttttaaaagtactgtctttccctttgctgtgaactaaaactcatgttccttaactctcatagagatgttggtctttttctttgtaatttgtgggagttctttgtatattagggaaactaatcctttgtgattttaactgcatttctaccaccaccccctcccccacaagtttgtcactttttaacattttaagtcctttaagtctgaatctggacattcaactcttaggcacatttaaagggctgtattatatatgaaagtagggaactacctgtaaatgttgccaagtaaatacagtattagtcctgaacatatttgaagacagctatgtggatgaaggttagattagatttattccttctctttatggagaagcaaattgcagctcagcatatggaagaattttctcttattagatcagcttcaaaatggaatggaaa

SEQ ID NO: 6263 - DNA, 1109 bp, Homo sapiens
ctaggaccaaaggcgtgtgacaccatgcctagctattaaaaaaatttttttttttgtggagacaggtctcactatgttgcccaggctagtcttgaactcctggctcaagctattctcccacctcagcctcccaaagtattggcattacaggtgtgaccccgtctctacgaataattttaaaaaaattagctgggtgtggtggtgcatacccgtagtcccagctactagggaggctgaggctggattgcctgagctcaggaggttgaggcttcagtgggctgtgatcgggccaccgcagtgcaggctgggtgacagagtgagattgtctcaaaaaaaaaaaaaaattcgtctgtgttgtatcatgtatcagaattttttttttttgatagctgagtagtatttcagtgttcagcatttttattaatgacatggatggaatattaatgacttgctttgcaaacccatatatgacctggaactggcaatgaaaataagttgtattgttaaagtgtgttgggttttttttcagactagagattgaaaatagttatcagactgaaagaattgactgaattgattaaaacgtattaaacattgataagtgcaaaatcccatatatgatctaaaaagttagtgttattgtagatggatgtgatgtggtttaatagcaggtaatatgaaaaatacctggagggtttcacttgacagcatgttcatcatgagtccacagtattatctgggctctattaatagaagcatggtgtccagaatgaggactatgattgtcccaaagtattgtgttcatgtctaggtaccttattttaatggtaaacatttaaaaacaaaggcatattcaagagagaaaccagaatgatctaatgggaaggtaactagccactcagtattagaataaagctgttgtaaggtagagtggactgccttgggaggtaatcagatctatgtcacaagatttgttcaagcagaagctggatgaacacttggcagggacattgtagactattttagtttcactagttgggtacaggagtggagaaggtgcctaattatatagaatatctttgtggatcttcaaccttgatattaatatt

SEQ ID NO: 6264 - DNA, 1027 bp, Homo sapiens
agcagaagctccaagtcacatcacatatctggagaattagaagtttttttgtggttgtaaaaaacaaagatttttcgtacaggcgttttaactttaagtagaggcataaatgttatctgtgtctatgtaaatactacctcacttttcagttggataaatctgacttaaatgctctgattaagttgaatgtttgaattgtatctattagaacagtatcctaagcagcaagcccaagtctgttattttcaggccttcttctggttctagggtatgtaataagacttcagtgtttgaaatgtctgaagttgtctccaaacagagattacactagcccttatgtgtttggggattctgtgctaattgcataattgtaatgtttagcagccatctgaaatgtaaacttaatgccaaatttcttataattgcttccatggaaggtaacccagggttcagaaaaaaaataacttatttggacttctaatccctgccgactctgagatatcaagacatgtagttattatgtactgaattggggaggtgactaatttatgatctctatctagaagtttggtaaacacttagtggtaggttgctaggcatgaatttagtctctttgaaatttggaaatataaatgtaattctgaacctaacaatgaaactgtctgggccttttcagcctaactctggaaatgtgaccaaaaccagctaaaaatataaactaaaaatataacgaaaaagttagggactatgtgcagggcagaggtgctgatttttaactctggttgcttccacttgctgcttttagtccatgtttagtgcctgtgttttgcttcctcattccccattgcactccttctctgttgccatgggtttcccaagctggcattatggtcttccagaatccactgttgtgttgtttgcagatatttcagggatcacacaatgtctatacgaatgttatagatacttaatgcattcttggaggattaagaatatattctgaaccagaaaagtaaggagtagtgca

SEQ ID NO: 6265 - DNA, 1022 bp, Homo sapiens
taagggaaggacatcctgatccatgtttgttacagtctcaagaaaataattataatttgaaacctgttctttccttgacagtggtattactttaaggaaacaggtaaactttccatctgaggattaagatgttagagtcatttagcttctctagaatttgccacacagcatcctaaattgggatgaaaagcactcactattccacactatcaaatagctgtaaaacttgagaatgttggattatgatggctcacgcctataatccgaacactttgggaggccaaggtgggaggattgtttgagcccaggagttcaagaccagtctgggcaacagcaacatggtgaaatctcatctctcccaataattgaaaaaaaaaatgttgttttttttttgccagtcatggtggcacatgtatgtggtctcagctacttgggagactgaggtgggaggattgcttgagccctggaggacaaggctacagtgagccgtaatcatgccacggcacttcatcctggacgactgagtgaaaaaccttgcctctaaaatcaaaaaccaacttgagaatggtgacatgggcagagattttaaatgagtgatttatttttctccaacctgactgataggagcttttcttctaaggtataaggtatttactagagtgtgaagctatttatatgcaattatataatgcaaagaatataattttattagcttataattacaaaataaatacaacacattaggttgatcaaattaaatgttctgccttttttggcctattatagggacttgtgtttgtaaggactgctttctatgtcttggtgatagataaggattaaaagttaggttcttaaagggggttaggatggccatataagtcacctctaaattgcagtgccttttgagtgaaagagagtgctgacaataaatatgttacaggagcaggtgttaagctggactatcccaggcaaattgggacatatggtcaccctagttaaagggtgctgttgtagctttgcta

SEQ ID NO: 6266 - DNA, 1071 bp, Homo sapiens
tgttgttgcacaggttcccgagggtctggcttcctttgagacattgttattaatccctcagtgtcattcctttgagacattgttattaatccctcagtgtcattcattcagatgccactgtgaacattcttgtgcaggcctgcttgggtacatgtgacagactttcttttttttttttcctgagacagagtctggctctgtcgcccaggctggagtgcagtggtgccatctcggctcactgcagcctccacctcctgggttaaagtgattctactgcctcagcatcccgagtagctaggactacaggcacccgccaccacgctgagccaattttttgtatttttaatagagacggggtttcaccatgttagccaggatggtctcgatctcctgacttcgtgatccacccccctaggcctcccaaagtgctgggattacaggtgtgagccaccatgcccggccgcacatttatatctttaattcatttgtctatttgaagtcaacccttaggagataatacttttcacgcattatctcagagaagatcagtctgctgaggacataagtgacaggtccagatttttttttttttttttaatactagagacagggtttcaccatgttggtcaggctggtcttgaactcctggcctcaagtgatctgcctgcctcggcctcccagtgtgctgggattacaggcatgaggcaccacgcccaccctccaaatgtttttttgaatgggcaaaataatccacagtaaatatagaatgtgctttatgtctaaatgctaagaacatataggcattaatgacgttgaaaacattcttttcttagtactgtattgataaatgtgtggctagctttttggtggcagtaataaacatgaatagcaacaaagcaacaacaaaactgagggcacatttggaagacaaagagatatgaaggacaatatgggatctggtgttagttttgttttgggttttgcctgctgcatgggtcacaggaaacatttagttacagaactggagacctattaaaatcctctcatttgtaggcctgtggtgtgtgtttc

SEQ ID NO: 6267 - DNA, 1065 bp, Homo sapiens
tgaaaaccacataatgggccgggcgtaatggcttatgcctgtagtcccagaactttgagaggctgaggctggtagatcgcttgagcccagaagtttgagaccaacctgggcaacatggcaaaatcctgtctctataaaaaatacaaaatactagctgggtgtggtggtggcatgcgcttctggacccagctacttgggaggatgatgtgggaggattaccggagcctgggagattgagattgcagtgatctgtgatcacgccactgcactctagcctgggtgacagagcaagaagactttgtccaaaaaaaacaaaaaaacaaaacacacacacacacaaacccacactatgaagtaagtactgttttcagccatatttcccagatgaggaaactgaggtttagagtgattaagtaacttaccctagattatattgcaagtagcaattgttatatggtaagtagcagagtaggcagagccaccactagctatgagagacttctgtttgaattaggaaagttaccccctgtggtgaaccaatgaggaagccaaacttcctctggcctggcacaccacccgaagcagtaacttggggacctgtgcttagatgccacttatttcagcatctgtgagctgaacatgggcagaatttcagccttattttgcttccttgatgcctttgtactgtgcacaaactgagccacccttacccaaaggtcttaaagcccagatttcaatccaggtctatttgagtccggagcttatattctgtttaatagcatgctgccaattaatggcaaagttaagacttcagccagattttctgatcatcagtattttcctccttctattatgtatcatgcaggttggttgaattacagatgacactggaggcggggcatgctgactcacacctgtaatctcagcactttgggaggctaaggcagggggattacttgagcccaggagtttgagatgaacctgggcaacatagaccctgtctttacaaagaattaaaaaattagccaggcatgttggcacacacctgtggtcccagcactttgg

SEQ ID NO: 6268 - DNA, 1735 bp, Homo sapiens
tttaagatttgtgtttgagtgctgagtctttccctttttggggggatgactttggtcaaaaggtttggtcacttaagatttctgaagtttagttttctgatctgtaaaatgaaataataattcacagtcttataggaatgaaaagggaatgtatgaatagacaggagtttaattttgggataaattttactggttgtttcatcttcatcttgttaggctcttttaatttaggcagatgttagatgatcagatcaacttggaaaaacaatatttgagggaacatagaaaatgtcaagattcttaaaatgacttgtactatctattaagatgaagagtttccaaggcgaataaaaaaggctcatgaaacaacgagcagttatctttgaaccagagaggaaaacaaaaaaaacaaaaaaacaaacaaaagacttttttaaaaaaagaagttgcattaatttttgcataaaataaaattgtcatagaatctttcttaaattctgtttctgcaatccttggaattttaggtggaactactgactatgaagtcattttggtattttattaatccattttgcctaggttttgagatagacatatggtttgtagtcaataagattctgaagaactacacaaaggcttctggaaatttatttcttgtttttaaaaacatttatataatctcagtcaatttaggatttaatattcatgttagaattccagtaaattagaattaggcaaatcagtcttgaacactatgctaagtagtgaagttatcaaacctcttttgtaatattgtgtatctatacagtggttgcaaaataggctcagaaggttgcatagaactaagttagcatgatgatagtttcaacctcttaaatggtgaggttagtccattcactttgattgtcattactaatatattgtaccatatttcattgcctctaagatgccatcagttgtaagacactgttatttattagcagtaagaaaaattacagttaagatgacaatgctttgtcatgcaatttcttattttatgcttattgaaaaacttagttttttaaaaaaaattagatacaacttttagacatttaaattgtctcaggagttctattccaagccgctgacacatgttatgcatggtttttgtttttgaaacagggtcttcttgctctgttgcccaggctggagtgcagtggtgcaatcatagctcactgtaactttgaattcctgggttcaggtgatcctcctgcctcagcctcctgagtaactaggactacaggcatgcaccaccatgcacagctaattttttttttttcttttaagagatatagtcttggtatgttgcccaggctggtatctaccttctgggctcaagtgatcctccctcctcaaagcactggcattacaggtgtgagccatcatgcccagccattttgtagtttttggtcctggaactttcttgatcttagtgtcagtggaatgtctgagcaacatgacttttatttcttcctaaaatgaaccttaagtggtttgttgtcaaagggttttaggtaaccagttatgccatgaagaataaaaccgagttcttgctcacacaaacaatgacaactgtgttacaactgctgctttgctgtcagagattccactgcaggtagatgcatcttggtttcatccatgttaaatatggggaggaaaggttttaatattgatgaaacatactattttatttatt

SEQ ID NO: 6269 - DNA, 1060 bp, Homo sapiens
aagcagttcagaaatttatcagagaaatttaacaaagagattgaaataattaaagaaaaaacccacagaaatcttggaaatgaaaaacacatttgcttaactgaaaaaactctgtggaggctctcaatggcagaatggatcaagcagagaaaatagtgaacttgaagatgggctatttgaaaatatacagtcagtgcagaacaaagaatgaaaaggaacaaagactgtatataagatatagaaaattacctcaaaaggcaaaatttaagacttactggtgttcaagagggagctgagcaagaggaaagatagaaagcttattcatagaaataataacaggtaattttttaaaacttgaaaaagatagaaatatccaggcacaggaaagtctgtgccaaacagattaaacccagatgaaactacctcaaggcatataataaactctcaaaagttaagaacagaaagaggatcctaaaagcagcaaagaaaagaagcagataacatataaaggaactccaattggtctggcaacagacttctcagtggaaaccatataggccaagagggagtataatgacattttcagaattctcaaggaaaaaactgccacccaagaatattttgcaaaattgtctttcagaaattaaggtgcaacaaagcgtttcccagacaaacaaaagctgagagaattcaccaccaccagacccatcttacaagaaatgctaaagggaattcttcaatctgaaagaaaacataaaccaacaaaccactaacgtgctaaaggaaaacttttcaacatataacataaacttttcaacatataaaatccactggtaaaattaagtacacaggcaaatacagaatactcttactgcaattgtggtgtgcagtacacttataactctaatatgaagcccaaaatcacatctatcaaaaacaataatagctacagcaacctgttaagagataggtaatgtaggtaatattaaaaatgtaaattgagtcaaaatgtggaggagatggagttaaagcatagaattctttttttgttttacctttg

SEQ ID NO: 6270 - DNA, 1029 bp, Homo sapiens
aaatcaagaaacatctgagttaaactacacactagatctaatagacttgatatttacagaacatttcacccaaatgctgcagaatacacattcttttcattagcacatcaaacgttttctagaatagagtctcccttaggccacaaaacaagtctgaagaaatttttaaaaaacagaaataatatcaagtatcttttctgaccacacggaataaaactagaaatcaataacagaaggaccctggaaaatacacaaacacatggaaattaaacaacatgctcctgaatgaccaatgggccaatgaaaaaattaggaaaattaaaaagtttcctgaaacaaatgaaaatggaaaatataacataccaaaatctatgggatactgtaaaagccttactaagagggaagtttatgatgataaacacttctatcaaaaaagaaaattagaatttaagtaaacaacgcacctcaaagaactagaaatggaagaccaaaccaaacccaaaattagtagtaggaaagaaataaagatcaaagtagaaataaatgaaatcgaaaccaaaaaaactccacagaagaacaatgaaacaagaagttgttcttttaaaaagataaccaatatcaacaaatctttagctagtctacaaaggagagaagacccaaataaaataaaaaatgaaaaaggaggaataactgaaacctcagacatacaaagaatggttagagactattttgaagaactatacaccaccaaaatgggaaatctagaagaaaaggataaattcctggataccgtacaacctaccaagattgaaccacgaagaaatgtaaaacctcagcaaaccgatcatgagtaatgaaatagaagctgtaataaaattgggccaggtgcagtgactcatacctgtaatcctagcactttgggaggctgaggtgggaggatcccctgagactcggaatttgagaccagcctgggcaacatagtgagaccctgtctctacaaaaacagttttaaaaaatagttggatttgg

SEQ ID NO: 6271 - DNA, 1075 bp, Homo sapiens
ttaagcaagataaagaaataaagggcatccaaattggaaagaaagaagtcaaattagccttgttcacagatgacatgatctcatacctagagaaacctaaagactccacaaaaaattgttaacactgataaatgagtttagtacaattgcaggatacaaaatcaacatacaaaatcagtagcatttatatatgttaacagcaaacaatctgaaaaagaaatcaagaaagcaatcccacttataatagctatgaaatacctaggagttaatctaactgaataagtaaaagatcaaggaaaactataaaactctgatgaaagaaactgaagaagatgcaaaaaagcagaaagatattccatgctaatgaattggaagaattaatatttttcaaatgacagtactacttgatgtaatttacagattcagtgcaatccctatcaaaataccaatgatatccttcacagaaatagggaaaaaaattctaaaattcatatggaattacaaaagaccttggatggtcaaagcaatcctgagcaaaaagagcaaagctggagacactacctgacatcaaaatttactctaaagctacagtaagcgaaatagcgtgatactggcttaaaagcagacacatagaccaatggaacagagttgagaatccagatatcagtccatgcatttacagccagctgatctttgacaaaggaaccagaacatacaatggggaaaggacagtctttccaataaatggtactgtgaaaactagataaccatatgcagaagaacgaaactagacccctaactctctccattcacaaaattcacatcaaaatgtattaaagctttaaatctaagacctggaactgtgaaactaccagaataaaatcttggggaaaccctccagggcactggtctaggcaaagattttttgggttagacctcaaaagcacaggcaaccaaaagcaaaaataggtatggaattacatcaagttaaaaagcttctgcacagcaaaggaaacagtcaacctagtaaggagacaacatagagaatgggagaaaatacgtgcatctgacaagg

SEQ ID NO: 6272 - DNA, 1027 bp, Homo sapiens
cagccagatctcgtgagaactcactcactctcttgagaacagcaagggggaaatccacctccatgattcagtcacctcccaccaggtccccctaccgaaattgggaagtagaatttgacatgagatttgggtggggacacagagccaaaccgtatcaccttggaaattataagatgttttgtctttatcctttcagcaatgaggagccagtgaaagtgttctgaagagatgataatatcatccagtctttctgttggagagtgactggtgcattctgatggatatattagaaggacaaaagattggaggcattgtagtagtagtaacaataaccattctgttttgagtgccaggcacgtgctcactgtgcttaatgctttatatgcattagccctttgtcacctcacaacatctggatttatctaaacagaaactaagacttgaggcagtcagtggaacttgctccaaaccacaaagctaataaatggaagagctgggattcaaatccatttgtgactttagggcctctgctcttaaccactgaattatattaatattcatagaaaaaagaaggaacaaaaagaagcaaaaagggtgatggtagacttgatgagacttggaattggctgggagtacaaagtgaagactctaaaatggctatgggtcttaaagcctgagagactgaccaaaaagtttgacgtacaattaattgaaatcggaaacattggagtggagcaggtttgggaacatattttacttcagggacttagaggtatatttgatagagctattctaataagcagctagaaatttgaatctgaaaatcagtacagaaaggactcaagacattattttcattgagataataacttgaagttctaagaaaggttgagctctccaaacagaataagtatgaaaaaacaagggcaaagaataagccttgatgagtattttggggatagctggaagagcaagaaggcaataaaggagacatagaagtggtcaaagacagtagagtaagaagtaa

SEQ ID NO: 6273 - DNA, 1080 bp, Homo sapiens
ctcctgagtagctaggattacagatgttgtatgtgtcttcttgtatttttcttaggattatatctagatatgacattgccaaattgtagatatgaatgtaactaaataatgccacattgtacttaaaagtggttatgccaatttacatccaattacaattatgagagtcttcatcagtgcttgttgtgggaagtcagggacactgaacggagggaccggctgaagccatggcagaagaacataaattgtgaagatttcttggacatttattagttccccaaattaatacttttataatttcttatgcctgtctttactgcaatctctgaacataaattgtgaagatttcatggacatttatcacttccccaatcaatactcttataatttcctatgcctgtctttactttaatctcttaatcccatcatctttgtaaactgaggatgtatgttgcctcaggatcctgtgatgattacgttatctgcacaaattgtttgtagagcacgtgtgtttgaacaatatgaaatctgggcatccaaaaggaacaggatggctgtgattttcagggaacaagggaaataactattgggcctgactgcctgcagggccggacagaacagagtcacatttctcttcttacaaaagcgaataggagaaatatcgctgaattctttttctcagcaaggaacagccctgagaaagagaatgcattcccaggggtaggtctctaaaatggccgctctgggagtgtctctctcttatatggttgtatataagggatgaaaaaagccccggtttcctgtagcgcccccaggcttattaggattaggaaattcttgcctagtaaattttagtcagaccagttgtctgctctcaaaccctgtctcctgataagatgtcatcattgataatgcgtgcccagtgggacatgaaacttcatcagcaattctaatttcgccctcgtcctgtgatctcgctctgcccccatttgccttgtgatattttattgcccttgaagcatgtgatctctgtgacccacaccctattcgtacacccctccccttttgaaatccataata

SEQ ID NO: 6274 - DNA, 1074 bp, Homo sapiens
gttggtctcgaactcctgacctctggtgattcacccaccttggcctccaaaaatgctgggattaaaagcatgagccactatgcctggccatttttttgtactcttatacaattatatacttgctttataaaaatgaacttattctacatatatatgttattacattattaggacatgttccctaatgacatattacattttcatcacttttttaaaatatttttttcctgagacagcatctcactctgttgcccagacgggagtgcagtggcctaatgacaggtcactgcagcctcaagctcctcggttcaagggatcctcccatcttggcctcctgactaacccagctaagtttaaaaaaaatttttttttttggcctggcgcagcagctcacacctataatctcagcactttggaaggccaaggcaggcagatcacttggggtcaggagtttgagaccatcctggccaacatggtaaaactccgtctctactaaaaatacaaaaattagctgggcatgatggcaggtgcctgtaatcccagttacttgagaggctgaggcaggagaatcacttgagcccaagaggtggagggtgcagtgagtcaagatcatgccactgaaatccagcctgggtgacagagcaagaccctgactcaaaaataaataaataataactataacttttttttttcttttttggagaaacaagtctcattatgtttttgaactcctggactcaagcaatcctcccatctcagttcccaaagtgctgggattacaggtgtgaggcactatgcccagacattttcatcattctttctttttgagatggagttttgcacttgttgcccaggctagggtgttacgtcacgatcccggctcactgcaacatccgcctcccaggttcacgtgactctcctgcctcagcctcctgagtagctgggattacaggcatgagccaccacgctcggctaattttgtatttttagaagacatggggtttctccatgttggtcaggctggtctcaaactcccgacctcaggttatctgcccacctcggcctaccaaagtg

SEQ ID NO: 6275 - DNA, 1023 bp, Homo sapiens
ggcactctgtctcttccgcatccacaacgtgaggccctcccaatttatcccggccctatcctacactccatcccccccttctctgctgcatgcctggctacaatgtgagccccctcgcctcgcctactctgcctctctgtcccccagctccagctccagcaaacctgttctcagattgttccatttttctctgtgtccccttcaggcttctgcagtctgcctgcgagccccagtctcagagtccctgtcccggctacagagggaccagctgcaaaagtttgctcagtacctcatcagtgagctccctcagcaggtgggtgaggtcggcaccccctcctgcaattagctccgggccaggccgcataacagccttcctgttaggcccaggcctccatgggttcacctaggccgtgttctgcctgcctccgtctctttctccctcagatcctccccacagctcagcgtctcctggacgaactcctgtcttcccagtcaacagccatcaatacagtgtgtggagctccgggtgagtgtggtgagaaagattggcagtaggaagaaagccagcttgtagtacagagcgccatttactcaaggcttgctgttgtcaggcaaatccaggcccctatctctagatgactgactgcctgtcatcctcagaccccacagcagggccctcagcatcggaccagagtacttggtatctggatgaatcgacactcactgacaacatcaaaaagacactgcacaagttctgtggcccctcccctgtggtcttcaggtaaatcggatctctgcatacctgtgtctgtggtggagggggagcgtccctcaggctgatgacagatcctttcttctattcatgcctgtgacccctaccttttattccctgaactggcacagtgcctggcacacagttgtcactaacgaattgatggaagatgatgaccttgtacagtcacagagtggtctgctcttacctagcaagagttccttttcttcttttgatagatcaggaaatgg

SEQ ID NO: 6276 - DNA, 1034 bp, Homo sapiens
taagcattgtgcgggagatgttcaagcggagggacagcaatgctgcccccttgttggaaatcctcactgaccagtgcctcacctatgaacaggtaatcactcagcgttggggagccccgtggtagctcattctttccctccccctgcctcatcctcctcttgctgaaatggactctgggagggctactctgcctttctctgagctctcaggtgcagctcacagccttctttgtctccagataacaggttggtggtatagcgtacgtacctcagcctcacacagcagtgccagtgggcacacgggccgtagcaacgggcagtcagaggtggcagcccatgcctgtgccagcatgtgtgacgagatggtcacactgtggaggctggccgtgctggaccctgcactcagcccccagcggtgagtctcccctgaggctcaccacagaactgagcctgggccagctcaggacagactgagccttcatctccttgtttgcagagacataccatgattttagtcctcgggaaacgggaggtgctgagcactggtgttagcagtgatttacgagtcctttttctgagaggctttcatccttccttcccctaaataacacccacttttcaaaattctccagtgtttcagtgatgcttatggggctgggtcaagaagtactttcctgtatcctttccccatgcctctctttggggtgtacacctactccatgcccatcctttcccagtagcccctcagcagcctcctgccccttgttcccacaggcgccgggaactgtgtacgcagctgcggcagtggcaactgaaggtgattgagaacgtcaagcggggccaacacaagaagacgctggagcggctcttccccggcttccggccagcggtggaggcctgctacttcaactgggaagaggcctacccacttcctggtgtcacctacagcggcactgacaggaagctggcactgtgctgggcccgggccctgccctctcggccaggtgcctcccgctctgggggcctggaggaat

SEQ ID NO: 6277 - DNA, 1053 bp, Homo sapiens
gtggcccacagcagacacccaataaatgagagttgctgggatgtccgagggtccctgccccgcgcaggcttcgcccccacgttgacttcctcgctctcagcgccttttaggcctcctcgatctggctgtgcgggggagggagagcgggccttcccacggatcccttgccttctcttctagggatccttatttgagccacgttgtcctcctttctaatacttctgcccctcaccctgagacccgcctcgcccacccccgctccccagagctccctgtattccgcccttttattcacttgcctcactctctgtcgcctcctcctccctcctgggcattttacttatgctcactcctctggcactctcacacctttatgcagtcattcgtgaccacaagcccggtttttccttccgctcagccctgctgcccttcctttcattccctcctgtggacattttcacctggcgttacctgctgtcaaacggcctcctcccactggggcctttctagactcgggggccctccttggcccctcctcctggcaggaagcaagatggagctgttgggagaggcctgtggaatctgggatctgccgcccctgccggagagaaggctggggcatccgctccccatccacaactttcctggtggctctgcagacccctgtaacccacagctgtgactcataaccgaggtgattcctggaggaggtggagcccacgtctgaaatgggaaaaaagaggtgctgagaccagtctcccaagactcccctggctaatgtcacacttttctttcccaccctgggtgggtgactcagactggtcctgcttgtgaggaacaattttggaaaaagttcatactgctcccccactgagctgtgtaaatagtgtgtgtcagggcagttgggcggcaactgtgggtctgtctgggtggggcttgggttacttttctgatttgagcactttagtgcacttagaggctctttagcagctgaaagtcttcctcagtcttcaggggtccctggactgtctcaagcaatttaggagactggta

SEQ ID NO: 6278 - DNA, 1022 bp, Homo sapiens
gcttgggaggatggttagatgtagggaggaaggaaaatactctaggtgcaatgaatggcatgaccaagtcatgagggcctgtggggagaggggcacatggtgggggtggtaggaactaagcttaggtaggtaggttgggcaatagtgaaggtccttgaaagccaggcaaaggaatttagaattgggcaggagggaagctttgtagttgctgagcagtaggatgacaatatgaaagcatcttccagaagattcataaccaaatacagaaggaatagtaggtgctaatgttgtaacagagaataagctagatgtcaaactgaccagatttattttctgtcagtgtagatttgcttcagattgattccttattataggtgagaaatgtttatagcaaactattttatttgccttggaaaaattgtcattgctgtatacagtggaatttcattcttatttctgcaatggagcagaaatgaataaggaaggcaattcttggacctgatccaaggatgttcagaactgaatggatcaaaaagcatcacttctgaggtggtcttgtgatatgaacttgaaaagggcatggtgtacattatctgttggcaggcaaatgacagctttcatttcgaactggacagtgttgtcactttctgccttagtgctgctctgacagtctgcttgaagtcaaaacttggattggttcaccagcttggactatttttgaagcatactgtaatgtctaggcttattgaataaaagaatgttcccaaaataccatgtgaaaggatgtactactgctacatgattgccattattcacatttcttgggaattctttgttttaacccttaaactttattagttaagaacagttatggtatttacttatacaaatttaccataatttatattcatgcacaaagaagaaatttgagaaggattaaaatatgctttatacttaatttagatctcttttgacctaaagtaatgatgtcacatttttaggtcatcaggccttgtagcttt

SEQ ID NO: 6279 - DNA, 1066 bp, Homo sapiens
actttttttttttttttttcagactgagtctcactctgtcgcttaggctgaagtgcagtggcgtgatcttggctcaatgcaacctccgcctcccaggttcaagcaattctcctgcctcagcctcccaagtagctgggattacaggcgcttgtcaccatgcctggctaatttttgtattcttagtagagacagtgtttcaccatgatggccaggctggtctccaactcctgacctctagtgatccacttacctcggcctcccagagtgctgggtttacaggtgtgagccactgtgcctggcccccagcactttaggagtctgacatggatgaattgcttgagcccagaagttcacgaccagcctgtgcaacatggcaacactccatcgctacaaaaaataaacataattagctgggtatgatggtctgtgcctgtagtcccagctacttgagaggctgaggtgggaggtgaccaggaggtcgaggctgcagtgagccatgattataccactgcacctgccgcctgggcaacagaccgagaccctgtctcaaaaaaaaaaaagaaaaaaaaagcaagttaaattcacaatagtttatcgtttcacattgaccagattggcatattaaaagttcagacgatgaggatcaagtctgtatactgctggtagaagtattcaattgataaaaccattttggaaagcagtttgtcattccctggtaaagttgaatatatttattttctgtaatttagtatttccattactagatatataatctaaactctgttcatgtgtaccaggagccagaataaaaattttcacagcactattattcatattaacactaataacagaaacaagaacctagaacacctctaacatccagcagaggtagaatgggtaaatcaattttggtatatatatatatatttttttttttttttgagatggagtttcgcttttgttgcccaggctggagtgcaatggcacgatctcagctcaccgcaacctccgcctcccgggttcaagtaattctcctgcctcagcctcccgagtagctgggattaca

SEQ ID NO: 6280 - DNA, 1085 bp, Homo sapiens
tgggcctaattgaatagacatttctccataaaagatgtagaaatggacaacaagcacatgaaaagatgttcaccatcattgatcattaaggaattgcaaatcaaagccataatgagataccacttcacacctgctagggtggcttttatttaaaaaaaaaaaaagataagcattggtgaggatatggagaattaggagcccttatgtgaaatggcacagtgctggaaaatagttttgtggtttctcaaaaaatcaaacatggaattactatataaactagcaattcctcccctaggtatataactaagagaaatgagaacattatagcagcattattcataattgctaaaaggtgtagacagctcaaatgttcataagtagattaatgggtaaacaaactgtggcatatccatacaatggaatattattattcagccataaaaaaagaatgaagtattgatacaggctacaacttggatgaacctcaaaaacatgctaaatgaaaggagccagacgtagtgtatgaattcttttgtatgatgtttccacaataggcaaatccagtgagacagaaagcagattagcggttatcaggggacgggggaaggagaaaatagggagttattacttaatgagtattgcgtgttttactgagataatgaagagttttggcactagagagaggcagtggttgcacaacactgtgaatacactaaatgctactgaattgtacactttgaaatggttatttgtatgttacatgaatttcacctcaattgaaaagaaactatgtttggatccaattttggtttattattggtgaagatccaaaatttgaattggtgagaaggtaagaactgtttagtataacttctgcagattgcaatatggcaacatttgttaaaaattatacatatgcatacctttgactcagcaattttatatctagaatgtatcctacagacatacagggtaaaattacatgtattcaaggtgattcatcacagcaggctaataactattagcctgggctattatgtagctttataaaagtaggaggaggctctttatgtacttttctttct

SEQ ID NO: 6281 - DNA, 1026 bp, Homo sapiens
tgctcaaacccaggaggcggaggttgcagtgagccgagatcacgccgaaagtgttgggattacaggcgtgagccaccatgcccagacattatttttttcttctttatgtttgggggttggcaaatccaagctacatgttgagagaaatctcggatgataaacttgacatcttgggatcttctgctgggatcaggggcagcaggatacgccattcagagtattactgacagttttcatattgtcccattaggtttgtagtagatggagccagggtgagggccaggatgataactgatttagaaggatattagatattttgtgattgcaggtcatcagcatatgcaggttaaattagttacttaatcatgttgtgatggtgtctttgtaccttgagttttctttttctttttttatttttacaataaaggttgttaatgttggaactttattgtcaaacttgtagtgtttgttttgtatactcattttaggatcttaaaagcccaaaacatctaaagtgtagaacatcttttgtgaatattgttatacaacaagattaaattccaagcttactttctgatcttttatttttacagctatgaagatttttgtaacaactaaaaactcaaaaaaccaaggcatagaggaagctttaaaaaatcgcaattttactgtagaaaaaatgagtgctgaaattaatgagataattcgtgtgttacaactcacctcttgggatgaagatgcctgggccagcaaggtacgtgttcttagtggagaaataagcaaaatccccaactctccctggctgggggttttgattggcacctgtctcatactttatcttgtaatttttgtagcataagagtactcagatattgtgaaagtaatttcttcttcatttctgtttcataggttacttgctatctttgctaatttcctttgttctaaggtagaacaagtaaataggcatgtggggtagatactggtttaaggctgagatttatagcttttccatcaggctggagtctt

SEQ ID NO: 6282 - DNA, 1029 bp, Homo sapiens
gtagtcagttgagttttcagggctaggattaggcacttggggatacaagtgaaatagacctggtactcaccgtgtacagtcttgtagctgctcccagttttatgctgaggaaaaccaatttgttaggatgctacaaaactaacttcatctgaaatgaaagaaggtaaattaaattagctcaactcaagtacacgatgacatcagaatgaacaagagatgtttatgttttaatctactgaccataagaatgaaaaagagatgcttattttttaacctaatgacatcagaataaaaaaagaggtttatttttaacctaattttgcttttgttttacatttatgtggttcaaatatcaaagtgctgcaaaaagatatacctgataagtcttcctcctaacctggttcccatccactctaccgctcctcaccctctaagagtaatcatttctattggttatcaaaatagaaaaaaattttaccctgaaaatagaaattggtagctaggattttggctctttttcagttttgtagcattacgcatctttcattgctccactgtaagcagtgaattaatcagaccttttgtctgactgtgactgctgggttcccattctgtttaatgcatacagtgtctttcacctcttctcgcccctaccaataaataattaactttgtcttaccatacttgtttcatgcctccccattggtgcagtattcttctggaaagtgatgattcctctagaaaagtgggggaagaaagtaagtggaaaaaattcttggtaaaagtgcgtcttgccgaataagttaagattttaaagaggcaatgcaataactgattattttaccttttatacctatattcaaattgcacatttacaaatttaaaagtaactttgactttaaacacttcacttattttaaaagtaaaaagtttccttttcttaaatcaacaatcattttatagtgatcattaaaaattaggttagcatttttttctgaaaatacattatttattaaaagaatttgagtt

SEQ ID NO: 6283 - DNA, 1045 bp, Homo sapiens
gatcctcttgtccaactttttaacttgtccaacttttacacaatttttcataagctacaaacatgtctaacactctttaaaagctcccataaaacatggaacataaaatacaatttcaatatgaaactgagattcctaaaaaggaggaacaggaatctaggcttataacaccaattatagataaaatgaggactctggagacagatttggacttgagacctctgtgagtttttttttttttccgagacggagtcttgctctgttgcccaggctggagtgcagtggcatgatcttggctcactgcaacctccgcctccggggttcaagcgattctcttgcctcagcctccccagtagctaagattacaggcgtccaccaccatacccggctagttttttgtatttttattagagatggggtttcaccatattggccaggctggtctcaaactcctgacctcaagtgatccacccgcctcggtctcccaaagtgctgggattatgggtatgagccactgcacccggccgactcctctgtgctcttgatgcttagtctctcatctgtaaaatggagctaactccttcctaatggactctatttggattaagaatatgcatgtacagcctgtatcttaccagatacgtggcaaatgttaatccttttttccccaaatgctgtaactgactggccaggacctcttgagcagtcacttaaattttctgagacttggtttttgcatctctaaagtagagatattaactgtcctgtctcatggggttgttgtgaggattttttcttcatattattcataaatcagttttgagtacttttcggtatccttcttaatggtgatttttaagatggaagagttgacatcaagtgtttaaacatatgccagttttgtgtatgttcttctgaagtatcaagtggacactcatttactttgtcactttattaccttcttaaaatcaggctgtgatggtaaaaccttcctgtgaagggcccattctggggagctgtttattgagaccaaacctcatgtatt

SEQ ID NO: 6284 - DNA, 1049 bp, Homo sapiens
acctgcttctgttgagattgaagcaggtggtccttgtggctcagtgtgggtggtcttatgtggagtcaatatgggtgggttttctagggatgctttttagaagaaaggaaagaattccaggggggagtagttttaggactttacttacaacttgttttctcttttttagctaacagatgagcttgctcctcccaaaccacctctgcctgaaggtgaggtccctccacctaggcctccaccaccagaggaaaaggatgaagagttccctgagcagaaggccggggaggtgattaaccagccaatgatgatggctgccagacagctccatgatgaagctcgcaaatggtccagcaaggtaagtagtgaagcttttcttgttgagaaaggatgtcttctcggaaaggatgaaggaccatgaaagacccagaaagaagagtctatttggagtcaccctctctctctcctttggttcctgtgttgccaatagcatattcctcttcttacctgtgctttagtgagatgtttctgacacctgatggtttctccttcaagcttgcaaaagccagagtcagggtgcctgtgatttgagaagaggattcctgtcctttgtccattagagtgccaggtgccttgaccttagcatttggggtcttttagaaattgcttatctttcttggaactgcaaatgtttttagatgctacattgctaatgatcagagctccaaatatgaattgtgtgggctgtgctaaagctagatgaaatgtttgcattttctttttttttccacagaagcaagtagattggtatcttagaagccatgtgcttttgtcctttctcagaatcatttcacctgtcaactcaagacagctccaggctgtctcttactcagcaaatctgaaggtgtaaatattaatgtggttggtaaaaatatggatgctacagcagtcttgccctatgaataacttttgcctattttcccctaaatgatgaaaagtgagcagtagcttttctagataagaggaatattattgctaaccctgcagtgaaa

SEQ ID NO: 6285 - DNA, 1040 bp, Homo sapiens
ccctgggatccctggggaaagagcagtccaggtacaggaaacagcaagtcctgagggagaagcatgtttgaagaccaagaaagaggacatgctgtaagctatctgaagccacagtatacaatcagcgatggccagttttgggttctttttggtgatctgggaaaacccctagtgatgcaagcaaatatgggggatgccaggtaccagtggggttagctgcatcccactcctggctgaaacctattttagagacaggcctgcatcagggaccctgggtaacggaaagtacctttttccttgcaggccacagagatgctggttcacaatgcccagaacctcatgcagtctgtgaaggagactgtgcgggaagctgaagctgcttcaatcaaaattcgaacagatgctggatttacactgcgctgggttagaaagactccctggtaccagtaggcacctggctgagcctggctggcacagaaacctctactaaaaagaaggaaaatgatctgagtcccaggagctgcccagagttgctgggagctgaaaaatcacatcctggcctggcacatcagaaaggaatgggggcctcttcaaattagaagacatttatactcttttttcatggacactttgaaatgtgtttctgtataaagcctgtattctcaaacacagttacacttgtgcaccctctatcccaataggcagactgggtttctagcccatggacttcacataagctcagaatccaagtgaacactagccagacactctgctctgcccttgttccctaggggacacttccctctgtttctctttccttggctcccattcactcttccagaatcccaagacccagggcccaggcaaatcagttactaagaagaaaattgctgtgcctcccaaaattgttttgagctttccatgttgctgccaaccataccttccttccctgggctgtgctacctgggtccttttcagaagtgagctttgctgctacaggggaaggtggcctctgtggagccccagcatatgggggcctg

SEQ ID NO: 6286 - DNA, 1023 bp, Homo sapiens
cccatgaacacactgtgtcctggtgctctctgccactggaagggcagagtagccagggtgtggccctgccatcttcccagcagggccactcccggcactccatgcttagtcactgcctgcagaggtctgtgctgaggccttatcattcattcttagctcttaattgttcattttgagctgaaatgctgcattttaattttaaccaaaacatgtctcctatcctggtttttgtagccttcctccacatcctttctaaacaagattttaaagacatgtaggtgtttgttcatctgtaactctaaaagatcctttttaaattcagtcctaagaaagaggagtgcttgtcccctaagagtgtttaatggcaaggcagccctgtctgaaggacacttcctgcctaagggagagtggtatttgcagactagaattctagtgctgctgaagatgaatcaatgggaaatactactcctgtaattcctacctccctgcaaccaactacaaccaagctctctgcatctactcccaagtatggggttcaagagagtaatgggtttcatatttcttatcaccacagtaagttcctactaggcaaaatgagagggcagtgtttcctttttggtacttattactgctaagtatttcccagcacatgaaaccttattttttcccaaagccagaaccagatgagtaaaggagtaagaaccttgcctgaacatccttccttcccacccatcgctgtgtgttagttcccaacatcgaatgtgtacaacttaagttggtcctttacactcaggctttcactatttcctttataatgaggatgattattttcaaggccctcagcatatttgtatagttgcttgcctgatataaatgcaatattaatgcctttaaagtatgaatctatgccaaagatcacttgttgttttactaaagaaagattacttagaggaaataagaaaaatcatgtttgctctcccggttcttccagtggtttgagacactggtttacactttatgccg

SEQ ID NO: 6287 - DNA, 1028 bp, Homo sapiens
ttttcttttactactttaatttgcttaaaagcacaaatgcttgtgcttgcagtaacttcctaaaagcagaagtaatgttcccttttactaccttaataaagcatttgcccctttgatacaaatgatttttttactgtgctaacagctgaaccagtggcacaaaattgagatggtatttactgcagcaaggtccctgtaaatcaaattctaagctttacataaaaatcttatttataaaaaatacaataccaagtacagtgagaatggagcatggagcagcagtgctccctgccagggccatgtggaagtggcttttgctacagtgcttgcttaatggcacaagtgaaaagctgaataaggcaaacacttgaagaggcagttttctgtaaacttctgggggtggggggaatttcctctcgggacagatactggtttgggatggctaagatcagaaggtgtgatatttggctgcacctgacacatcacagatttaagatagcttctgctggatgagaccagttaactcttttaggagagaggttatcactacagctttctgcctttactgttacaatgtgcagccgccagatggtatcctcctatggaaaaaaatcacctccaaaatcttcctaagtgaaaagatacaaaataagctaagtcactaaaaggtttccttagcttaaagctccttaagaatcctacattgataactaagtaactttgttagcggtgtgtagctagacacaaatgctttaactagaatatgtattcccactcacttggtacctaatagtgatacatcgtaatgacacttggaaaacaaactggtcctgaggaattttggcctcttctcatgtcctcacttggaactttccagctttcgtgacgtatttgactcctttaaatggcttatatttctccccatacatgtccaaacggtttacttttaagcctgtatcaaaaagaatgaaaaagaataaattatcatcatcccaaccaatataatgttagcaatgagcgctatatgg

SEQ ID NO: 6288 - DNA, 1032 bp, Homo sapiens
ctccttctcgcgggtggtctggagcctgcctccgcctctggtccccctcgtgttgggggttccctccgcacttttcatttgggcatttctgctttcctcagaagttttcgggtctgtggcacattgcggagttctgtgtgtcgctgcttggtcgaggtgaccctcgcccaaattccagggttgcaagcgttcttgggtgtgtagtggatttcccatgaaaaatgtgccccacccgcgcccccgggggcggcccagggccggagggagcgtggcgtgcacagtgtgtgtcatgcctgcgtgtcatgccctctgacagaacttcattgttggccgggagcagacctgcaaagttggcccttctctgatgcaggtatattgccctcaagttgtgaaattgtgtgtctctaaaatgtttgctcatgactggaattaggaccctggttcccgaaggtaccatcttgtttctttactccttttatctcagagtcacaagtgaaatgagttgagagatactgggcatgtagcgaaatccatgaaactggagactttcccccaattgctcttccagtttggaaggttctttttttgttaatgaggacaggataatgggcttgtccactttctcccagtagccttgactgaatgtttaatttacgctagttcaactatttataaaaagagataaattgccttatatacccagtgttctgactggcctttttaaaagcagaacttgggctttgttgtcccagagaaagggaggccccagcacaaaaatgtgaagagaaataaaataagctcatttttggtctatgagctttccaggctccacccgtcctggtgatttgagggcttctcaatgccaatttttactacattgtgtttaagagacagcttgggaacctaaccctcagtaagatctaactgtgctgaactcggacatagtctgtctcttaaattgcataattatatatatatatatatatatatttttttttttttgagacagagtttcgctcttgttgcccaggc

SEQ ID NO: 6289 - DNA, 1057 bp, Homo sapiens
ataggcctgggcacactgttttcatcttccagggtcttaggaatttcagaacttttcaaaactccctatggacatctcattctcctacttttccttttgtgttttttggttagcttgtttgccccagctgcttcagggagctgaaatgttaagcaattgtagctgattgtttttgacaaataaataccttgggggaaaagcctgttagcaatgggcaagctctgaatcaggttaaatattaggaagtcttgggagtggggtttttcagggaattgctagtcagctcaaataataactgtactctgaaaatgggactttgaaggaactctagccctgttctgtcacctccactggctgctaggctccaggattccacagattgtggtttgctgcttttcagggctagcctggagctgggaagaggggcatgggaataaggcatgttaaaatgccacaaagcttgctattcttactgagatgcagccatctttttttgaataaatgctccttggattgttgcaaactttttggttaatattcagagttctgaaaaaggctatttttgactttttttttttttttttgagatgcagtcttgcattgtcgcccaggctgaagtgcaatggtgtaattttggctcactgcaacctctgcctcccaggttcaaacgattcccctgcttcagcctctggagtatctgggattataggcacctgccaccatgcccagctaatttttgtatttttagtagcgacggggtttcaccaggttggccaggctggtctcgaactcctgaccttgtgatctgcccgccttggccttccaaagtgctgggattacaggtgtgagccactatgcccggcccaagtcttgacatttttttgccagtgttcttgttggttttatggaagagaggatttttggaggtccttactctgccattcccaatgatgtcacccaatttgttttttaagcattaaaaaaaattattttaaaatataaagacagggtctcactatgtcaattaaaaagacagggtctcgcccaggctggtctc

SEQ ID NO: 6290 - DNA, 1034 bp, Homo sapiens
gaatggggttagcacacttgtgaaaggactcaaggttgaagggagagctctcctgcctttacattccttctgtcatgtgaggacacagtgttcctcccctctggaggatgcagcaacaaggttccatgttagaagcagagaaaagcctcgccagacaccaatcttgctggtgccttaaccgtggatttcccagcctccaggaatgtgagaaatatatttctattgtttacaaattaccccaaacaaaataagaaaaataaaacaacaacaaaacataagtaagtaaataaataaatagcctggtctgtggtatttttgttatagcagcacaaggggaccaagacatataccaaatgaatgagatatatactgattagtatcttacactgtgaaagtgagttctaattgtcaaaattcatttgataaaatatttttctgattctgatttttttttttttagagacaagtttttctgtttcccagactggagtgcagtagcacaatcatagcctagtcactcactgcagcctcaaactcctgtccctcccaccaaaaaaagaattgaaagttattaggaacacctgtggcagaaagtacattattgaaaagaatcttttctagtaaactgtagggacacagtgggcatgaggggataggaaatgtggaacatatgaatacctccagttgagccctggtctgtaattatggaggtatgtattaatagggatgaaaaaggcagggaaggaatgtgtaaggtaggtttgccttggtttttcctgacactagataaatatgaaagtaagaggaatgagagaatgaatgaaatggtaattgagaaaggaaaaccatcagtagaaatgaaaatactcagttttggctgggcgcggtggctcacacctgtaatcccagcactttgggaggccgaggtgaacggatcacctgaggtcaggagttagagaccagcctggctaacaaggtgaaaccccatctctattgaaaataaaaaattagctgggtgtggtggcacacgcctg

SEQ ID NO: 6291 - DNA, 1050 bp, Homo sapiens
accttcaagggtattaggacgtgctcaggatatgatctttggtgcagtgtaaaaatgtaatttcttagtgaataggtcaatttccaaaccagcaggaaagttataagtatttaaatggaatgtgtagggatatgtcagggaagttagagacaataacatctggtatgctttttttttttttttttttttggtgagatggagtctcgctctgtcgcccaggctggagtgcagtggcgtgatctcggctcactgcaagctccgcctcctgggttcacgccattctcctgcctcagcctccagagtagctgggactacaggcgcccaccaccacgcccggctaattttttgtattcctagtagagaaagggttttgccgtgttagccaggatggtcttgatctcctgacctcgtgatctgcccgtcttggcctcccaaagtgctgggattacgggcgtgagccaccgcgcccggtctggtatgctcttaaattaattgttaatgctgtgacttagcagttctttgaaatcatcaagatcatagactgggcttgtgcctataatcccagcactttgggaggctgaggcaggaggattgcttgagtctacgagttggagaccagcctggacaatatagtgagactcttgtctctacaaaaagttaacaaaagtagccggatgtggtggtgcctgcctgtagtcccagctacttgggagactgaggtgggaggattgcttgagaccaggaggtccaggctgcagtgagctatgatccgtgccactgtgctccagcctgggtgacagaatgagaccctgttaaaagaatcttttttttttttttttttggtaagaatgagctaagaactggatatctgtaaagctaatagaaaaaaatcctgtgaagcaaaaagtcaaaattgaaataagctaggaccgacagcaaggttaaatgcttatttttttttagtgttcataaataaggtacagttttaaaaatatcataaacatttttatgatcctattctcagggcccggttttttttgtatctttaaa

SEQ ID NO: 6292 - DNA, 1047 bp, Homo sapiens
ccactttagctagtgcttttttttttttttttttttttttaagacggagtctcgctctgttccaggctggagtgtagtggtgcgatctcagctcactgcaacctccaccttccagtttcaaatgatacttatgcctcagcctcctgagtagctgggattacaggggccagccaccatgcccagctaattttttcatatttttagtagagagtactttttaactgagaagagatgctgtaaagttttaggaaatcacagtggggacagtagtcatacttctactttcttctgaatataatattgtttcttttttctcctgcagttacttattttttttttctttttgctttaaggcttggtagttctgagaattttagattcagttataatcgaatgtaactatcaacacatgttatggagtagtataaattgttacttgatgtttggagttgttttactcagtcactcagcaaaggtaagattagatctccgttagatgaaaagtattatctcttatgcaaagagacattggttagctctggatgaagacaatggctatggggtcagtcaaccttgtagaaagaataggctaggcacagtggctcatgcctgtaatcccaccactttggggtggtcgaagccagtggatcacttgagcccagcagttcgagaccaaactcggcaacatagtgagagccccctctctacaaaaaatttgaaaattagccagggcatggtggtgtgtacctctggtactagctatcaggaggctgaggtgggaggatctcttgacctggggaggttgagtctgcatgcagtgagccatgattgcgccactggactccagcctgggtgagaaagtgagaccttgtctcaaaaaaaaaaaaaaaaaaaaaaaaaagacacaataaaagtaaaattgtataatctctggaaaaaacaaaataggctgtcatgttctaatactcaatatgtaaggatgtttagtatattagtgggtataattattaataaaatattctatttagttatctttgaaccagtttg

SEQ ID NO: 6293 - DNA, 1197 bp, Homo sapiens
gtggtgcacacttgtggtcccagctacttgggactctgaggcacggaaatcgcttgaacccaggagtcagaggttgcagtgagccatcacgccacactgcattccagcctgagtgagattacgtctcaaaaaaaattttttttaaacataaataaagaccacactatcttttttgaagattatgttcacatttcattctctccattgaactgtatagatgtattacctgtatataaagaatgtaaatttttttgtattaaaaatcgacaccttaaaaaaaaactaataccaccacaaggttaagctctgaggagatttcagctttacaataattacattgttacaataatgtttaacttctcaataattaaaaaccaaagcaatgttgcaaccttggttcaatattcaaatatatttttcttggtaaccaagctacttcactatttatagtactttataaatgatttagaattgttatgcagttttttcaaagaagtattcataaggtaaatttagaaaattattttaaaacgaaagtgatgcccaccagatggtgctatttcgcctgttttatctgcgacaataagtaggaaaaatgaatatagaacttcaaaaaagtgtatggaagatctagaatatttgggcattgtattttgggtgtagatgagctcagtggaaggaagcattcaaatattctaaacttgtgtttagtactgtatgtttatcttgataaaggtaaagatgaattcccagagttaatatgccagataaccttttatttagtctaaatgttaagtagattttttgaaaagttgacctatatgcaaattttattaacttcatagctgtatatgcatgaaaaatgaaattatttattagatatgtgttaccaaaatttgtttcaagatttctttatattgttaagtaaacaatattactatctcatttgagttacattgtgatttacaaattaagggaaacattttgatttttttatgtgtttgtaattattacccagaaacttaggcttgaattcactatttttacaaaggaaagagatgactcttctaaattaatttttgtattaggaagagggcaaactatgtggtacagtgttcacttagatgcagccattgaatgacgatccattagagtcaaaatggttagttagctaatgaaatacacttttcagtaaag

SEQ ID NO: 6294 - DNA, 1060 bp, Homo sapiens
ttgttgcaaaacataaacatttactaaagagttcagcagagtagattaaatgttatttaaaacatatgttatattgacctcatggctaaatggcctggtttaggaatccatgaattatcccacaggtaatagcaaagttttctccctgcctcgtctcccaccccaaatatttgatttccacatatactgcacaggggaattgaatttgatgtcgaaagccataagaaaaagagaaactttgctttttactgcttttactaggaaatagaaaacatttttagtgacaggctatgcttcatcatgaaaatacggttgggtgttttaggccttcacaaatttgatttcattgtacttagtgatggatgttagtaagctgtgtgagatggagagaaattaaagaataaacaggaacctctcaaacttgctagtgatgttctacagtttgtagcatgaattttcttacttttagtttttccttatgaaatactttatgtagaacaaactagcagtactaaaacaaacacccatgtacccaatctgtcaacacttagatttgttgaagatttgggtgggcagagtcttccacccaaatggtaaaaggggaatacattacaagtacatctggggttctctgtatacctgtcttcagcccattttctgtcttatttcaaagttcactggtgttccagttttgtttttagctgtaatgcttttcttagtgcttaaaatatatgtgtatatattcataagcaatatgaagtattgatttgcgtgttctaaaacatattttacagtgcctctccttcggctcgctttttcgtgtaacattgaatttttagatttttccctgttaatgcacgtaatttatatgtaatttattttcacctgtatagacttgtatgaatacatcacaatttattctttggttgaggaattacaggtttttcagtattagaaacactactgtgtttaaggttcttgtactgatctgtttatgcatatgtgaaagattcttgaggactgtattttaaatatgtggatgtttaaatttcaattaatt

SEQ ID NO: 6295 - DNA, 1093 bp, Homo sapiens
cgactttttactctcccaaaacttaactattaataatctactgtgtaccagaagtcctaccagtaacatagtctataaacacatattttgtatatgtattaaacactgtattcttacaataaagctagagaaaacaaagtgttattaagaaaatcatggccgggcgtggtagctcacacctgtaatcccagcactttgggaggccgaggtgggtggatcacctgaggtcaggagtttgaggccagcctggccaacatggtaaaaccctgtctctactaaaaatacaaaaattagctcgtggtggtggcaggcgcctgtaattccagctactcaggaggctgaggcgggagaatcgcttgaacctgggaggcagaggttgcagtgagcctgaaattgcgccattgcagctccagcctgggcgacaagagcaagactctgtcttaaaaaaaaagtcataagagaaaacctgtttattattcattgagtggaagtggatcatcataaagatctttatccttgtcatcttcatattgagtaggctaaggaggaggaggggttgctttttaagagggggcagaggtgattagtaggagaaaaattttaatgtgtgtatatatatatatatacacacacacattatatatatataattttttgtagagacagggtcttactttgttgcccaggctggtcttgaactcctgggctcaagtgatcagcctgcctcctaaagtgctgggattaccagcatgagacaccgtacctgactggaggaactacgtttttgatatggtactcagagaactgagtgcagtacagaagcttatacacccccttttttttatagggaagtggggaaatggagaatgtagacagttcttttgagggccagtaaatcatttaggtgggaggcagacattgtgggaaggtgagaggtgaagctgcaggttgtcttaccatgcagatgaaggccccctgggtaatctgttggagctgccctgggaagaatagatgaagtctttctgggcagtaatgatcatgacttccagcttcttctcatgtagtcgacctttcctgatcatttgatgagatc

SEQ ID NO: 6296 - DNA, 1618 bp, Homo sapiens
tgtattgcagctgatttggagaatgagtggctactttgaaaattgtcagtagataggaaataaaaataacagaatgaagcagctcacacacttcagagtttattctcaatattgttgaattgggccataatgaagcataatgcctggttaaactttattgcaattcaaacatcccaccagaaagaaatttttaaaaactatatcaacaaataaattcactgaagtctgtctatagcttcttctaggaactacaatttatttatttgtttattttaatattgttttttgtagagacaaggtctcactttgttgcccaggctggtcttgaactcctgggctcaagtgatcagcccgcctctgaaagtgctgggattacaggcatgagccaccgtacctggctgaaggaactacatttttgatatggtactctgctttaaacgcagtaggtactctgctgaattgggctaaataaacatttcacctctcaaaactatgtgaatatttggcttaagcaaagatagcctgggaccatgaagaaagctaaaacacttaaaaaaaatgtacccttatttaaaaagtagcatgtttctttctgatttggagtgttatgtttttgttgaaaaattggaaattacataaaaccaaaatgaaaaatatagagatgatcagtaatttcaccatgaatataatactcctcttatcattttgtattcccttccaactaatttttctcttaaaagtggcactatgtttttgaaaaagctgactactttaagaaaatttctctcagtttactttcttaatcgtgtgcttttctgaagagttggctctgacgttgactactatagtaaatccaattttgatgagtttttcttttttagtgggccaaaaaaaaaaaaaggaaagaaaattctcctttgtagaaaaaggagggaggatggaatgtatattgtagtacacctgaaaatccataccttttcttagccatatacacaattagtttactctttctcaagataatatttttatagtaaattaggattctttgttacaagtgatgggaaaccaaactagtgctatgctaggttaaaaaaaggaatttagggactcaagtcactaaactactcacgcgcacacacacacacacacacacactcacacacactcacataggggttcaattgggccttaggaatggctaaatctaaggtctcaaaagctgtcagtttttttccttcggttcgttctttgtctctgagagttagcttcactttgtcagcctgcttctttatactcttcctgtttttcactctgacttactgtgtttataattatcttgggttagtttttcttattgctcatttggaaaaactatcagtacttctgattagtaatttcagatgtttttatattttaattttgtatgcaaaataagtatccgtgatattttaaaaatatttactaagtatttccctagtctttctctaaagggtaatctcaaatgaaacaactggaactggattctcatttgtttaatgactgaagaagtcttccaattactctacaaaccattgataacttttgttatttgtgaccagtattcatctagtaagatgtt

SEQ ID NO: 6297 - DNA, 1023 bp, Homo sapiens
taagagttcatcaattttattagcgtttcaaagaactaactttggctttgttggttctctgtagatcatgatgtatgttttctatttccacgtatttagctccttttttttttttttttactttctttgggtttcatttgcagtttttttccttaccctaaccctacagttgtttttaaaaaaagattcttgagatggatacaggaccatataaaaaattttttttatgcatggcaagaagtttgcataaagtcagaagacaaattacaaacttgtaaaaaaattatttaataccaattacatcaaagtccaaggcctacttctttaatatgtagtgagtttctaaaagtcaataagaaggaaataattatgtattaaaaatgagcaatgtttgtgaagagttgatgtgtagaaaagttaatattaatggcagtaaaacatatgaaaggatgttcatcgtctcatgaggaattcaaaataaaccttctattattaaattggcaagtattttaaaaatcagtaataagtagtatgggcaaagttatagagaataggcgctttcataagctatcataaggatataaattgctacaacctctttgaaggagaagtttacattatttatcaaaattttaagtattcttttttttttttttctttttttttgagatggagtcttgctctgtcacccaggctggagtgcagtggcgccatcttggctcactgcaagccccgcctcccaggttcacaccattcgcctgcctcagcctccggagtagctgggactagaggctcccgtcaccacgctgggctaatttttttttgtatttttagtagagacggggtttctccgtgttagccaggatggtcttgatctcctgacctcattaaccgcccctctcggcctcccaaagtgctgggattacaggcgtgagtcatcgcgcccggcccttaagtattctttaattcacgaactatgtgtataaagatgtttatttccatattacctataaaagccaaaaa

SEQ ID NO: 6298 - DNA, 1039 bp, Homo sapiens
taaaacctttttaaaaacttgatttttaacatttgagatatttatggagtcttctccatgaaagggagaattttgcatgcaatagtgtatgatgggcacttttaacttttttatggctttctttttcaaagtcatacaccactttacttttcttttaacctaattccatctttcttctgttttttttgggggggagaggttggaacatctccttagtaattttttccacataggaaaaaggattattaaatattactttgccttattaacctgataatttgagtacatattgaaaatttctagtttcaaaaatttcctcccttctcagcatagaatacattactccattatatttttagcatccggtattctttgagaagttaagtattagtctgatttttattccttttaaggtaattattatttttcacattatatgctttaaaggttttatcttaatatgagagattaaacaagatgtgtccaagtatggggtcctagtccctaatcccttgtaaaactgcttgatgtttggaaaaatctgaccatatttatgtttcaccttttttttttccaacatttctctcttactcttcataatctctattttccctttctgtatttcctgttaaacagatctcagaccacctaataaattctctacaccttttaatttttatttcatatttttaatttcttatattttctatctacttttttggtctttttaaaaatttcaacttttctatttttatcttagtttttacccatgcatattttgattgctcaggtaatccatccaactattgatttttcaaaaatttttcaataattgttagtgtacagaaactgtgtcattctctagctgcatcttttcatataattagataggtctgtttgtggcatctttctttccttgctttacaggcagtactgttatacttttgtttatttttatacataaaacatattttttgacgtttagtaagatgtggaagaggaaatgaacatatacttcatctcttttgaagtgtaaggt

SEQ ID NO: 6299 - DNA, 1068 bp, Homo sapiens
ctcactctgtcacccaggctggagtgcagtggtatgatctcagctcactgcaacctccacctcccgggttcaagcgattctcatgcctcagccacccaagtagctgggattacaggtgtgcaccaccttgctcaggcaatttttgtatttttagtagagacggggtttcaccatgttgcccaggctggtcttgaactcctgacctcaagtgatctgcctgcctcggcctcccgaagtgctgggattataagcatgagccaacttgtccagccacatattttgaatttttgatgttacaacttacaacttttaaaactgcatatcccactatcaattgttgtagttataattatttttaatagttttatctttaatcttcatattaaagatataagaggtttacatactatgcttacaataggccgaatagccacttcccactcattttttccaccatagaaaacttgcatccaggggacttctgcatatgtgggcttaggggaagggtgttgcagtcaaagcaccatttcccttactgtctgatatggtttggctctgtgtccccacccaaacctcatctctagttgtaatccccataatccccacatgttgagggagggatctggtgggaggtgattggatcatgggggtggtttcccccatgctgttctcatgatagtgagtaagttcttacaaatctgatggttttataagtgtttggcagttcctccttcactctctgtctttttctcctgccaccatgtgaagaaggtctttacttcccctttgcgttccagcgtgattgtaagttttccaaggcctccccagtcatacagaactgtgagtcagttaaacctcttttctttataaattactcagtcttggatatttctttatagcagcgtgaaaatggactaatacactgttctcagatttttctcagctctgtggtacaatgagacaccatcctgagttccaagagatccagggtagtcgtcttgccactgagaagatactaattgtgacaagttaatgggtgcagcacaccagcatggcacatgtatacat

SEQ ID NO: 6300 - DNA, 1315 bp, Homo sapiens
gttttcagagtataaattttacactgtaaagaaaacttattcccaaatattattttctttttgatgctattgtaagtggaattcttttcttaattttatgttcagattattcattgcagatggcttagagatacaattgtgtgtggtttttgttgttttgtttttgagacaggctcatgctctgttgcccaggctgaagtgcagtggcacaaacatggctcactgcagccacaatctcctaggcccacctgattctcctccctcagcctcccaagtagctgagaccactagacatgcaccaccatgcctggctaatttttaattttttttgtagagacagagtcttgccatgttgcccaggctggtctcgaactcttgggctcaagcaatcctctggccttagcctcccaaagttttgggattataggcatgagccgctgtgcctagctcagtttgtgtgtgtgtgtgtgtgtgtgtgtgtgtgtgtgtgttttaatattgatcttgtatcctacagcctttctgaacttacttagctctaatattttttagtgggttctttatgattttctataaacaaaaccatgtcatctgtgactatagttgtgtttccttctttctttctaatttggaagcctttaactattttcccccttccttaattgctgtgactagtagttgtaatgtaacagtgaacagaagtggcaagaagagatgtccctagtcttgtttctcatatagggggaaaatatctaatcattcaccattaagtttgatgtttctctgcagttttcttagatgccctttatcagattgaggaagttactttctatttctgtttttttttagcgtttttatcttgaaacagtacagttgacccttgcacaacatggcgattgtgggtgctgacccactgcatagtctaaaatccatgtataacttttgattctcccaaaacttgtcaattaatagcctactgttaaccagaagccttaccagtaacataaagtcaattaccacatattttatatatgtatcatataaagaatatattattaagaaaatcatgagagaaaatgtatgtactatttattaagtggaaatgtttcgtgagaaaagtcatcattgtcttcatgttgggttggctgaggaggcagaggaggaactggttttgctgtcttaagggtggcagaggtggaagaaaatactggtgtaagtggatttgtgaagttcaaaccagtgttgttctggagtcaattgtagtggattttgccaaatgctttttgtttgtttgttttttgagacggagtttcgc

SEQ ID NO: 6301 - DNA, 1035 bp, Homo sapiens
gggttgataggtgcaccaaaccaccatggcacatgtataccaacgtaacaaacctgcacgttctgcacatatatcccagaacttaaagttaaaaaaaaaaaaaaaaagccaggcgcagtggctcacgcctgtaatcccagcactttgggaggctgaggcaggtggatcacaaggtcaggagatcgagaccatcctggctaaaatggtgaaaccctgtttctactaaaaatacaaaaaattagccaggcgtggtggcgggcatctgtagtcccagctacttgggaggctgaggcaggagaatggcatgaacacaggaggtggagcttgcagtgagctgagattgcgccactgcactccagctctggcgacagagcgagactctgtttcaaagaaaaaaaaacttcagtttacttgattttgcttatagagttctttgagaatttaaatcatcctttctgaattacagaaagtcatagattagaagtgtagctttaaaatgctctagatcactctgaattaagaaaaagggtttcctttgtccagaataagcatcaatttaaaacagcatttaaaaacaagtattcaacaaattggtatacgaattataacacaagcaactaaatcactgactttgattagtctctctactgattactactgttgaacagaagttgtgtgtaagaataggagaaggtgaactcattgtcttgagcatgtggaattagttcttgtctgaggccagatagcaatttttatcttattttcagtatagcagatcctatgctgccctgataagaatcacctgcacagcctcattgactctcacggaagtattccagtaactctttgaattttttcctagaaaaattggcatctgttacccctacacaattccttcataaacagtagaaatttcccccatgaaacctttcctttaaccttaacattcttcgataattatttatgaagtccttaaataattattacaacaagtattggttttgaatacgtaccagctttggaatactgcttaag

SEQ ID NO: 6302 - DNA, 1029 bp, Homo sapiens
gaaagtctttatttctccttcagttttgaaggataattgtgctgagcacagtaatcttggttgacagtttcttctccaccagcattccaaatatattcttccacattttcctggcttataaggtttctgctgataagtctgctaccaggcatattggatcttccttgcatgttatttacttctttcctttcagtgatttcagaagtttttctttgtgcctttgacctttgtgagtttgattataatgtgtcctagagtagtcttctttgtgtttaatctaattagtgatctttgaccttagtctacctgaatatttatatcttttttcaggtatggaaagttttctgttatcatttccttgtataagttttctacccctttgtctttctcagtccttctttgacttcagtaacctgaatatttgcccttttgatgttgtcccatagattttgtaagcttgcttgcttccttttctttttttttctcttctcaccatatttttaatcatttttctttgaactcactgattcttttatttggttaattctgcttctgttgctctctattgagattttcgcttcattaattttttttttttagttgcaggatttctggttttttaaaaaagttatttgagtctcttatatttctttcataattttctgaattgattcttcatgttttctttaagttctttgagctgtcttcaaacaggtattttgaatttttggagagatcacatatctcggtcactttcaggttagtctgtggtaccttattttgttcttttggtgtgatgtatttccctaaatgttctcaatgctttagaagtgtgatgatgtctgagcattgagggatttgtaatttattttagtcttcccagcctggctttgtttgtgcctgtccttcttcaagaggccttccagggattctaaagctgacttactattgcattctctgagcctctgaccaattacagccatctcagcactagagtatgctttaagcccaggttttctgagtcctgca

SEQ ID NO: 6303 - DNA, 1034 bp, Homo sapiens
aaccgtaaggtcactctttacccaatcagctcatttgcatgtttcacgtctcagtttaaatgtccttttgtctatttaaaatatattttagctgagtgcctttaatcccagctacttgggaggctgaggcaggaggataacttgaggccaggagatagagaccagcctgggcaacatagagagacctggtctctgaaaaattgaagaattagctgggtttgatggcttgcacatgtagttctagctacacaggaggctgaggcagggaggatcacttgagcccaagagttcaaggttacagtgagctatgattgtaccactgcactccagtctgagtgacagagtgagactccatctctaaaaaaataaataattggttccttctttgcctgcctcccactctttgtctttctcaaacatttttttcttcatagcatttcttacaattatgcattttatttctgtgtaatgtttttgtttgctatgctttgcattttatattgtgtggaatctccatgaaaataaggaccagcctgacttgttcaagtttgtggtcaagtaacaggatggtacctggcccttagaactatctttataaatatcattagattggattgactgactcaattaatgaacaaatgaacaaacaaaataaatcattatatgctgaagtagcagtcctggacattgtatctaatttagattttaatttaaccttgttattttgatactcgcttcccttaatcagtcattgcatgttccttattgtaaggtggttgtttttctttatcatgagaagaatagttcttctccgggcgcagtggctcacatctgtaatcccagcactttggggaggctgagacgggcggatcacaaggtcaggagattgagaccatcctggttaacatggtaaaaccccatctctactaaaaatgcaaaaaattagctgggtgtggtggcatgcacctgtagtcccagctacttgggaggctgaggcaggacaatcgcttgaacctgggaggcagaggttgcag

SEQ ID NO: 6304 - DNA, 1034 bp, Homo sapiens
ctcatatagtcatactacctgtcagggaaatgtgtcaaaggaaatatgaaacaatagctttaaagttgtcccgcaccctcaccctgtttttcttttgaaggtattatactaaaggaagaaagggaaaaagagaaatctatggtgtgagttcaagtttactactgtaagtgtttaagaaagggctctgttaccatgacaacaaatgcatgaatttcatgtggaaaattttcagtgtatgggactgataaaattgtaacattctgattttctctggtatagaattgttctttgtcaagttaaaaaaaatctgttaatatatgttaaaattaaatttttaaatgttttatgatattgttttctaattgtttattataacttaaaatcatagccaaaagagtgtactttcgtagatctgtcaagcagaaagttaagtatttgatttgacattaaaaattacttttctaatctgtattagatttttgctaaatggtaaataaaatggtaaatagtttcatgtattgggagttcttgacaatagaaaatgacctgccactttatagattcctttgccttaaatgcttactaactcaggtagaggaaagctgttaagctttaagtgctttgtcatatttgcaggcttttatagtggaagagaacagcagtcagcaatgatgatggaaaactgtggcaggtagacttaaaacaccataaagcacagacgattgtgtgtaatgccttgaattgaatcctttttgaatgaaatgatcagccatatgtgccacccttatggaccctgtaagaagagtagaagaaatgtgccctaatgctaactgtgcatgaaattgcagtgttaggagatattgaccagatgtttcaatctcagcaaatggcttgttatgtgactgagtgaaaatatctttgctgctttgatcacatacaccttgaaggaaggggtaatttaatagaggctgtcatagttcatcattgtcaataaactttgacttgacctttgccttacgtttttgatgttgctg

SEQ ID NO: 6305 - DNA, 1035 bp, Homo sapiens
gcctacactcttccctcacttccccttggtgtaggtggcctagaccgtgttagtcacctaatgaaatctgtgaatcctctcttgaaaaacacagcaaagtttccttacaatttcaggatgtttattggattttccccccctcctctcacacataccctgcaatgataggggcccctggacttcaagcagactaacaaagcttagaaaataagattcatactccttcttagtattctagatatataacaatttgacttagaagtaacaataacaatagtattagtgatactgctacaataattacaacagtaataataataataataattaaaatttactttctgccaaccttatgccagattctatgctgaacctttaacctgtattactggttatattgttaatgatacctctagatagagtatatgcagcatacttttattctgtactttaggaaatactatatctttagaatacagatttgagtaagagattataagcattttgattctaagactttttggaatactgaacttttagttttctgattccagtagtcagtctgtctgtctctgtctctgtctctgtctctctctctctctctctttctcggcctctctgccattcatcttcttctgaaaattagctatcccacgtaagcctcatatatcccctaattcctatttgtagttgtgagggaggaaaaatattttccttctaagttctctgctgtaagattcttgtaacaaaagacagattaacaaaagttaagtacactaatttatattctaagttttatgtaacatagagggaaatgaagacttgaagaaacaattaaacctggtgtttttacattaggttttatgaagagtggaagggaaaggcaataggacaaaaaggggtatgaactaagagtagtaaactgaggggaccttagcaagacctgtttgtttagattcatctcatgtccttacatcttctgagataaggatgttctttttttctgcatatagtaaacatcctctcacatggatg

SEQ ID NO: 6306 - DNA, 1050 bp, Homo sapiens
gcttacagatgtactaaaattttaacagaaatctttgcaaattacttgttaaattttcctaaactgatttttaaaaatctatttcattctcaattataacatctttactgagattattaagtgctttgaagcagttaacgtggcttttttttttaatggctgtaaaaaaactgaatttttaggcttgttaaactctggttttagaatgacttttgagtggaaatcactgatcaaaagcaaagttctcacattttgtcaatatctgaatgtcagaaatagaatgtcaggcagtttcccatgttgaaatattcgatagtaaaaggatagcaaagttgctgaatatttctactgtttatcaatttttgccttgcaggttcaaataatatttatttgtagtggaaatatttcaattcatttaaatcctgattatggagtagttagtaaatcaggtttaagcctgacagtgagttgatatagctcttatttcagactgtagtttgaacatgtagactctctgattataactaggctaaattatataataatgactttattttcactgaacaaagtttgctattattttgatgacaaattatttaagtaatcatagtaaaagttgctattggctctgggttttatttattttgctatatatagtagacatggttgatcatttaatcatgccttatagataaataaaagtaagttatagaataacacagaaattttctgctaaatttatactttcactaaatttaataacaatagaaattctctgttaaatttatactttcactaattgtagaataaagtattttaagttaggcatttatactgagacattttatgatattaactgcttcatgttatttactcattttgataaatggagtgataatatccaaaatggaataaattaagtttaaattattgttattctttaaaggaatgatttagctacagtatgtttgtcccaccttttaattttgaacattttctaacttacagaatagtaaaatgaacttttctatacctttcacattgatccac

SEQ ID NO: 6307 - DNA, 1026 bp, Homo sapiens
cttttatttaccctgcaaattatttatctctctcaaagcatatgttagattcactattgtgaaaatagaacagaaatcattatctttctatgggtaacataatttgtattatttatcttcaggtctacctatttttggatacattatgcataggtgcttgccaaccaagcgcagaattctatattaaatcagtttccaaatatattttaaaataattctacaaacttacatcttacatttgtaggcaacttgcattgtgcagaaaaatattagtagtataaatattcactgcaaatagtttgagctgaattgcttaaaaaacttaattgctatttattccatagtaattaccatgacacctcttaatttaatatttcagaaacattgatcgtgacaaatctcttaaatctgggaacaagggcagggtgtaatttgaattattaagtcttctgacacaaaaataattggttaagaatttatttctaaaataggatggtactaaaaattctgaattaatcaccccatgattaccttgtttttatttaatatgtgttaaatgtggctttacacaaataagtagatacctatgaaaaaagcatctcgtatgcatgtaatatatggttttggtataacagctgctgccatttcattacctgagctctgtgaaatagctggtaagatgtgtaaaaaattgattaccctactaggaggaacatgtttattgaaaatataattatttctttcagtctaatgttaatgtctcctacagcatgtttgtgtgcactgttctaggctttacaacattgttattgattcctctgtataccaaatcctatccctttataactgtcaaataaatgcttacattgagaagattatataatggaaagttatgctatcttttctgccagtatgtgagaaaaacatttcaagaattaaatattttacccctttattatttccatttcattttatttctcaaattggtctcatgttctttccatttttcaaatcttgatactgtat

SEQ ID NO: 6308 - DNA, 1083 bp, Homo sapiens
ttcttttgttcttcaatgtttcacaacccccattccccaaattttgctgcttttaagatttttcatatgagaccaggtgcggtggctcacacctgtaatcccagtgctttgggaggtcaagatgggaggatggcttttgaggcatggagatcaagattagcctaggcaacatagtgagaccccatccttacaaaaaatacacacagagaaaattactcattttgatcagtttagttatgatgggccttagtgtattcttcttcatgtttcttgtgcttgggttttgtttaacttcttagagctatcggtttttagtttttattatgtttggaatatttgcagccattatacatcttcaaattggttttctgacccttttatgccacttgaagttgtctcatagctcactgacactctttttttattttgtttctttctctatgttttattttggatacctcctttgctgtgccttccatttcactaatattttcttctgtaatacctgaactgttattaatctcatcaaataaataaagctaaatatttcttactactgggggaagacttttcttagtactccatggcacagagcactaaggggtccctaatctctggtactgcaactatatcagttcctgttaggaaccaggccacacagcaggaggtgagtagcaggccaccaagcattaccacctgagctccacctcctgtcacatcagcggaggattctttttttttttttttcaaatgtgaaaaatctaattttattcagtttagattaatgtatagctatacactctggactcttaatgaaacctttcccattctttttttttagattttattattatactttaagttttagggtacacgtgcacaacatgcaggtttgttacatatgtatacatgtgccatgttggtgtgctgcacccagcagaggattcttataggggtgcaaatcctattttgaactgcacaagcgagggatctaggttgtatacgtcttatgagaatctaactaatgcctgatgatctgaggtgcaacagtttcatcctgaaaccacgcctcctacccgtccg

SEQ ID NO: 6309 - DNA, 1052 bp, Homo sapiens
attcctgacacttaacacatatgaatctttttcattcatgtttaataattttatttgagagtcacttcaagtaaagcccaaactgtgttaacatttgagttaagcaaagacatctttgcttaacaataaagcaaatatcacaataaagcaagtcacatgaatattttggtttctgaattcatataaaagttatgtttacactatatggtactctcaagtgtgtggtagcattacatctttaaaaataaacatactttaattaaaaatactttgttgctaaaaaatgctagtgatcatctgagcctttagcgagtaataatctttttgctgttggagggtcttgcaccagtgttgatggctgctgactgctcagagtggtggcttctgaaggttggggtagctgtgacgatttcttaaaataagacagcaatgaagtttgccacatcaattgactcttctttcataaaagatttctctgtagcatacaatgttgtttgatagcatttacctacagtagaacttctttgaaattggagtcagccctctctaactctgttgttgctttaacagttatgtttatgcagtattctgaatttttcgttgtcatttcaacagcattcatagcgtgttcaccaggagtagattccatgtcaagaaaccactctctgtgttcatctataagaagcaatttctcatccattcaagttttatcatgtgattgcagcaattcagtcctatcttcaggcttcacttctaatactagttctcttgctatttccatcacatgtgcattgacttcttccactgaagtcttgaagccctcaaagtcatccatgagggttggaatccacttattccaaactcctattaatgttaatattttgaccacctcacatgaatcgtgaatgttcttttttttttaaacagggttttactcctgtcactcaggcagggaagtgcagtaacaatcactgcacattgcagtctcaatctcccaggcaagctcaagcaatcctcccacctcatcatttattttatttttgtagagacga

SEQ ID NO: 6310 - DNA, 1074 bp, Homo sapiens
aaagcgctgggattgcaggtgtgagccaccatgcccagcccatgaatgttcttaatgacaactggaatgatgaattattttcaggaggttttcaatttactctgcccaaacccatcagatgagtcactatggcagctatagccttatgaaatatattacttaaataagatttgaaagtcaaaattactcattgatccatgggctgcagaatgaatgttgttttagcagccgtgaaaacaacattcatcttcttatacgtctccatcagagcccttgggttaccagatgcattgttaatgagcagtaatattttaaagggaatctttttttctgagcagtagatctcaacagtgggcttaaaatattcagtataccagctgggcacagtggcttatgcctgtaatcccagcactttaggaggccaaggcgggaggatcacctgaggtcaggaattcgagaccagcctggtcgacatggtgaaaccacatctctactaataatacaaaaatgagctgggcatggtggtgcacacctgtaatcccagctactcaggaggctgaagcaggagaattgcttgaaccctggaggcggaggttgcggtgagccaagattgcgccattgcactccagcctgggtgacaagagtgaaactgtccccaaaaaaaaaaaaattcagcataccatactcaaacaggtatgtgttcatccaggctttgttatttcatttatagaacacaggcagagcagatttaacataactcttaagggctctaggatttttagaatggtaaatgagcattgacttcaactgaaagtcaccagctgcattagcccctaaaaaaaaaagagtcgtcctatcctttgaagcttcgaagccaagcatttacttctttttagctgtaaaagtcttcaatagcatcttctgccagtagaagactcttttgtctatgttgaaaacctgttgttcagtgcagccaccttcatcaatgatgttggcaagatctgggtaactcttcagcacctgctattttaccttgcacttttatgatatggagattgcttctttctttcaacc

SEQ ID NO: 6311 - DNA, 1050 bp, Homo sapiens
gagaacttgcctgtttgttgtgagaggtcaaactttcagcctgtctcacctttcgatatgccttcctcactaaactcaatcatttctagcttttgacttaaagtgagagacatgcaactcctcctttcacttgaacacttagagaccactgtaggattattaattggcctaatgtcactattgttgtgtctcaagaaatagggaggccttaggagaggtagagagatggggtaatggccagctggtagagcagtgaaaacacagcatttatcagttaagttcaccatcttctatgggtgtggtttgtggcatcccaaaacaattacaataataatatcatagatcagtgatcactataaaagatataaaagtttgaaatattgaaagaattaccaaaatatgacagagatccaagcgagcacattctgttggaaaataatgacaccatactcaaggcaggcttgccataaaccttcgatttgtaaaaaaaaataataaaaaggtatctgtgaagtgcaataaaataaggtatgcttataccaaaacagacttaattatgctatttcttaccattagtgttagagttcagtttctaatgtttttcattttccatatgttattgatgttcagtgagttacacaaattatttactgttgttacttccaccttagtagggagaatctttgatttttgctggataaattttcaaacaagagtgtgattataggctggacgtggtggctcacgcctgtaatcccagcattttgggaggccgaggtgggcagatcacttgaggtcaggagttggagaccagcctggccaacatggtgaaaccccctctctactaaaaatacaaaaattagccgggcgtggtggcgcatgcctgtaatcccagcacttgagaagctgaggcaggagaatggcttgaacctgggaggcagaggttgcactcctgcctaggtgacagagtgagactccatctcaaaaaaaaagaaaagaaagaaaagtgtgattacagagatcctatttgtgtttatttttaatttctct

SEQ ID NO: 6312 - DNA, 1094 bp, Homo sapiens
tgagaatttgtttttataaaaataaagtggggaatcagactcaaggtgaaatgttgtagacttagtgccagcaataagcagaattatttaaaatcattcaaatatctttaattcccttgttgtctttttcaaaaactgtacattttaactacattaatataacggaagactttttaaggcttagttttcctttatagatattccctaatttcatttttatttcagtctgtcagggttgtgaatgtgatgttttaaggtacactgtagtgttttcacatcctcagatgaactgaattgggacaatactttgtaggaagttttttaatatagtatgtagacacattggtaaaaatcagtatgtccactggcttattagtttcacagatgcttccataattcttagtgtactcttgggtattttaaattatcatttcctgacagcaatcctgaaacatgccagtcttttaaagccttatttctgagaactaaagcaaggcatcagcgaaccatatctgacatgccatgttaatttccataactatcatttctgggaggtggtaggatttctaaggcatggagaatctcagtaaatctactttaaaaaaaaaaaaagcaaaatatctgttttattactgggtttccattcacgagccctgactgcttcattcccacttaaataatttcaaaaatagtgataagcatattttttctcttatagattattaaatatttactcacgtgcacaatatatcaaaacatattttgaattctatattcttagtgttgggtgttcatgttgtgaatgaaaacctcattctgttatctcatagcatatttatatatacaaataatttttgccttaagtaggaaagaaacagctaaaagatacataggttattttgctttttaaaattttagcaaactattctgtgaatcttttgtgtgtttggggctgtttgtagaggaaaatttcatcaagcaacattttgggaacattggccttttgtactctttcctaaataaacagaaacttgtactccccaaaataaaatgtttctttgtatattgttacctgcaagttattgataatggaa

SEQ ID NO: 6313 - DNA, 1051 bp, Homo sapiens
agctgcagcagcccaggcggcaacagcagtgccatttttcacaaagaaaatgttgaacaggagccaaatgtttggtggcagtctgttgctaggaaatcaaggtcctgaggcgattaatgacaaagcaagcaataacaagaaggcagaattacagatttaaaagagaaaaaagtggttggtgttataattacccaaagaaatccgcactcattaaattggctgtttttatgattgactttaattggaggttagctcagatatttagctcctttcccacccctttaaacacacacaggcacataatctgtagaactgcagacttgtttttctaagcattgagaggagcttgccctgtaatttgatccccactgacagatgcattttctatgctgccattttgaattaacctattgtagaacaattttcttcagccctgttgaataaaacatccagtctgattacctccgatggatttgatagagtaaaagaatgtacttctcattgaagtagattgtttgcatggactctactgattgtgaactctgccagtaagcacaatcatttgtaataaattttcaaagaaatttgtgaggaaaaggtaatgagagtcacccttttatagtttaatgtttggcacctccatcaaaataatataattcttataagacagtgttatttttccagtaagcttttcacgtggttttagaaaaaatttctgaatcttcatttggactattcatatatttaggaatagagtcttgtatttacactctaaaatgaccattcttcctccccaacaacagtattttagtgcaagactcaatatgcaaagcactctattgcaaaaatatttttggtatgtacaatatttaaagtgattttaagattggcctatttcagtctttgaagtatttcccccccccaaaaatcccttatttaaattttttagggtgtgataaagcatattactagaaaagcatcaatcggtctttcaggtacaataccagaggaaccatcacagtttatttacctttcagaagctttaaaaata

SEQ ID NO: 6314 - DNA, 1025 bp, Homo sapiens
cttttaagtagtaactctccctacagtttaactgttaaacagtaactcttctgacagttttaggttttattctgtgaagactcatgatttttaatttttgcatcttaatttttcagttatttcaggtattgaaattacaaacgacgggaaagaaaagtggttgactaaaaaggggatacaaaaggcaatttttagggcgatgtactgttctgtatggtactgtggtggtggatacatgatactatgcatttgttaaagcccaaagaactgtacatcacaaagggttaattttaatgtatgcaggttttttaaatgttagggatttcaggatagaatgcaagctgtaacaaatgaatctaattgtattacaaatgtatggcataacttcactgaatgggtgggggaaaaggagctgacctaagtaactttggaaaatggtgttttgattggacaatgtaaagctaaagactaaggaacactatagaaacactctattctagttggtaaatttgtttctcataacggtatgggtgaacagttctgaacctctttacatgtatcctggggttgaacaaataagtaaatggatgatgaatggtggaagctaggtttctcactgtcaggaagggatgttacagataaataaacaagaggggagagccagaatgaaacctgtggtactggattagagttggagatataagtatttactcatgtttagcttaatatatgcagatggatagatgcagaaataattatagatgcatgtgtatatgtggattagtatacatgcatatgtttcctagctgtgtttactgagaaggcctagaagcagtgatatcccagtagccacaaacacatctaacgctcacatcctggtttgtaaatcctattctccaataaaaggatccaggactccttttaaatatgactgattctggggctggtgatgggaaaatacaacataagcatggaatatcttgtagtgccagaaggcaagagatttcttaaaaataataaagatt

SEQ ID NO: 6315 - DNA, 1108 bp, Homo sapiens
aaaatgtggattggtatttccaaaattacttttcttataaaggttaaagcagaggggacttccttataccagctaaaactggtctgtttggggatctggctattatctgtttctcctgatttcttggaaagtaagataaacaactatgttttagcttagtgatgtggaacttcagcttgagtgactccattttggtttggtctggtgggcctagtgcaggagcttagtccaaactaatgggatcctatacattttgtttaacactgccaacatcctggtgcacgatcatcagatttctcattgaacagggaatggatgactttgaatgttggagagcacctgtggtgagttgtttatatataatctgtaaactagttatgcacagtagcactatatatgggtctatgttggactagaggataaaaaataacttggccttcacctcagagagtttaagaatcactatgccaccagaaagatggtagtagtaggcacattacatcgagtgaagactgttgggtgagagggaaggtttgcttaaagatataagagatttgagtttgtatattgtctaaggaagatatgatagaacagaagactgataatgcagtgtggaagagtgataactgctagatggaattgagatcaaaggtttatagatgaagactttatccttggaaaaatacatttacatttatttaatgtttagtttttaaattagatattatgtaacttgagcctcacagtaatccaatgaattaggtgacatatggttggtataattcatccgcctttacatttaagaaaattgagacacaaaaaatgttgtgtgttatccacagtcatgtggttagtaaatggggagatattttcatgcccagttctatgctataactactattatgtctgaaaataaaggcagaaaaaaatacttgaagaaaaaatggcaaaaaaccgcccaaatttattgaaaaacatttgtttatacatctaggaagctctttgaacaccaagtacaataaatgcaaagagatgcacacctggcctcataatagcaaaatcttgactatttgacaaggacaaaaggaaaatcttaaactcagcaaat

SEQ ID NO: 6316 - DNA, 1051 bp, Homo sapiens
cacatatgttaacgtgaagttatagattatttatatctccagggcttgcttcgtgtctttgatttcgtagttcagattgcccagttattagtacttagaattcaaaagaataagataaaaaatttttacttaatacattcatttctgcatcacaataaagagttttcatggaaattatccagataatttcatagtagaataatatatgaaatgaaatcttttcttttttatggtagttgataattaatagtaaatctattcagtttatctctaagaagtcagattatgggagacttgtctctatttttctctatttaattttcccaaaaaaattcataaggaaaatattaattttcatttaaatctctatattaaacattaagtgatctttttatgccttggaatcacaatgaatataaatgttatttttattgtagttgattttgcagtttcaattcatttctattaaatattttaataaacatttttatgaaactaggtagaggtcacaaatctcattagtcactgacagccaattctcaaacccaggtcttttcctgtataccacatttcctcattagttctcactacactgtatggctatttccgcctcttaactttttatattttattacactcttaaagtacaactgtacttctcttctcaagtgcccttttctattcagtaagggtcccaggtgagcaatgattctgactggggaagagggagaagatggtgttgtagcaagtagtattaaaaggcccttaggaaggtagatagatgtataattttgtctctttcttctcactgttttcgtaaagacaaaggctatgccttaacttttttgccattcttatttttgagactacccattagggattgtttttgatgttgttgagatgaagtatttggtgaagccaaaacctccttgacttttatagttttaataagtttgtgctctccaaaccttcataaagtaatgtctagtgatcctttcagatatggcatgctgtcatgtcagctttaaataattgttaatggcatgatttt

SEQ ID NO: 6317 - DNA, 1051 bp, Homo sapiens
tgtttgttttggggggcagattttgtttgtttgttttcatttttttgagatagggtctcactctgccacccaggctggaagacagtgatgtgatcatggctcaccgcaaccttgaactactgggctcaggtgattctcccacttcaacctcctgagtagctgggactgcaggtgtgcaccaccatgcctaatataaatatatatatatacacacacatacatatacacacagacacacacacacacacacacacacatatagagagagagccactgtgcctggcctaaatagttttattttgaaataattttagatttatagaaatgttctaagatagtaaaaataagttccatgtactcttcacctagcttctcctaatattaacaccttaaataactgtaggatcttcatcaaagctaaattaacattggtacaataccattaactaaactacaggtttattttcccagtttcttaagtaatgtcctttttctgttccaggatctgttggaggatactacttgacatttcattgtcatgttgctctgtcttgccttctcttttgtggccttgacacttatgaagagtagaggtcagatagtttgtaggatatctttcaatttgagtttatctgttgtttccttgtaattagactgaaattatggggttttgagaataccaccactgaggtgattttgctttcccaatgtatcacatcaaggtgtacgtagtatcaatctgttactgttagtgtgaaccttgaacatcaagttaaggtggtgtccattgggtttctccattgtctatttgttcctttccatatacagttcattagaaatgaatcactaaatccaccccacacttgggggtgggggggtaaatacaaaatgaatagtgtttagaaacctcatagaggaaggatatagccaccacagtaattaataaatattagtggagagatattatgaaattatgcaaatattctagttttttaaagttttacccactgatttatagcatttattagtggatattgcctataccaattac

SEQ ID NO: 6318 - DNA, 1032 bp, Homo sapiens
acagagaggacagagacagatgccttcatttccataaggaaatggttgattattcaataaatggtgctgcgataattattttttcataacaaaaaagtgaaatcaaatttctgttttatactatacacaaaaatcaatttcaggtgaattatagatctaaatatgaaggtaaaatgacagagcttttggaaggtaacttttgagaatatctgtatgatctcggggtgtggaaaaatttcttaagcaggacacaaaagcataaaggcaaagactaataagttgtaccacattaaaattaagagcctttgtttatcaataggtacctttaaaagattaaaaggcaagccactgagtaggagaagacatgtgtgacacaaataacccagaaagaattaatatccataatatattttcaaaattttagtaatcaatatggaaaagacaacacagaagaaaaatagtcaaaagataccaacaggaaatttaccttagaagaaaatcacatgtgtattgaaggaatgaaaaattgttctacctcatcattaattagggaaatgcattagccgggcatggtggcacatgcctgtattcccagcaattcaggaggctgagacgggagtattgcttgagcccaggatgtcaaggttgcagtgtggtatgatcttaccactgcactccagcctgggtgacagagtgagaccctgtctcaaaataaataaataaataaataaataaataaataaataaataaataatcctttgaaaaataagggaaattcaaatgtaatccacaatgaggtatcattttataccagttgataaaaattttaaagtctaaaaatttcaaatgctgcataaaattagaattactgactcttacacacttgaagatacaaattccctactatccccagaaaatgttattgcttttagacactaattatatccaatatctagaacttagtctaataaactatgaacaaggcctctaccaagaacacttaaaacataattgtgagaacttaaaatgta

SEQ ID NO: 6319 - DNA, 1033 bp, Homo sapiens
gtcttgtaaacactgattatgatagtgttttgaaaaattaaaagcctccaaaatcactaatttttaaaaaataatgcagttaaatatagaaaaggattagccatagatattttgtagttaaccctattatcattaacctaagtgaatagaacctaatttttgtacttgctaataattgctattaagaattttgttaatcgtgtgtggattggtgcttgagttcagaatgaatgattgataggggacaactctaagaaatacagcacttacattaatgttttattaaacagaaaaagctttaatgttttattaaacagattttaagagttacagtcttaaaatctttattatttattttatgaaatatttcattttgttttttttctgggcactttaaaattgagatgaggatggtagaatttgccagtttattttttggctattttttttttaacccatcttattttgagaacgaatttagtaatatttttctcaacatcctgaaattgtgtaacctgtagaaacttcccactgtctttttaaacttattcttaaataccacatttaatataggataaataagtcacaaagcttgcttatcaaaacagaatattgtattcagctttccatcggagcttttggggaagacatcacagtattgtactgtctcccaagatgcaaagtatcaggctttaaataatgaaaataagggaaatgccaatagaaaattagaaaaaatgttagaacagttaaaaacagcatactgaagcctgcattatttggcttatctaaaaatcatatgttttcaaccaatcagtacttatagtcattctatttaatcttttaagaaggagacataatccaccctcaccaagtgattcagtgtagcatcctaactaataatgacttaatgtgtgtccaaatggcatgtaatgagaagtatgaaacattgtctgtatactttcttgcctaagatacttaactgagtctaatcataaagttcagacatatcttcactgtggaacatttctac

SEQ ID NO: 6320 - DNA, 1049 bp, Homo sapiens
ttaaaccaatttatattttctgcagttaaaatagaatgcacagatttttaaagacctaggacacattattatatctagttcctgaaatcattaaatgtccatggggaagaaaaaaacttgtgtaagtaggaataatataattggatttgcaatgctctcttaagagattctttaaaatcatgtgaaataagtagagtttctatgattttttaaaaatcacaaatagcatatatccgttttatctttaatagtgtttgagcccatcatttgaaagcattggagcatgtaaccaatatttctgaaaatgaaccatggttccagtcataatctatatgctttaaaattccttccctttattctttcttcccaaatccatgacatctgaatttcaataaggaagaaaataagcatgtttttaaaatgttttagaaaagattttcaaaattagattaaaatgtttgaggaaataaaaacttctttatgtattcattgtgatactgatttttatcaatgtctttttgtaaaaatacctatatactaactttgaataggtccaacatatggtaatgtgttatgcaattaatgataatgtagaacgatgttaaacccacagaatattgccaaggatttaccaacaaccaaaaatgtaattatatagaagaaaagtgtagttacaaatgcagtcttttgtctttttacattctctatatgtagagggtaacagaaatactgtatcactttttagtatatgttctcccagaataagttgccacaattagaacagagtttaggagcctatattaagctttactagttatggttatttccatagtgctagtaaataagagaaaaaaactttttgaacccatgtctcattgtaggtctcctaaaggaaagtggcccaaagtccaaatacttcaataccgttcgtctctgcctgataacaaagtgttttgtttttgtttttaccctcggacaagccagtcagctgatctttgtcctaatttgttcctggtagaattgaacaagatgtttgcagaagcttcctc

SEQ ID NO: 6321 - DNA, 1151 bp, Homo sapiens
tcccccagcccacaacaggccttgtgtgtgttgttccccttcctgtgtccatgtgttctcattgttcaattcccacctatgagtgagaacatgtacactattcacaatagcaaagacttggaaccaacccaaatgtccaacaatgatagactggattaagaaaatgtggcacatatacaccatggaatactatgcagccataaaaaatgatgtgttcatgtcctttgtagggacatggatgaagctggaaaccatcattctcagtaaactatcacaaggacaaaaaactctacattttatgcttggactatcagaaaaactgtttacttgaaaacagtttacagaaaaactctttaccctgacatgtattgatttgttgctttgtgttttttgagacagggtcccactctgtcacccaggctggattgcagtggtatgatcatagctcactgcaacctcaaactctggggctcaagcaatcctcctacctcagcctccctagtagttgggactacaggcgtgtgccatcacacctggctaaattctgagttgttttttatattgaagccttaatctttcattgaggaataccacaataaacagactgagcttgctgttgagaagttgttgaggacaacatagtcttctgtattaatgtttaacatattaaagaccctatgaaaagtttattttagaatcacgtgtttcttataagaaagtgacatttttggccgggcacaatggctcacgcctgtaatcccagcactttgggaggccgaggcgggtggatcacgaggtcaggagatcgagaccatcctggctgaagcggtgaaaccccatctctactaaaaatacaaaaaattagccaggcgtggtggcgggcgcctgtagtcccagctgctcaggaggctgaggcaggagaatggcgtgaacccgggaggcggagcttgcagtgagcagagatcgcgccactgcactccagcctgggcgacagagcgagactccatctcaaaaaaaaaaaagtgacatttttatctcttcaagcatgaaaagtagataactaggcatgtcttactttttgctttcactgtcaagaaattggaaacaaattcagagctaattcaagacgcctctgccatgtatttcttttt

SEQ ID NO: 6322 - DNA, 1445 bp, Homo sapiens
gattgatcctgagactgttgaatgggctgatgaaaagaatgtgtattctgccactgttggctgaaatgttctataaatatctgttgtatttagtctatggtgcagtttaactctgatgtttctttgttgactttttgtctacataatctgcccagtgttgagagtgggatgttgaagtccccaactgttatttcactttagatctaataatatttgctttacatatctgggtgcttcagtattgggtgcatatatatttacagttgttatattctcttgttggatcaatccttttataattatatagtagccctctgtcttcttttacagcttttgacttgaagagtgttttacctcgtataattatagctattcctgtttgcttttagtttccatttgcactgaatattttttccatccacttccagtctgtgtgtgtatacaggtgatacaagtttcttgtagatagcatataattgggtcttgtttttttaaaatccattcagctagtatgtatcttttaaatgtggaacttaatctatttacaatcgtgttattattgataggtgaggacttactcctgtcattttattgattgttttctggtggtttgtatatcctttgttcattactttctctcagtgttatttttgcagttgaatggttttctctagtgaaaaggtttgattcctttctccttctcctttgtacagcagctctatcagtgtgttttatagtttcacatattttcatgatggtgattattgtttttcatttccacatgtaagacccccttgagcatttcttgcaaggccagactagtggtgatggattcccttagttttgctagtctgtgaaatattttatttgtcctttatttctgaaggttagctttgctgggcgtattcttgggctaataatttttttcttctagtactttgactatattatcctgtcctctcctggactataggatttctgctgagaaattcactgttagtctaatggggattcccttatatgacttgatgcttttatcttgctgcttttagaattctttctttgtctttgacttttgacaatttaactgtaatgtgccttgcagaggtcctgtttgaggtgaatatatttgagctttctcgacttggatgtctctctgtctttctgttattatttcattaaatatgtttttctcacctttcccttcaccttctggagatatttatttgcttaatggtatcccataaatcctttaggctttttcattctctttttttttttaaagttagtctgcctgtgttatttcaaaagatcattcttcaagttcagaaattcttcttcttggtctagtctgttgtttagctctttattgtattttttatttcattcattaaattcttcagctctaggatttctgcttcattcttttttatgatatctgtctt

SEQ ID NO: 6323 - DNA, 1096 bp, Homo sapiens
aggtgaaactggtatgtccatgatccttatcagaagtgtcatgatcgaacaaacctgaaagtatagatcagaagtttcacttgtttctcagttattgaatatgtatctttgtgtacatatctgcaaaaatggataagtaaaaatctcgatgtaaattgtatcaatgaatatgtaaacatacagtgacaacactgaacttataaaagttttaaaacttaaaaaaaaagctcaaatttgtaaaagacatgtaaaaagaaggtggaaaatgtatttagaatcagggaatgatgctaaaagtttggtagagacaaaagagaaaagaaagtcccaaaagtggtttaagtttgcagcagatgctgatgatatcaaaacaatcttcacttaaaaaaaaaaaaaagactccaaagtacaagcaacaaatggaaaaaatagataaattagacatcatcaaaattaacaatttttgggcatcgaaggacactaacaagaatgtgaaaagacaactagtggaatgggagttaatatttgcaaatcatatatctgataaaggattcatattcagaatatttaacacagtaacaactcaacaataagcaaactaacaacataattcaataatgatcaaaggaatttaataaacatttattcgaagaagatatacagatggccagtaaacacatgaaaagatgctcaacataaccattcaagaagtgcaaatcaaaaccaaaattagataccacttcacacccatcagaatgacaattgttttaaaaaatggaaattaacaagtattggtgaagatgtggagaaattggaaacacttgtgtattgctggtgggaatgtaaaatgggaatgtagaagacaatttggtggttcctcaaaatgttaaacatagaattattaccatatgatctagcagttctacttctaggtatattacccaaaataactgaaagcagggactcagataattgtacaccaatgtccatagcagcattattcacaatagctaagatagaagcaaatcaaatattcatcaacagatgaataaacaaaatttcatgtatatatacaatggagtattatttagcctta

SEQ ID NO: 6324 - DNA, 1017 bp, Homo sapiens
gggaggctaaggtgggaggatcgcttgcacctgggaggttgaggctgcagtgagctacgatcatgcaactgcactccggtctgggtaacagagtaagaccctgtctaaaaataaaatttttaagaaagtaaaatgagaattcataaactatgaattctagatgtggttctacaagaaaaactctagaatgtcagtctgtaggcatgctcaaaggttttgaccctatttttttttttttttttttgagacagagtcttgctcttattgcctaggctggagtgcagtggcaccatcacagctcactgcaacctccacttcccaggttcaagcaattctcgtgtctcagcttcccgagtagctgagactacaggcgtgcacaaccatgcctggctaatttttgtatttttagtagagatggggttttgccatgttggccaggctgattttgaactcctggcctcaagtgattttgaactgcccacctctgcctcccaaagtgctgagattacaggtgtgagccccccacccagctgaccctattttaaatattagcaaatgatgtatctttatatattaaaataaaatgtttagattatgaaagctattttttgttcccttaatttaatcatcactctgatttatttatcaactactattccttttcctcatctgtaaattgaggggatttgcatagaaatactagataatcttttaaattttttcttaaagcttaaacatgttataaaactgatgattcattttttttccacattctaagattaatactgttagattttattataaattaataaagttcctcttttaacatgtaaaataatgcctgacatttcttttaggtagttctgattttttattatgagtgtagccttaactgtagtgcctttgaagctgaattctccccatttgtgaccccagtattccttttttgtttagtgaacctaggggaaatgatatttctctccaaaaaatacctgaaaatatttggttagacacgtg

SEQ ID NO: 6325 - DNA, 1033 bp, Homo sapiens
atgtcattttattcacaacactcaattccaggaaggaaaaaatgggtctgtttttgtaaaggacatattatgtgagtatcattcattgtaaaccaaaaatgatactgtattatagcatagacaacaatgagaactgattctgaaaatgtgacctgactgagaaactgagtaatagtgaaagttatcaaaatggaaaaaaagcgttaatgtgaaatccagccttctcagaaatactctttcctggcctgtttagttttgcttttgttgcttgtcatgcatgaatgaaagtgctgtactctcaggggagcaggaaagcctctgtgtcggttgtttatttccttaatccctcctcctttgtgatttttgatgtcagatctaaaatggaaagcctgtaaatataatgattatcacacggataatcacctgcattaggaaccgccctgcttttctattctaacccgagctgttctccacatgtcacatccactctgtggttggattttaacctgactgcttcattagatttgtgaaactcagtacgaggcgccctggggcagcacagatggggacttgcttgttttcttttctcacttttactgcaaaggcacactaaaaagtccttttcaatttagtgcgatcagttcacttggaattatctctgatatttggaacctgtcttgctcttctgcccaccaactatgcctattctttcttccttactttctgacctaatgtcttttctttctgcctctgcatgtcatgaatctgacaactaaaattctgcttacaattcttactgggtcaaactgttcccccgtgttgttttgtttgttttgctgacagggaaaaataaatgttgttccatcattgtacctacaaacaccttcagatcagaggttagctgtgggaaagtctgcagtgatatgagccagctgccttctctaatggagtgacttggggcaccagtccaagatcagaggaaggtgggaggaagtcagaagataagatcattttaagccacagaacaacaagc

SEQ ID NO: 6326 - DNA, 1050 bp, Homo sapiens
tccattataaagttatgctttgctcccgtgaccagcatataatctgagatactttgattccatggaaatacccagttccctatcatcctttttacccaatgagtttaacatctactgaggatccttgcctgcataaatttcgttatgaggattgcaaaaagatgatttttctgaatttatacatttattagcaggcattcttctctacataagagctttttgagaggtattgttttaattaaaaacacaaccaccagcatattccttggattgtctttctttgctgaggtcagaacacctgaactcactgtggcagctacagtaaaaacatgtactacatcttctttattccaacttgtgaagtgtgttgacattaggctgcctttttttattattattattccaagggaaaaaagaaatctttattgctgtaagaataaaaattgaactatgtgggtatattgagataattgtgtaaagaagaagactgaatgagtttcaaaaaatggattatttcttcattaccgagcactttataattaactgttcttttttttttttatttcaggaagctgccacttttgctagagagcaaggctttgaggtgagttaacccacaattgcacactaaacagatcctaaaggttttttctagctgataatgaagttcttttggacagtgattgatgtgctattatactctcagagcctcgcagcagttgccatggaaacttggcagtcgtcatggtttctttgttctgccagcacagtgttatgacgcactctgctaggtctgcacccaacatcgcctacagatgttatttattgaattttgaaaagcctcttgggaagccaagaggttgggcacggtttcaagctgcctctgcagatatggggcctgtcagtttgttcagttaaaaagctacctcattagctgcattacatttcataaggattcactgctaaagcagtggtggaacaagactaaataatgaaatataatgtcgtttaaataatttcagccctatcacatgtagattatcattatgc

SEQ ID NO: 6327 - DNA, 1056 bp, Homo sapiens
tggatagaaagtctacagagaatgtattcaggcagtgttgattaccaaagaattaccttaggtgacttttaggttcctgtgttcttcacaaatataaatagtgcaatgaatgatcactcagagtttcagagtttctgaaaataagaccctaaatcaggccctgctggctaagagagtgcagtgttgtttttgtaggtgcctgaaccccaaaagaggacaattttagaacagttcagttaagggaaagcaataagctagtcttctaattctcttcatttaatcatttatttattcaacaaatatttactgagttcttactatgtacataccactttgatagaccccaagacaaggtggaagtgaccagagagtgtaccatgaaagagcatgtgggaagggttcccattttagctatgatggctatggaatgaccctaaaaatatgaatatctagcaatgacaaaaaaaaagcgacacaaacagcaaaacaaatttcaaacagagagaacaggactataaaagtctctgaacgagagagaacttaatgtactatgtactccaggaactgacagaaggccagtgtgactggaatggagttagtggggacagcatatgagatcaatctggcactgacacatcatataaacagcataactattaaaggagtttctatttggaaaacaaaacaaaatggtatggctagatgactcaatgtgtggaaacactacagttggttttctacagaactaggtagactgtgacaggattgcttaacctttgtataaccagctggttaaaaatagaataaagattttctttatccagtctatcattgatgggcatttgggttggttccaagcctttgctattgtgaatagtgctgcagcaaacatatatgggcatgtgtctttatatcagaatgatttataatcctatgggtatatatccagtaatggtattgctgggtcaaatggtatttcttgttctagatcctttaggaatccagttcatgttctttgcatggacatggatgaagctagaaactatcattctcagc

SEQ ID NO: 6328 - DNA, 1024 bp, Homo sapiens
ttttttctttggtggagactggattttgccatattgcccatgctagtctcaaactcctgagctcaagtaatctgccttcctaggcctccctcctaaaatgctaggattacgggtgtgagccaccacacctggcctaaattgtagacttttctgaacactcagaattcttatttgaattgtaatttttcacaaagggagaaaatatattaagtcagatgttttcaactggaagactggtgctatcacatcaaaatcacctagtgagtttttggtaaatacagtcctaccttttttttttttttttaattttagaattgggggagggtgtgatactttttcagggttgttacatggatatattacataaggctggggtttgggcttctattgaacccatcacccaaacagtgaatataatacccaataggtagtttttcaactcacccccacccacttcctgcctccccctttatgtccatgtatacccattgtttacctcccacttataagtgagattgtggagcatatggttttctgtttctgggttaattcactttggataatgtcctctggctgcatctatgctgctgcaaaggacattatttccttctttgttatggctgcatagtattacatggtgtatatgtaccacactttctttatccaatccgctgttgatggacacttaggttgattccatgactttgccattatgaatagtgctgtaataaacataagaatgcaggtatctttttgatagaacaatttcttttactttgggtagatacccagtagtggggttgttggattgaatggtaatcctgtttttagttctttgagaaagttccaaactgctttccacaggggccaaactaacttacattcccaccaacagtatgtgtttccttttctctgtatcctcgccaatgtgtaatttttttactttttaataatagctgtgctaactagtattatgatatctcattgtggttttaatttgcatttctctgattattagtgatgt

SEQ ID NO: 6329 - DNA, 1035 bp, Homo sapiens
acatcctaatgtcagtttattaatagaatacttatgttgccatctttagcacattctgtcaaatgtgaatcaagctacaaagtaatagcaatagataacttttatacagtacctactaaccaaccaatatcttaaacactttatatatatattaactaatttagtgttcacaaaaacttcttggggtagattatttttacccctattttactgatgaaaaaaacagagacaaagaaaggtgagataatgtgcccatagtctcatggctagagagtagcagagccaggattcaaacccagaaagtctggctccaaagtcagtgcttttactcaccacactaatactgcttctctaaacatttatgtaaatctcaccattagaactgagaaccacagaccagccttcctgacaaaagctggttttgccagagaatcttcctgttatctgagtagatgacttactttattgaaaaggatctgttgtaatctgacagggttctggggactctaaggtaagattgttgaggaaaagaaagaaaaactgaaagggaagagaatccaagaactgtagtccctggtgagtttcaaccaagagctttttgctaagcagtagaatcgattgcactacagagatacagaaagccagatgataaacttgcttggttagcatgggctccaaataagagagttatatgaatcagctgtttaatagtgaagcaggatatttccctaagcccttctcaggcagaaattgcagtgtgtgggcgcaggaactagccagccactttggtgccagcaggagcgaacttcactcactcgcttctccactgctcacaggagggtgagcacacgtgagcaggtgcaggagctgggctgagcgcttttgggcactggtaagagcgaactccataccagaccagtggcagcatctaagggaagctgcccgtgacccctggatccccagaggaagcgttacagtgcccttttagctttgctgtctgtagacagcttaagcattaacagctcagttgagtga

SEQ ID NO: 6330 - DNA, 1050 bp, Homo sapiens
tctacaagcatcgctccttgttctatttggaggtcttaagcactttgtgatatttgttctttatttgtcactgcccagccctgatagaactaatcttttcacattcttcctcaaaagcccaagtgctaggattgtactcttggaaatggatacaattctataatctctaagtatgatttcctaatttcctaggtcaggaaaaaatttcttcctgttgtcctgctgtgctttgtcacagcaggtctaccttttcatttggaaccctctttgtcactgccatagtaacaaatggaaacattgagaacattttgtgacaggcactgtcattgttcccagtgaaatctcttcccctgtgtcttcccagtaaatgaaactgagaagaaaaatcataacaaataacatgaaagaggacctaatcaatatgttcccactgggctgtcaataccagcctgtgttaatctaatatgatttagtcatatgttttatggcagctgtgggaatatggacaggacctacaaatcatctttagactgaaagtgagtacacctttgacagattatgtgtaggcacttatatacaactctcagataaaagactagagacttcacccaagaaccaacattcttagaattaaaaaaaaaaaaaaacaccttcattaagtatggttaaaagccacgtatagattagaagattttactttgttggttttttttgttttgttttcgtttttgttttgagatggagtcttgctctgtcgcccaggctggagtgcagtgacagaatctcggctcactacaacctctgcctttcaggttcaagtgattctcctgcctcagcctcccaaatagctagaattacaggcatccgccatcacgcctggctaatttttgtatttttagtagagatggagttttgccatgttggccaggctggtctcgaactcctgacctcaggtgatccacctgcctcagcctcccaaagtgctggatttacaggtatgagccactgcacctggccagaatattttatttggaatgataataaagtaac

SEQ ID NO: 6331 - DNA, 1049 bp, Homo sapiens
tgtttattgaattattcctgcaacttttctataggtttgaaattttttcaaaataaaacttttttgcccaggcatggtggctcacggctataatttcagtgctttgggaggctgaggtggaagtatcgcttgaggccaggaattggagaccagcctgggcaacatagagagatcccatctctacaaaaaatgaaaaaaaaaaaaagccagatgtgatggcatgtgcctgtggttccagctgctcaggaggctgaggcaggaggatcgcttgagcccaggaatacaaggctgcagtgagctatgatcatgccactgcactttagtctgagcagcagcaaaataaataaataaataaataaataaataaaataaaactttttaaaggtcaccgaggctgctgtgtggccaggggagctatagaggagcaagggtagaggagggcaagcctgggaggaggcctttgtgaggatggaggcatagactggggttttgacagtggggatggagagatgaggacagatctgaaatatgttttgaagaacatatttaacagaacttgctcatggattggaagagattttaggggagagagagggaggtagatgttccccacttggtgcaccctgatggttgcagactgaattccaatagaatcttctccccaaggtctttttattccctctctcttttcctcaattcagccactctatgagtagttaatacaggtatttatttcacagatgaggtgagactcagggagatgaaatgactcatttagagttatcaggtgcagacagaaattttactctacccagaaaaccaaaatataggcatgaaatcagtgttcttcaaactgaattgtctctcattaattgattgtgaaatcaacataatgagttcctatcagcattaaagaaaaaaaaaagagaaacagaataaaaatatagcatgccttgtgtaaaagggtaagtaatgtttcatgaaacttctattttagtttaatattcacatatgtgtatagtaggtcatgatgtgaacgtatttcttac

SEQ ID NO: 6332 - DNA, 1048 bp, Homo sapiens
tattctttggcggcaatgagaaaaaatgggtgtactttcatattctgagcatataaattgttcagacctttttggagaaggtagtttggctgtatctttgaaaataaaatcacatacttttaatttggtaattttgtgtctagtgaaatacacctgaacacatgctcattccagcactggaatggtgaaatattggaatgattaaatgtacagtggtacagccagcatatagaatgcgatacctaaaaagtgtgtaagagtgtggtatagatctttatgcagctgatgtgggaggctctctcagatacgtttttagtgagaaaaaatataaaattattacatttatatttgtaaacctcaaaatttatatgtatttgtaaattctaaaacatgcttttcagattttttaacatttctgaaatcagcgtatctaacaattggtgacatagtttactaatttaaactcttggtgaagcatagtgcacattacaagtgataagatcttagatttgatgaaggatgatatgtaaatacgtggataaaggactctaagacagacatgggacgagattgaggaagtgtcagtggagactttgtctgtgtcatctatgttgtcaaattttttttacagtgaaattatattccattattgtgtaacgaaaaattttaaaaatacatatttatattttttagacaagatataattttagacaagataaggttgcctggatgtctctgatgtctgatccatttctctacttgggtgattatgcttgatattcagctttgagaactttaaggcctggatggttgatagagcgttcagcttcattaagaagttaagtagctgtgaagattcagtgggagagaattgagaactgaggtccaagagaagggaggagccgaactccagaattcagggccagttgcctcatggggacctttgcatctgtgtaaagaggttgaaattctctccccacaaggtggtgccaggctttttatactggactgggcataccctggagcaaggctcagtggatgggaggca

SEQ ID NO: 6333 - DNA, 1050 bp, Homo sapiens
tatttttatttatttttgttattattattttttaagaaacagggtcttgctctgttgctcaggctggagagcagtggcatgatcctggactcaaacaatcttcccacctcagctttctgagtagctaggactacatgcgtatgccaccatgcccacctaatttttaatttttttgtagagacagagttttactatattgtccagactggttttgacctcctgggctcaagggatcttcccaccttggcctcctaaagtgttaggattataggtgtgagttatcacagccaggtgcaataagtgtttatgattaatttaaaagcagatgctgtgcttttcaaaaattatgctcaattttttttttaatattacaaaggacttttagactggcttcctcctaaacatttcttcaactcctatcaagttcagtctgcaaatatcctaatttctaggttgtttgggaatgttaattgattgtctcatgtatgtatgtatgtatgtatgtatggatagacagatagatgaaggttgaaggatggatggatagattaaatggatggatggatagatagatagatagatagatagatagatagatagaaagatagatgaaggttgaagggtagggctggaggaggaattccagctttccagtagattttctatcaagcagtcattcatatatataacttcctatattgttagccaaagttcatccatgtctcttgtatttagctctctgtctgtattgtagaaagcttatttattatgtgagcattttgctttctcctatccctccctctttctttaacatcagttataacagctgtgaatacagtttataatatgagcagccatattcagtttttaggctttcaaaatcacaaatacaaaggaggatataatacatagtcctatattttatacaaattgggacacttttcttcatttcttatttcgtggcattgcctaactatagtcaagctaatgacccatgtagatgtagtgttgtacctggtgtccgtgtccctgtgaatgtgtcatgttgtg

SEQ ID NO: 6334 - DNA, 1044 bp, Homo sapiens
aattagctgggattacaggtgctcttcaccacgtctggctaatttttgtattatttagtagagacagggttttgccatgttggccaggctggtcttgaactcctgacctcacgtgatccgcccacctcagcctccaaaagtgctgggattacaggcgtgagccactgagcctggccaatttctttttttattgtgggataatcattccatacttctccctcctctctagtccccacccccacccccctttttccccccacaagtgaagatgatttcctgtgctggtctaggattagttttgttacagtctgtctttataagaacatttcttttccataatccagaagcattttgtaaaacctatgcctggaaattgagtcactttttattgcttagattttcttcacagaaaaacataggttctgttggatgagtatttgttgtgaaagcaaattattaaggggtgaaaattgtctatacaagttgatgtataggaggatatctgaactggattagttgctcttttatctgtgttttcaaagctctttaatagtaactcttataacacttataacagtgttatcactattgtttgggcatcattccattctgctagactgggaattcttttataatacagtgcctgataggcatccattcattccttgaaataatgtattgagtgctcattatgtgcttgaaatagagtgtgtgcaggagccagagcagtcggcagaacagatgcagcttgtgtcgcatgtgcgtacagcccatggcagggtggggggcaggggacccagcaaacaagatacagataactgcgcagtacagtgccaatatgcacaggaacagtgactgtcccctacctacataaatgcatagacctcatatgtgtattgtgaatcctctataattgttgaatttgactttgaaattaaacacttgatattttagactagtcaaaaatgggatatgttattattttaataaaaacaccattgtatccagccgggcacagtggctcacgcctataatcctagcact

SEQ ID NO: 6335 - DNA, 1045 bp, Homo sapiens
agagttttgccatgttggccaggctggtctcaaactcccgatctcaagtaatcctcctgtgttggcctcccaaagtgctgggattacaggcgtgagccaccacgcccggctgaaagcatgttcttgaatgtatatgtgtgttctctccccatgtgatttgtaaaccctccaaggcttgggtctcacattctcattctttgaatcttttatggcataatggatagagagtctgtgctcttgtccagttgaagtaagtagtgggcgctcaaaaaatgttgattggccaaaatatctacatcaagtacagtaacgactcatagctgctaacatcttttgagcaattaacatgcaccgtacactgtcttaagcactttatatatgtcacctcatgtaattcccacaacaactatagttatccccatttcacagatgtagaaactaaaacttagaggagtcagatacttggccaagatcacacgaccagaaaatgatagagctaggaaagtagagacaggaatcaaactcagtgagtctgattccagattctgcagccttgactcctttaccccatgcctggtggatcagtaacctttcagaaaatttttgtaacaagttctgaaaacatagatgaaataggaattttcccttaaactaaatggaaaactaaaaaagtaatcattagatggagcagatttctgctaaatgggaagtcttgggagggcctcattagaaaatgagggaatggggggccaagcatggtatcatctgctacccagtgagaaaaatatcgacttacgctgtgaacccttttattttatacatgtaccacctgaatgaggatggtatatttatgagctctcacatctcattgctgggtgacatcagggagctcttttttgggatagctgtccatctgttctcctccaggaactcctggatccgtgccactgccacttggctgctggcttcaaaagagcctgaatcagtgagttgcttacaccagggagaacaaacaggctcttctccttaaagtgtctgtaattat

SEQ ID NO: 6336 - DNA, 1033 bp, Homo sapiens
gagtttctagccagtgtaacaaggtatgaaaaagaaatgaaagtttgggaggaagaataataatgtctcttacagtattaagtattaatgataatactaatactatgtcttacagcatgcagattgagaggaagaactaatagtgtctctagttttagaccatatggtcatctatatcaaaaatcctaaggaatctttaagacagctgctaaaactagagaggatttagcagggtcctaggatacaaaatgattatttttaaagttgcatttctatatggtagcaatgaagattcagaacctgaaataacatttacaatagcatcaaatactatgaaaatatatacagataaagttagacaaaatataggcaaagcctgtaccccaaaaactgtaaagcattattgaaagaaattaaggcagccctaagtaaatggagaagtgtcccatgttcatagaagactgataatgttacaatgttagtacttcccaaactgatttatagagtcaaaacaagcccagtaaagatcccaaaaagctttttcctaaaaattgggacgttgatgaacaaatttgtgacaaaggatttgaaatagtttaaaaattttttgaaaaagaacaacaaagttgaaggactagttcagtgggaagaagaaaatctcaacaaatgatcctggaataactggttatacatatgggaaaaaaaatgaaccttgacccttatctcacctcatacacaaaaatatactaaaaatggtgtatagacatataaaaaactaaaactataaaactagaagaaaatgtaggataaaaccattgcaactttgggatagataaaaatttcttagattgaacacaaaaagtagaaaaatcgataaatggcactttatcaaaattagaaactgaagtttttccaaaagaaattggtaggaaaatggaaaggcaagccacaaactgggagaaaatattcacaacacttatatcttatgtgttatatacatacatacaaaggacctgtatccagtatatgtaag

SEQ ID NO: 6337 - DNA, 1080 bp, Homo sapiens
gatcaaaggtcttgaagactcttaaaatttctaaagtattatagaatcaataaaaattagaactgggaaagtccttagagattaactctagaaccgttaaaatatttgatctggaaggaacctttgaagagtcccagatccccaaattgtgtgaggtgaaattgtatactgttgtgtcctcagcatcctgatggggcccatccagtctctccatggcctcttgattataggggcctcttattgcctcaagaataatccattccacaaatactgtatgatttcacttatatgcgatagctagaataatcaaatgcatagagacagaaagtagaatggtgttttcctgggctgggggaagagaatatgggaaattattgtttaatggatacagagtttcagttttgcaagttgaaaagagttctggagataaatggtggtaatggttgcacagtattgtgaacttacttaatgccatttgaaccacaattaaaaaaataaaaactaagcaaatgaagcggaaaaaaaaaagaatccattccattgctggacagctgttggaaaggctctctatgatgactcctattggtgtaagttttgtactctgtaaccacaagaacgaatctaaccctttcacctggatgaagacacccagcgagtccaccccagtcttttaaagctaagtagcctttgttccttcactaggtcataatattttgttttgttttgcttatactttgtttgaatcatgatcaagatatggttcacacattgtgattggctgatacgccctttaaatgtctattaatctagcgattcttctgtatctattttttgctcgcctattcacttggtctcctgtttaatttgttgaagaaactgggccattttttccgtagtgttttggtactagcatctccccgctctatagattaacatattcctctgtcctctgtatttcctctgagtcggtaatgggcttgagagaccttgatttataaatgtttgtagtccaactactgtcatcctttggcatctgtgggggattgggtacaggacccctccctcacccctctaccacca

SEQ ID NO: 6338 - DNA, 1048 bp, Homo sapiens
gtgaagaaactgtataatcccatgaaagcaaaaacagtgctaataatgaaagtttggaaagtagaacgctaagtacctgttgtgaggttgtgggtggaaggtggccctgcccaagaggtaagtttatttgtacttcagagctcccataaaacagaaagtaccaagcatcactcaaggccaggtacagataggagctaaataggggaaagttggttaaaaatcttcttaagcctgggcaacatggtgaaaccctttctctacaaaaaatacaaaaattagccaggcatggtggagtgtgcctgtagtcccgggtattggggagtctgaggtgggaggatggcttgatcccaggaggtggaggttgcagttagccgcgattgcgccactgtactgcagcctgggccgcagagtgagaccctgtctcaaaaaaaaaatctacttaagcttttagacctgctctactctgacagaagactagtggtctgttctccagagcagttgaatatgaagcactgttgacttagggataccgtgtccagatgagaacagagctgccatgttttaaagaggattcattaaaagtctatataccaatcacagagacttctagctcccttccttaagtagccagacttatttctcatctcccctcctacccaaccccagccttccaagaagggtaagattcctttccttggaaaacctgaagaaaaacaatgtaaatagctggttgggatatccttttctaatcaaccagatctctgcgcaccctgagtgcgcagagaaacccaaagcttgacagagctcagtctatgcccacagaatgtctcatcttttttagtactttactgtcaaatatgaatggtcagtcaagaaaccagacgtctgagaaaaacataagcgcaaacagaaaaaaaaaagtaaattggaaaacaaaataaggagcagacgaacacttaaaaaaaaactttcgtgttttcaagagaaataagagatgttgcattctatgtgacagtaatgagaggcccaaagaaaattcagagaaaaa

SEQ ID NO: 6339 - DNA, 1037 bp, Homo sapiens
aaaatgttgccggccaggtgcagtggctcacgcctgtaatcccagcactttgggaggccaaggcgggtggatcacctgaggtcaggagttaaagacccagcgtggccaacatggtgcagtctactaaaaatacagaaaattacctggtcgtggtgacgggcacctgtaatcccaggtactcggaaggctgaggcatgagagtcacttgaacccaggaggcggaggttgcagtgagccaagatggcaccattgtactccagcctgggcaacaagagtgaatctgcatctcaaaacaaaacaaacaaacaaacaaaaagaaagttgcagtttgacgacatactcagcactctaaactttactctttctgagataaacaaaataatggctgacttttggttttcattttatattttgtggatttgttttggtgtactgtagacatctcttctcattaaacagaagaaattatgcagatgggaacaaaataagactgttaaaatcgcctgtactttatatacaaaattggctaaaatctgtatacaaatttgcaaagaattttgtccaaattatatacaaatttggacaaaagaactctacttttctaggcctctatgctttaattctgtgttctcacatattcaaataaatgtatgtgttaacacctttgtaattattttaatgttgtttgtaacagcattcacgttcacttcttgtactgcaatatcatagctgaaatgccaacaagggaagattaagcagccaaaggagatcaagagctaaaaatatacccctgagctgaagggtgacaaaactttctcctggtattaggaaggcttagactgaccagtaagaaagggggaagggttgatatgacacaggatttcatgtaaaggaaatgttttatttttaaggtaaaagctgttttgaggtctttttttctttttccaaaaaggaaaagtaattttttcaaattataaaattatatgtttattataaaaattcaaattatatagaaatgtatatattaaaaagtaaaa

SEQ ID NO: 6340 - DNA, 1058 bp, Homo sapiens
ttagacagtttctaagccagcaaaggtgtcaattttaatgccaacttgacagtttaacagttagtgtttgtaagcagtttagcctgaattatcccatactgctgtagaggagaattgttagtaacatcaaaggtcagaatgcttcaggtgactaataagaatggaaagagactgagtaggttttttgtttcttttccctgtctttgagtaactttgaatgactaaaattagtatgaaactaggttttggacccccttctcacctcacccggatgtaatgccaccaatttcaaataactaaaatgtgaccaattactttgcttcaagttctatacaaatatctctgaaatctgtaagccatatttcagctattctggtttttataatacattctaccctaaattaaccaaaggactttttattcagtgtattccatgtttcagcataaggaaagtttgtgcctgatatggcaggagaaagaacactatggtaatttcattgttacttcaggtctctttcaatctgaagaactgggttgtctggagaattgaacatagccaagcaatattatcaattagtaatgtcatcttaaaaatgttcacttttactaagttttattcagaggatctatgtattattagaaaaatgaagtatttctgacatggaacaaagaaagtggaaactggtacttaatgggggaagcaaaattagctgggactaaaacggacatgttttgttttgtgaattctacctaaatgtctctctatccacagagaaactagtattacttgaagatgtgaaagttcctgtggtagccataccttgaagcacagtgtttgtacataagtaaatatcttgattctaaattaaatccagatttaactaatatatattattttatatctttgttgtattaaaatgtttaaaaacactaaaaataaaacatttgaaagttggattacagtttcttattgaaatgtctttgcattattaatggagctggtcagttttttatataatgaattttagtttttgcaaatgattggccaggtgtggtgg

SEQ ID NO: 6341 - DNA, 1790 bp, Homo sapiens
acatgactgtgacagaggcaagataggatcatggttccatcatcattgtgtcagggaccttatcctatgggtaaatgggagccactgaagatccttgagcaggagtctctgcgttatccccactattggggctaagcattcccacagaatgtgctgagctttttttttttttttttgagatggagtttcactcttattgcccaggctggagagcaatggcgctatctcagctcactgcaacctctgcctcccaggttcaagtgattctcctgcctcagcctcctgagtagctgggattataggtgtgcgccaccacggcccgctaatttttatatttttagtagagatggggtttcaccatgttggtcaagctggtttcgaactcctgacctcgtgatccgcctgcctcggcctcccagagtgctgggattataggcgtgagccactgcgcccagctgtgctgagctttttaaagaaacaaaacagtgtttcaccagtgttccaaccagaactctgagcaaggccacaggttactgactgaacaatgaataggaaagcctttttttttctcttttttgagacagggtctcactctgtcacccaggctggagtgcagtggcgcgacctcagctcactgcaaccttcgcctcctgggctcaagcgaccctcccacctcagcctcccaagtacctgggagcacaggtgtgtgccaccacacccagctaattattttgtattttttggtagagatggagttttgccatgttgcccaggctggcctcaaactcctgaggtcaagtgatctgcccgcctcagcatcccaaagttttggaattacaggcatgagccactgagcctggctggaaagtccctttttttttttttcttttttaattgagaccgagtctggctcttgttgcccaggctggagtgcagtggcatgatcttggctcacttggctcacgatcttggaggatcaacctccacctcctgggttcaagcaattctcctgcctcagcctcccaagtagctgggattacaggcatgcgccaccacgcccagctaatttttgtattttcagtagagatggggtttcaccatgttggtcagactgctctcgaacccctgacctcaagtgatctgcccacctcggcttcccaaagtgctggtattacaggcgtgagccaccgcacccggcgggaaagtccttttatatcaaactttatatcaactctgaatggttaaactgggatatcagttgagaggagctgcatgaagcttgtacttaacttgtgtcctgactgttgagctataactccattatctgctttaataatcacattgtatattaaagactaaatcgggcagattaaccctgaatgtgatctggaaagccgcagaatgctcctcctttctcccagtcactcctaggatttgatagacagtctagatcagtggttttcatgttttagtgtggctaaaaatggcagcccgaggttgtatacccaaaaccaggcacactgtcctttatgcatgatttaatggattttcacaggcactggcttgacttttgagcccactgaaccctagcatgccccgcacctctggccgttggccctaactccccaaaatatgagttcatctgttcatttctgctcttcctagttttatcccagtcttgtctgcacttccttctccttggtttgaacttctactgttgccctcctcaccccatcccattgtgcccctctagaagcctgtgctgttgttaacaaactaccctaagttct

SEQ ID NO: 6342 - DNA, 1044 bp, Homo sapiens
aggacgtatcagggtaaagggcctagtcttaggtttcggttttatctaatttagttaaatcagctcatctcagtgaattttggcagatacataaatatccatacacacaaatacttgtttgattctttgtacttgtccagtcctaggaagtgaggctgtaggtaatagactgtttttccgttttgaaacgaattccccaagtttgtataatcatggttatctgttttagaaataattcgttggtggtatctcctttatgggtcgttatagttctattgtagctcctgaccgcataaaaaacattccaacaaatgggattgcttgaattttaatatcagcagtgggtcatgctcttgttcttggatagaaggtgggagaatagagacattaacactggaatgttttttttctaccagcaatgtgtattcctccatcatatgctgaccttggcaaagctgccagagatattttcaacaaaggatttggtaagaaccttatttttaaaacgttttagataaagagtgaaaatgtatgtttgggttgcttagcgaaatcagatcaatcattgcaaattgtaaatatcttgctgctttaaatttagagttacttatttttttgagacagggtctccctctgttgcccaggctggatgcagtggcatgattatacctcactgcagcctggacctcctgggctcaagcgatcatctttcctcagcctcccacgtcccaagtagctgggactacaggcacgctctgccacacctggctaattttttttatttttcgtagaggtggggtctcactgtgttacccagtaaacacagtggcctctcaaagcctggttggattacgttacagacatgagccactgtgcccagccttgtattaattcttctattagaaacttaagatacttagattaaacttatgtgaaaatagttcttttacagtctacatccccctcccccaatttcccaaaatttttaaaaactgtacttagaagatttgagcctttaagaaaaacggctcgtgctttaatttt

SEQ ID NO: 6343 - DNA, 1034 bp, Homo sapiens
gtgattagagggggtggggagaggggctgtaggtttaattgttcaccaatggctagtggtttaatcagtcatgcctgtataatgaagcctcatgaaaacccacaaggacagaggtcagtgagctaggtagctgaggttactggaaggtggcatgtctggagagggcattgaagctgtgtcccttcctatgttttgcactgtacatctcttcatctgtatcctttgtaatatcctttattaaaactggtaaatgtaaataaagtgtttcttgagttctgtgacctgctctaggagattaattgaacccaagaaggggcttgtgggaacctctgtttagaggtgccaggtcagaagcagagttaaaacaacctggggcttgcagttggcatctgaagtgggaggagggcagtcttgtgggactaagcccttaacctgtggcatctgatgtctccaggtagaattagaggacatttagccagtgtctgctgcagaaattattgcttgcttggtgtgtgaggaaagccctcacacatgtggtcacagaagcattctgtgttgtgagagaatagtaggagaaactgagttggtttttttctgtatcctcagaattgatgtcaggattgggatttgctagagtggctctagctagagtggctcatcgaagcatggtttaggaagaaaaaggataaatggatgggaaatgaggaacttttgactcctgggtggtcagatggtcacccctgctatggagccacaactgtgctgtgctcaggtacttaaaaattaccagtggaattcaaagatagatccaactccaagggagttggttcactgggtgcataaggaaacgcaaacaataagaaacaaacaaaatatacaatcccttgattattgttatttgtgatagctaaaatcaaagtgaaagagtgctggattgtaccttgatgctagaccaagctcaggtttcatttggtttaagccttggccaccagcctcaaagccaccttgcaagggtaaaaagtacccctaagacc

SEQ ID NO: 6344 - DNA, 1049 bp, Homo sapiens
gaatacaggtgttttggatgtggtttgtgtctgtatagttacatcatttctttctctggattgggctctttggatgttacacattataagagtatagacatcgaatcatttggagatctgttttggtcacatagtctgtttgttacctttatattgtagccctcagaatgctgaaagcaaagcaaagttgcatgtctaggcaacctaggccctggaaatgaaggcaggtgttcctggcctctggtgtgtcttcataatgttaggggtggtagagaatggagctagaaagaatctactctttactatgtcttactcttcagggttcattccagcccttgaagtcggtaactaagtcctaaaatgttgggattgtgcaaggaaggcaggggcctggattggtacatgatacctcactgggacctcctcccaaacgcagtggttacatacagccagaactcagcagcaccggcatttatgagaggtgtaagaatgtgaggataaaggattgtttgatctgattcttcagaggaattacttgtcgtttggagattttttttttttttttaaacattcatggttttgattctttaggaagagtcctggaagtagtaatgtgtgtaactaagtcatgaatttaaactttataccctgtgctttaaggctgctgtgtgtcacctctagtgagcctgacttgtaccacattttggtctggtttgttgtgctagactagaattaacaaagatgatttttatgagagtgcttaggcttttgtgctgtatggacagtttggggtctttggatacattccagtggctatcaagagtattgtgtcctactgagaatttgatttttgagttgaatggatacgaattaaatagtacctggtttgtttggcttaatacataatattgaattttattgtctcacgtgaataaaactgaacacttcatgattacatgatggggaaacatgtaggggctttgtctctattgaaatatttttcttacagttgtttttgtattttattttaggcaaaagtcaacaactct

SEQ ID NO: 6345 - DNA, 1031 bp, Homo sapiens
caggtaaccgagaaatggaagggagggctggggagtgagaaggacagagagcaccgcccgacacaaccagacgcgcggacccggggcctcctctctggaccggtgctggggccctggtagaaccagctccgggagccgaaattgagccatgaagagtgggccgagggaggggcgaggggaacgggcctcaggagggaggggcgggcccggcggcacttccgttgggggtggggctgcgggctgccgcgccggtcccgcccctccgccgcgcgggcccgcccgctccaggccaggctccgcccccaccgactcggagctggatctcaggccacggcgcccccccagtcgcgcccccaaccccggaggcctcgggctgaaccgggtttcgcaggagggcacagggcggctcccttttcctcacctgggggtactctctttttaagtcataggaacagaagcatctgcagactaggatcccaggcccaaacttgcacgtgagatttgttgaaacttaggtcatttggtactcctgacacctgcctggcccaggggtcctcacgctctctctgcggatgtgatcagccgtcctcttggacagtggggaatatagtccgtgctcatagggtcccacctatctttcaggaagaacaaaagcaaaaactaacactttttgattgttcattttgtgccaggtgccatttaaaaattttgtatgaattatgtcctcgcccacagcgactctctgaggtaggtaccatgaatgccccatttcatagataaagaaattgaggcacagagagaagaaatctgccttgcctcacccgcatcccatcctcatcccttctttccttcagatctggggcatgccaactccttactctgggggagtattggagggagaattctacttttctgatgggggagtaccagcctgttaaccacaaccatttgcagctgaagccagtgcagagcaggagggagatctgcacagaggagaacagtataaatggcatggggtcatctcagcccct

SEQ ID NO: 6346 - DNA, 1030 bp, Homo sapiens
aatttcccgtgtttgccccaagcagagaatcgcacctagaaagtttgtacattgtgggatacttaactaaaacattttcttccccagcagtcgaaggacaagaaaaagagaagttaaacatattgaaaggccactgatggaacactttgatctgattggagagtgacagcaggacccttgtcctaacgcatcctttctgggcacattctaacccctcctgccgctgctctaatgttaagagtgattggaatgaaaataattatcagtatttcaaacatgaagaaactgagttgcagaaattaacttatctaaggtcatggtgaagctgggacagaaatctacatttctttggcttgaatggccaagttctttgtgtgagcagttgaaggagaaagagtgatggcagcggctgggaactgagtactctcttgccgtctcacctcctcccaaataagcctttctttctttctttttgagacggggtcttgctctgtcactcaggctggagtgcagtggcgcaatcatggctcactgcaacctctgcctcctggactcagatgctcttcctaccttgggctcccaagtagctgtaactacaggtgtgcaccaccatgctcagctaatttttgtattttttgcagagatggggtttcatcatattgcccaggctggtcttgaactcctgggctcaagtgatccacccgcctcagcctcccaaagtgctaggattacaggcatgagccactgcgcctggccaaccctgttttctaatggtaagataagtaaagttcactgctggtaactccttctcttaaacccaaccaaactgaggccagtcttaacatgtgctcttgcatgggtatgtctgtgttaagtgtgcgagaaggtagaatattaactctcttaccatgtagctgaatttcttctctgttgattcagaaatggaaagaaaatgtcagaactcctgtaatgcctttaaaacaaaggtgcagtgaaggtattgaaaccagaaatgaaaataagtgggcta

SEQ ID NO: 6347 - DNA, 1141 bp, Homo sapiens
tcacatgtattgcttgtgcaataaagagatgataaaagtttaaaaggtaaatggttttttaaacaggattttctctccacccaatagctatcctttgactcgttctctagttaagtttttgtttttaatgagaaagacctttctaacttactctatttctttatgggtttggggcacagaccccttattttacttgcagtagctccatttccttcaagccactttgggacaaaacctagaagaaacttgaaagttatcacatgtctaagaaataaattccaaatgagtgggttctaactttgttagtgtaatcttataataggttattttattttcatatgtggccatccaggaagaatgttttggctctgagatgagtggccttgtgagagctccgtggtctacccagacaagcccggaaaaggggaaaaagggaagcatgttggcaaaggataggcccctttcagattttgtagggaagtgacaataatgactcaaatattattttctctgtgtgtgtgtctgcaaggctgctttgaaggcactggttttctcgttcaagatacattccctttctgtagaaaccttagctcctgatattgggacctcctgttcctctgtttgctaagacacttccttgtatttttcttttcttttcctcccctcccctcccctcccctcccctcccctcccctccccttcccttcccttcccttccctgcttttttttttttttttagacagcgtctcactctgctgcccaggctggagctccatctcagctcactgccacctctgcctccctggttcgagcgattttcccacctccgtctcccaactagctgggactacaggcaggtgccacagctaatttttacgttttcagtagagacggggtttcatcatgttggccaggctggtctcgaactcatgacctcaagtgatctgcccacctcaatctctcaaagtgctggggttacaggcttgaaccactgcgcccaaccctttgtattgtttccttccaccgttggcttttaatggttcctagttcctctcgggctgcctgatgatgtgataatccaaactgtttgccttttttttttttttaaatctctaaagactataattccttttaagaaag

SEQ ID NO: 6348 - DNA, 1049 bp, Homo sapiens
tttcctgcaattttattctatggatttcctatggaaaacagtcttgtgtatctataggtatgaatctaatttttcaaggattaaataaatagtggatggtgtgctggcaagcttttgtttttgacctcatggaaaagttttttggtttttttttttgtttgttttgttttgtttttttaaacttttggctgctttctactttggggttcttaggacaccataaaaataacttcttctccttcccttcatctactgtcaacacagacacagtctttcactttgctctgttctttgcacatcactttattgtgctcatggtctcagaaaaaagtcttagttaaatgaaacagtgaaacaccattaatgtaggtatggtcagcttatgtagtacaaatgggcttcatttggggcactatcttattaccatgtcattgtgcctagcacatagcaggtgttcggcaaagatttcttagatgaatgaatgtctacctagatgatgattaggaactccattagttggggttgggggcaagtttttgaacagtgaacaagaaagacattactctaacggcaacatgcattctaatgaggaaagagacaaaggtataaacaagacaagtatcagatggtgatgagtgctataccaagagttaaggtaaggtgatctgctgtgctatgacttgggaatcagggaagtctctgagaagataatgtttaagctgagatctgagtgacaagaaggagccagtcaacagaagatcaaagagcagcaagattcaggccaagaaagcaagcaatgcaaaggtcctaggctgacgcaaccttggagtgtacatggtgcaacatcgcggcagcggcatcaaaagctagccaggctgtgcagtggggagcaggcagctgtggtgtgcaatggggtcagcgacgtgcctggggccagaccagctgggaccttatgctacaaataaaatccatattcctccacttgctttgcagtgggaagctttggagggttttaagtggggctatggcttacattctaaatgtactgg

SEQ ID NO: 6349 - DNA, 1050 bp, Homo sapiens
gagctgtcaccatcctgactcatcaccttcaagcaaataatcaggctaaaaggataggctactgggacatcctaggaggatgctagaggagattggccaacgagattcactggactcttagtctctcaacctgtcactccacgctcatccatggaaattggctctgattcattactaatggagaaatagttcaagacttgctttgcatccctacacctatgtttggatgaggacttcaagagtgagaatacatttcagatacagttatggctaaattgtagtctttgcatgaaaaagaaatgacctggtccttgttaagagcagtggattcagcccaaggtggtttcctgatatagcagttgaagttgcagaagattcagagtgcaatgtatgtccctgcaagatactgtagggccagtaatgtttgtagcagtaattcctgtctggtcatgcatctgctagaatgtcgtatctagtactctgcacccactaccacctcgtagaaatagcttcacaagttatatggaggattggtgagacaggtgggagggtattcgctccaaggaggagaatgctgtgagatagccattttttctgcctttatattcttgttggggatatgttttttaggtgcctgtagctgtctcctgctgaatgggctttgttcagagatgcatttgcctgtataagggttgtggttttagaagactgcttatctccctcctagttgctcactcttacataggacagccatgtccagctgtaaaggtaatatactgcacagctgtaaacagcatccctaagaacaagtacatcaggaaatgtcttggggttcctagtagcagttagtgatgagaggaccaagcagctccagccttcttggttagctctgtggccttaggtaagctattcaacaatagtagtccttcatttctgagtctgcaaaatgtgcatgggtcctgggtaaggagaaggcatcacctgctgacctaaggaaagtgaaatatgagtgaatgcctttatgctttctttatggcataaacatgttaa

SEQ ID NO: 6350 - DNA, 1031 bp, Homo sapiens
tgtgttgaagaaataaactttggagtacatgcatttccaaaagtctctcttattcttttcccctaaactgaaaattggaaactatttgggcctgagaatcacctgctcccacaaataccctacatagtcctgccattgactcttggagttaggtcctcactcccctgggtacctttagtttcttccatctgtgtctgtgtttttaggtttccatgcaaaaggccatctaggatgaagacggaatgattcataaggaagctggcttctcattgggatgaggaagctgctcgcccctggggtgccagctccatgagggcaggaaccttgtgttttgttcgtttctgtatctctagtacctagtctatagcagaggctcagtcaatactcatcaaaggaatgaaccatgaacagcagagcatattggaagatccatcatgaaaaggttgttgtatgtgttctaattacttcagtcaacatggttacattaaaaggcaggaaagaaaccattgcctttagactgtgtgttaattgccacctgtacactggcagaaaagacagattctgggcatcgtatttgtttttccaaaggattttcctgggattatttatgatgggaaaacctactactaccacaatccccatgacttggcttttccactgggtagcatttcacggggaggcaagggtgtgatctgaagctgcgttctcctcgtcactcggggtggtactggagtcctccttctttctcaacccacctgctcatattagggcttttaggaagtaagtagctcttctcatgaaacatgttagggtacccacaagtctgtgtgtagttacaatgaaattttccgtcttcgccgctattgtattttttgtctatacctaaaggagcactacctagttgcttctttgctacacttaattgttttttatgcctagtgtagcactttactaagtgctatcttattctaaactacactgcgtatgtctttgatatcttctgttactcctatgtagcccaattgcaaatg

SEQ ID NO: 6351 - DNA, 1086 bp, Homo sapiens
atccatatggaattatccatatggaaatatcagtagtgctgaggttgagaaaccctgccccagagatacacataacctagtgaagtaagttgtacagattcatgtgtaaaaccattgtgttttcctggtattttatgtattccttaggtgtatcctgtgagtttggccttgcccagtgggttttatttactttagttcgctacatgactaatggctacaaattggactgcaacattctaggtcttggaaaatcacagcaaggccaagaaaagttggagtagttttattaaccagagtgtttatgttttcagaacgacaccgtaactatccgcactagaaagttcatgaccaaccgactacttcagaggaaacaaatggtaaggaagggcacatcaatctttgcttaattgtcctttactctaaagatgtattttatcatactgaatgctaaacttgatatctccttttaggtcattgatgtccttcaccccgggaaggcgacagtgcctaagacagaaattcgggaaaaactagccaaaatgtacaagaccacaccggatgtcatctttgtatttggattcagaactcattttggtggtggcaagacaactggctttggcatgatttatgattccctggattatgcaaagaaaaatgaacccaaacatagacttgcaagagtaggtgtcttttcatttgttgatcagctcctgaagacctattttttcaatagcgttgtgttgtgagtgtggtaaaaagggcaagaccaagcaatctgggatacaactctgaaaggattaagagaaaaagttatttcataaaatgcacaggtggagtacgggggttcaaaattgaagtctgacatttgagctgagttcagaagggcagctgaagtagtgttcttggagatgggctaggggtaaggattgttttccagaggagaagtaaggggatgtgtttggaaaggtagcctggcaccaaattcacttagtttggattaagtctgcatctgggcttaaacccataggtagtcaggaaccaggaaaagtttttgattgtatactgagtgtcaaacactgcagagtg

SEQ ID NO: 6352 - DNA, 1289 bp, Homo sapiens
tgtatttttagtagagactgggtttcaccatgttggtcagcctggtcttgaactcctgacctcgtaatccgcccacctcggcctcccaaaatgttgggattacaggtgtgagccaccgtgcccagctgaggctgcactatttttaactgacgttcggtcatgttaaaggccttgctgaggtggtgacattgaagctgagatccttgtaaagatttggaagtagtctttgtaaagatacagaaacagtcttgtaggccccaggaacagcaagtgcaaaggtgggcagagtggagatgagtagatccggaatctccatgatgtgggggttgtaaatgcttgtctgtcataagggagtaatggggagttgaaatgggaagagatcccctcagccacttcggaggtgccttgttttggtagtgcaaaagaagaaaaaatagtgatctgtgagctcaagtctggacaagaacagccagtctcccaaactccctgttgagagaatgttgagtggaccatttgtttcctgtgaggctattccatacctaaaatcccttgatgatcctttctgttccagcaaaaacatgcattaaatgtacttgaaaagttttggtttagaaagctgtgtttcttaagctcagactgggtcagtttccctaccagagtggtgggtaatgattttaatgtttacaagtcacctggatgtactcttttctcattcagcatggcctgtatgagaagaaaaagacctcaagaaagcaacgaaaggaacgcaagaacagaatgaagaaagtcagggggactgcaaaggccaatgttggtgctggcaaaaaggtatagttcattaaggaaaatatagaaacgtcattaattgtaggtctttagtttctaggaaagaagggatcttattaatttttaaaataacttttcttaatgtttcttcttttccctcttcttctggattacagaaggtaacatgttttaagaaactatgtagcatagtgtcttaacacctcagtaaagtagcttggcccaccccttgtcagctcacagcacaatctggaggccacattggttcattgatcccagctggtgggcacctttcaagcctatcacaagaagttttaattttactaattggcatagaaccttcaatgcagagcggatcccattccctgtgattttacttattaatatggacactggtttaagaagcagttggatcaatgtggcccgtgttttcctggcacactggaaaggcaactgagatctcaggattgctttcctctccagtt

SEQ ID NO: 6353 - DNA, 2232 bp, Homo sapiens
gtgtgtgtccagcacaatgttgctgggcagagcagaggggcagaggctcaggtatgtacttcattgacaagtgggcaaggccatcctgggtaccacattggcttaatgatctcttcattgtgaagtccggctacctcgtttgcataagaactacagtaatcaggcaaggcattgtcagaattgggaggaataaaatcagtgagtctggaaggagtgctctgtatacaattgcaaagaacaaaatggtcatctttaaggtacctgattgcatgcacttaaatgcagattattttggagtttgaaaagggactattaatgaaatctttcttttccctcctttctctttttcccttccccgccactgattcagtgagctggagattggatcacaggtataattcaagcttttcatgtagtcatgtagatcactagactccttggtgtactgacgtagcaatttaaaagcagatcatgtgtagtacatctagaagtagatttacaaatattctgaagagttgtaaccttttaaaatactaacagtgacatggttttgtttttaaggtttagcaatatttagcccattatttttgttttattcttaacttgaatgtttgtaaattttatttcttgatgctttcattgtgttatgataacatcaaaataacttgatattctaggttactaataattgttgtgcatgagtgttactacttttggaattgaagactttaaagaattttaaaggcagttgttgactaaacttctttctcttgattcacagccgaaggagtaaaggtgctgcaatgatgttagctgtggccactgtggatttttcgcaagaacattaataaactaaaaacttcatgtgtctggttgtttgaaatgtatttgcagtttcctgggactgctaggaggttagtctgctgatttcagttgctgtccaagttcacatgctccatgaagcattcagtgaaaacttaatgtcatggggtggtgtttgtttgctgcttggtttatagcttaggtgggttcatctgggagtcaagcttgtaaatgctgtgttaagaaccatgtccgcggtggacgcagtgtagtggctcacagtcatcagcacttttgggaggtttgggtgggatgattacacttaagcccaggagctcgaggctacagtgaggtgttttttttttcgagacagggtctagctttgttacctaggctggtcttgattgaactcgggctcaagcgatcctcctaccttggccacataaagtactggcatgagcgaccacgtctggcttagagtctaaaaagtaccatgtctggataaactggagaaatctcaggaagcagtagagagctgaaagacttggttgggcatgaaggggactcaggaaaagcaataccgtgaaggcagaagggttgaggttgcaggaaggaagggtagtggaatgttttggagaaaagatggtcacagcccctgcatggagcacctacagacaggagggcagggctgagaagagttaagtcatggggctgggcctgctggccagggggtggttggagttctgttttcatatctacagaggctgtgtacttcggtttgtggggcctctggccctgtaggttctcttgctaaggaatctgctactactttgctaggaccaggaaatggcttactagtacagaacgtgtggaagaatggggtctttgatgtgatttgacattttttgatgaacagtgcataccaggctgaaggtaatgctaggggcagcaaaggttggggtttgagatgcagtttcctgtgactgagctggagtgtggaagcagagaaggcaccctgtgagcagcttgcagaggcaaggtggtgaggatcctgacagtgctgcagggatgggatgggatgggatgggacaggacgtggagctgggggtggttgctaagttgatgcagggagagtggaaggaagcaattgagaactgaagggtaggaaatagtttctgatgtgaagaaaaagggcatagctgcagagagcctgaatgattgaaggttggcatcaaagtcacgaagtggggaggcttttctgttcagctgtgctcagggcagaagttgtagtctttcagccagtagccttgggaagggaggtgggatgaaactcaggcttggcctatttttccagaggatccacttgggttgtgatattatagaaaatgtggcagtcttgctgtgagcctt

SEQ ID NO: 6354 - DNA, 1067 bp, Homo sapiens
cccggcctaatctgcatgttaactccaagaagcatgtcttcctggacccacgctggaaagggtgtagagcagttaagcatcttaccagtgtctcacccatgaagtggtggggatgggattggaatgcagtcatctgactccaaaacactgcattttttcaggcactccagtattaagctactttgcactgtgcatataatggtatataaaactcatgactgccagcagggtgccagttgccatgggtttattgaacaagtgttagatggctagccaaattcccaatttactgaccacctgctgtgtccctgttctgcaagttggggataaagaagctgttctgtcttgaaagctctgaggtagttaatgacgatcccatgatctggcttctgttcctttctgtgaagtagcagatagtgtatgactgtgacgtgatagaaattgagagccaagaagatcagtgcagggaggctgggtcttggaaggcttccaggagacatacagcagtccccacctatctagtttcagttgctgtcggtcaactgcagtctggaaaattatcatggctaaatggtctgggatcacccaaaagtgatgatcctcttgaagtgtcatcagaaggtcaatagtagcctaacacgtcaccatgcctacgtcatttacctccctctcccttccacataggcattttatctcccatcaagaatgtgaatacatgtacgtattcagaggaaaagagttcatgcagcctactacagtataattattaatatcttactccctaaattatgaactttaattatgtatatatagcaacaaacttggtgtagatagggtttgcggtttcaggcatccactgggggtctaagaacgtttgccccatggataagggaggattactgtaacaccagcagtggcaagagacatgatctgatttggatgcacaggagaaagttctcatttgaggccatgaaaaataggaaagaaagcagggagatgggagcaggcagtgtgggacaaggtgagaccagtcattctgcaaggggaagagaggatgacactgggga

SEQ ID NO: 6355 - DNA, 1062 bp, Homo sapiens
aaattatctcatttacctttttttttttttttttttgagaatgagtctcgctctgtcacccaggctggagctctggattgcaccagtggcgcaatctcagctcactgcaacctccaccttctgggttcaagtgattctcctgcctcagcctccatagtagctgggattacaggtgtgtaccaccacacctggctaatttttgtatagtagagacagggtttctccatgttggccaggctggtcttgaactccagacctcaggtgacccacctgcctcagcctcccaaagtgctgggattacaggcatgatccactgcacctggcctcatttacctgcactcggagggaagtactattacccccattttatagatgaggaaattgaggctcaaagaggttaaggaacttggttaaagttacacaactatggcatcctatgataagcctgggggcatttgtggaacatcttgccaaggagctagaaatggtcctgagccttaaatgggtggaggtgattagctgaggcagcgattctccaggtgtggtcctggacagcagcagcagtgtcaccagggaacttgctagaaattcaatttcttgggctccaccctagaattactgaatcagaagctgtgggtggggccaggtaacctgtttttttttttgagttgcccaggctggagtgcagtggcgtgatcttgcttcactgcaacctccgcctcctgggtgcgattctccacctcagcttcctgagtagctgggactactggtgcctgccaccacgcctggctaattttttttttttttgtactttttagtagagatgggatttcaccatgttggtctggctggtcttgaactcctgacgtcaggtgatccgctggcctcggcctccaaaagtgctgggattataggtgtgagccaccgcgtccagccagaacctgtgttttgataagctctccaggtgattcagatgcatgctaaagtttgagaaccactgagcttagggaaggggaggatattccagagggggacagctgtggagacccggtaggacagtgc

SEQ ID NO: 6356 - DNA, 1021 bp, Homo sapiens
tgtatttctggcactgtccaataatggtagccactagcctcaggtggctgttgagcatttgaaatgtgactagtccagactgagaagtgctgtaaatgtaaaatacaaaatggatggtgaagatttatgcaataaaatagtgtgaagttatctcattaataattttttatattgagtacatgttgcaatattttggagataactgagttaaataaaatattgtattaaaattaattcaaccaatagtcatattacttgctttattatgactaaatatgactaaaatttaaaattccatatgtatcttgcattatatttcattggacagtgctggtttagatattcaaagaatttatctcaagagattagggagtccttggaggatggtgattgtggctcctctgatttctcatgggagaggttagaggggagtttgtcctccactccatgtaaagggttctaagagaattactcatagagatgtggaggagctgatgaagattggtgatatggtttggctgtgtccccacccaaatcttatcttgaattgtattttccataatccccacatgacaagtcatgggagggaccaagtggagataattgaatcatgggggcagtttcccccatactgttctcataatagtgagttagttctcatgagatctgctggttttataaagggcttccccttgctggcaagatggccaaataggatcagctctggtcttcagctcccagtgagactgaggcagaaggtgagtgatttctgcatttccaactgaggtaccttgctcatctcattgggactggttggacagtgggtgcagcccaagaagggcaagccaaagcagaatggggtgtcgcctcacctgggaagtgcaaggggttggggcactccctctcccagccaagggaagccattagggactgtatcatgtactccggcccagatactgtgcttttcccatggtcttcgcaacctgcagaccaggagattccctctggtacctacaccacc

SEQ ID NO: 6357 - DNA, 1045 bp, Homo sapiens
aaactcttagtatgtgtgaggcatgttgtggtatgtgacagcatttaattcatccattcattaattccttttccattcagtgtttgtggtctgtccataggtgttgggaatatggggcaaataagacaaatagttccaggtctggtggcgcttacagcctgggaggagctacacaatgaaacaattacaaaagcatttgatttgacgagcctgcagcctgggctgtggagttgaaggtggccagacaatggtgagggccagggtatagggcagagcacccaaaatgttccaggcagagagaaaagaaaacaggtgggagagctgaagggagatgcttgtgtctggataccaaagcatgggggtgggcaaggtggttctccaagggggtagggaggggctagactctaggggccccaaaaagcatgacaatagtgtttgaactttagctggagagcaagggaagtccccaaagcttttctggcagttgtacagcaggacaagttttcacttagaaggactcctccagctgctgtgtccagggtacatggataggaggagagtggaaactgctgaggtcacccaggtaagacatgtggaaagctagagccattaggatggcatgcaatgggttgagatcggttcaagagctctaaggaggaagagcccacaggatttggatatagggagagggagcatcaagactgttcttaggtctcccttttgagtgtctggttggacggtggcgtctttaattaagattggaaacacagagggataaatggactttgggaggaagatgattgcctgtgagacccccaggtgggtctggagttcaggagagaggtctggggcagatagtgatcaagatgggaagtcggaggtatagaggtggagacgggctcctctggagggctcaagtcttccagagaggagtggacagggcctggcatggatcactggaaacttttctcaatgctccacagcctctatgtacagtcctcaaattatatgccaattatgcaccaattatataacccttcttggt

SEQ ID NO: 6358 - DNA, 1052 bp, Homo sapiens
gggtgggtagtacagaccttgcacccacctgctcctggccattttactgagcctcagcagtggcgatgatcattgtcaggaaggtcccagccctgatccccatctgccagctccagcttggcttgcagggagcagacagcctgctctgttgtgccggctcctggctgcacagcctgctgtcgctctggcctccccacaactctgcccctcagaagcttctgaggggaaggaggagagggagcgctgcatgtttaggagatatggcatagacaaaccagatacaccagaatggtcacgttactctgcaagcataaattgagctcaggcaacaggcactaggtaagtgtttgcatgaaggtgcaacctgtttaaaaggaaccttaactggtctgggccagttgtaatgagagagcaccttgtaaatgggagagcatagccaggtgagcttggcagctgtcagattaaaaatcagttttgaccaaaataaatctattatggttctagaaatgccccctggaccaggaatgcagaacaggggctgtgtgactttattccccatcatctcttccacacctggcactgaatgggcactgaatccgttgaagactgaatgagttctaacatgtccatccatattaataactaagatttatctagtgcttgctacaggccagacatttggccaagcacgttgcattatatctaatccggcaatgcctctaagggatagggactcttacattacattttacagttaggaaagtgagacccactggggcaaagtgatttttccaagattacaagtgggaaatgatgcggctggtcttggtacctgggttgcctgaatctagatatggcaatcttgcagtgccattgggcagcttttcataaaacattgttctagttggcacagtttttcatacctgttacctgaatggctttgcaaaccagttagctctaagctgcccccatctctgggttggctactgcagcagcctcctccctggtcccctgactccccttccgcccctccaaatgactccccctggcag

SEQ ID NO: 6359 - DNA, 1063 bp, Homo sapiens
atagatggacaagatataaacagttatcaaaacctaggagaatatgccactttactcataataagagaaatacaattaaaatttcactgagacatcattttcatctctcagtttgcttaagatcaaaacagtggataacacactgtgtggatgggaaaacagacactcattgctgattgaagtgaaaatttgggggtacaactcaatggggggatatctggaatatctacggatgttacaaatgcttctgaccccacaattccacttgtaagaatatatgctatggagagattcccatacatgaaaaatgatgcatgtaagatgagttgttacattgtttgtaatggcaaacactgaaagcagcccaaataggcatcaaaagagagatgttaagacaaatcaggtgcatgcatatatgagtattcctgtgatgtacagatatggaaagattttcaagataggttgttgtgaagaaagcaagacatacttcagtgtgcatagaatactgccattcttgtgaaaaagtaaaggggtgtgtgtggaagaatttgtagacatatgtgtgcatacatgcacacttctacttaatatgtctgtggaggaatatataagaaactgataatgttggttgtctctggggagaggaacctcaccattgggaggcagggatgagaagggaaacttcttgttacacacatttttatacctttggaaatcgagaatacactacctctatagggcttccccacaaaaataacaaagagagtgagcagaagatagggagcccatgacagagactaagcctgtgcaggtggagtctcagagagaaagcggaagagagctgcactggaggagcccaccaaggaaaacatctcaagaaggaggtaggatcctggcctgaatgctgcaaagacattaagaatttagatgaggatttggagacgtgcagtcgatgtgttcatcgggtccatggtgacctcggtgagagtgcgttcaattcaattgagtatgtgactgtgtaagcccgaatgcaatgtttaggagagaacgaaatgtgcagaat

SEQ ID NO: 6360 - DNA, 1058 bp, Homo sapiens
gccttccaggttcaagtgattctcctgcctcaggctccccagtagctgagattacatgcatgcagcaccatgcccagctaatttaaaaaatatttttagtagagacagggtttcaccatgttgcccgggctggttttaaactcctgagctcaggcagtctgctcgccttggcctcccaaagcgctgggattacaggcgtgaaccaccgtgcctggcccctattttttatttctacagatttttcatatgaacaaaatcatatagtattttgtgactggtttttttaacttagcataatgttttaaaagttcatccacattgtagcatgaatcagtacttcatccctttttatggctaaataatattccattgtataaatacaccacattttctttatctttttgtcctttgactcacatttgggttgtttccaccttttgtctattacacataatgctgctataaacagtcatgtgtgagtttctatatgtacatatgttttcatttctcttgagtatctacttaggagtgaattgctgggtcatatggtagccttatagtttaatcagttgaagagctgccagacagttttccaaagtggccacaccattttaaactcccataagtagtgtatgagggttttaatttcttcacatccaacactgttatctgatttttaaattccagctatgctagtgagtataagtactaccttatcatggtttggatttgcatttccttaatgactaatgatattgactagtaatattgaccatcttttatgtgtttattggctatttgtgtatctttttttgaagtacagatctattcagatcttttgcatctttattaattgggtaattagtccttttattattgcattgtaagaattcattatatattctagattcaaatgttttatcaaataatatatgatttgcaaatattttcttccattatgtgggctctcttttcacttccttggtggtgccctttgaagcacaaaaggttttaattttgatgaagttcaatttatctgttttttattgcttgttctt

SEQ ID NO: 6361 - DNA, 1052 bp, Homo sapiens
atagccttgtctatgcagaaaagggttgctggcttctttgtggggacaaaatgtcccttttccctcctaagcaaaggggggaggagggttcttgttcctctcacagccaggggcaaaatgaagaaaggtccagagactgcggggtttggcgacagaaccagtttctccctcacgcacgcgcgcacgcacactcacttccctagccacaataacaacgatgtctccatccctggcccccatagatatgcctccaacataggacaggtgtccatgcttgactcattccagaaaattgcaggggcaaggacccaactgagaagagctgcagacttcactttttttcctgtttcttcctgatggcgggaggggtgaagggatttaggaaggaaggcactttgaggcctgctgcatcctgagagttttgtcacaagaatacctgcgtataaagccactgaccctgagggtccaacgagtggccatgaccctggcctcagggtgaggcattgttgtaagaaattcaggcaccaaccaattaatttccagaagcttctgtaggcacttggtcgtgggaccaggaagcagggcctgctggttcgtggctgggtcctctacattttcattcataactttgctccccagggccctggcccagcccctgtcactgctgcctggtctttatgaggctccttagattttgtgtggacaacaaaggccaggctgccacgattacccaggacactgctgcagccttgcctggcgacagctctgacctcttagcaggatatagtgctctctgctcatgccctttgggggagtgctctttgtccttaagagtccctcaggatggggaggcagcaatccacctggctgtaagctccggggcgttctgaggttgggccctgcctttagagaggatgaagggagaaggctgagaaaagcagtcctaggcataggctctggggagaggctagaccccatcatgattgagagggtctccctattaccggaggagatgggcgagaggaccaaggtgtcaggaggctgttgcttgc

SEQ ID NO: 6362 - DNA, 1162 bp, Homo sapiens
tccatccctctttcttttagtccttccacactcatccacccattcatccctccaccacctatccgtccttccatccaactacttacccacccattccccccatccacccatctatttactctttaattcactcatcaaatattcatggactctcacaccaggccaggcccgcattaagggctggggtttttgtttttgtttttgtttttttgaggcagggtctcattctgtcacccaggttggagtgcagtgacacgaacatgattcactgcagcctcgacctcccaggctgaagcgattctcccacctcagcctcccgtgtagctgggactacaggcatgcaccgccacgcccagctgatttttaaatttttgtggagacggggtctcacttcgttgtccgggggtgggttttgaagacagagccaatttagccctgccctgagagggtgtggtgtgcaatggagtacgactcagatcccagagccagactgagttccataaggcagtgctcaaagcctgtgtggtgaccatgacgacacaggggacgagggagaggggacgtggctgattctgcaggcagacattcggggaggaggaggcggcattgctcatgcattcattccccaggtgttgaccgagaaagtctgtcaggaactctttaagttcagagatatagcagggaataaagcagacaaaactccctgcccttacggcgcttgtactctcgtgaggaggcatggatgataaatacctaaaaagtgaataggtcaggtgacgctaagttttaagaagacaaatttagccaggtaggagcacagagtctacagtgtaaagtactctttcactagccaaggaaagcttttttttttgagacagggtctcactctgtcactgtaacctcgacctccccagctgaagtgattctcccacctcagccccctgagtagctgggactacaggcacacaccatcatgcctggctaattagtgtacttttagtagagatggggttttcccatgttgcccaggctggtctcgaactcctggacttaagtgatccacctgcctcagcctcccaaagttctgggattacaggtgtgagccactctgcctgacccaagaaaggcttctgttaagttggccatttaagatagctgaatg

SEQ ID NO: 6363 - DNA, 1101 bp, Homo sapiens
tcttgctctgggaggtgatttctctccagggtcaggctgctctgaagttaccaggaaagcctgcccacccactgacacagtcagatcccctcacaggcatccatatccaggtcataagtgctttggcatgccccatctgatcctcacagaaaggtttgtgcatgcttgtgattttgctctagtttttccattaagaaaataaaaaagaggtggggagacctgaggggtgacatggcttgctccaggtgacacagcccatcagtgaaaagtgacgtcttcaggcttctatgtgagtgcttcttcctagatgctgtctacagcctccccagacccacatgagacagactggggtctcaccttgtcgctgacctgccttgagacctcagacaacaccaataattaagcaagcccgagtgagcacatgctccgtcctcacctgtttattcacatgtcaactccgctcatcccattgcagccctgtaagaggatgggtgggtccctagtgaggggactgaggaccactgtggggaccccagagccctcagattcctggtgacagcagctggtctgccccctgtctgccagcctctgagcctctgctaatacaccctggaaggcaggagaagccggatgaccctgaggtcttttgcacctggtgccactgagggcctcagttgtgctgtcctggttgctctgcaaaagctttaggactgggcaccatctagagttggtgtatctggaaccagaaactctgttggctgccccagctctaccctgagtcaggggaacatcggtgttgccctgggcttggcctgcagagctggggtgggtcaggctttggggtgaccctgtgcctggcattgggaggtgctagcattgggaggtgactgatctggaagagaagccaggcctcacagaccatggtgatgttcagggaagaagctgctggtctttgcctgccaggcagacctgccctccccaggccccatcctggagcctttgctcttgctgtctatctcctggggagccaggtgtccagtggaaagacggggttccaagccacagagacctggactcaggttctatccctgccactttatg

SEQ ID NO: 6364 - DNA, 1412 bp, Homo sapiens
cttctgctggccctaagaacttgcttatgtcctgaacccagaaggggagagaaaagaatgtttcccccctcatcttgttcatggagtaacagagcacctgcatcttgcaggcactgagctcatcccttggtctcgagcagtggttctcaaagtggggtccccaggtcagcagcatcagcagcacctgagacctggctagaaatgtattcgttggctccaccccagacccactgaatcagaaaccccactgggggtggagcccaacatgcatgtgttttaacaagccttccagattattctaatgcatgggcaagattgagaatccctggcctggagatccaggctgcagtgaatcattcagccctgctctgggaccgcaccatccagacatcaccccaagtgtgttacactgagtaacaggtgcagccaggaagcaccagatgtaaatggcattcttataaaccattttgattttcattgcaacaaggcaactggatatttaaagaaacctcacagagaaccatttcatcaggtaaagaatcttctacaaaaagagaaattctctcatttcctccctcccctcagtgttctataaattcagtccctatctcaggttgtcttgaacggcgtgtgcttgtgcacgactaaaaccggtagctagcatgctaaaagagtgacatgtattctccagaatgcacagggacccctgcagctgggaaggagggcccagagcaatgaatggagaccagtctggtgtttgggcagccagtgggcatccactgggcaatctgctggggacttggagaggtttaataacagccaggcatatgtgatttccagggctgtcaagcctccatactctgggtttctcggaaaaggaatggaacgaccgattaggaagtcaagacgtagaaacatgaaatgtgccagccgtcagctgcttctgctggatgaatggataagagggaaaaccctacaacaggttttgggtcgagaacccatctgaaggttgtcatctcccatagcacagggtcagaagggagcgcgtaagtaccactgcatgcgccagcgcagtggcgcagtgacagagatggtgccatgcgctcctgagcttacaacacgtgtttccagagtggtcacagctggcgtggagcctgacctcgtggcttcggtctttgcagggtttagacctcaggtgcactagctcagagttagaggaacgaatagccttctgagtttcttgcatcaggaacctgagagtcttggcaattaaccaagtcagtcaggcactgtaagcagggaagggtggggtggagtcgggggtgcaaatggttggaggtgagatggtagagtctggtcagcagagtcacccagcaaagcgcagcccatctcagttcctctcctgccccttg

SEQ ID NO: 6365 - DNA, 1050 bp, Homo sapiens
ctgggggctggcaccctggcaggtcttcatgccctgccccttcgctgggatctgctggcctcactcttgtgcaccccagcagtcggtaggaagcatcactggacactcactgtagacctaagcacaagaggtggggctgaaggctaactccttgcttctgatacgtgagagctccttggggagatgtccacaaacgtggtgggtactgctggacctggtgaggggaggaggggaaatatggtccgggttggtagagaggaggcagtgtttaggggcaggggcagctccacgagaggacagagccaaagcggggtgagggaatggtggggtccgccagaggagtaagtcattcttaagtgtgtgtttggactctgccttataaatgctggaagccaccaaaggtctttgattgtgccaggcatcttaggtgtttgagggagattagcttggggaaaatgtacatgagagatcggggtgggggcaggagagggtgtgcagcaggtaggcctgtacccacattgctgggggctgggaaggaagggtgccggaagaaagcctgcattcccatggcccaggcagccaggctgctgtgaagggctgggaggtagagggaagggctgacaccctcagactcggacccttccagcctgtactgagaagggaccaagcagttccaagggtaaggtggtttgggggagcccaggctcttcctaaagggcaacgtggagtcagagcccgggtgaaggaggagctcagattgggcctcaggtcacaccacttcatcagttgcatgacctgtggactcggggatacagggagacacacagccatggaagtagctctctgcagtgatcgggggaaaggtggccacttctgaacagcctgtcaccatgcagggcacactgttgtgcactgggcactgagacaggcctggggggtccagtaccgactcggatgggggttaccttggactgactgggagctgcggtcacttggtggggtgatgggcatggcctgtcttgagtctgtgcctgccaggccctgaagatc

SEQ ID NO: 6366 - DNA, 1049 bp, Homo sapiens
ccccactgggtggcagctccccctgggatccgtgatcttaggtccccatgagaggcccagtgaggttaggccacctagccgaactcccacagtgtgccaagggccaagcctcccagtctgctgatcctctgacccttgccatcgccacatggtggagggcacagtgaccagggaggcggaacagctggcttctgcgggtgtcatcctgagtctgctgcagctttctttgtgggcttggcagaacatgcacccactctgggcctgggtcttgctgggtatgaaaagtgcccacattggggagtagctcagcaggtctgctctaggctcaggccatgtcccccactccccacaggagcctggcccgccccctttgtcccactctgccccctcctccatagcagtaggggcagcacatcccctagggtaccacagaccacgggacagggctgagtggctgctctatcctacagcccggaagcctcgggctgctgtgacctactacagcctcgcaagaggaaaaggacttggcttgtatttttacacactctctgttccctgggggtggccactatccctctgggtgaccccctcccctccccatctcatcccttcctaggcaacaactaccaaggccatggcaactttgacttcccccacgggaaccctggagggacatccatgaatgacttcatgcacgggcccccccagctctcccaccccccggacatgcccaacaacatggccgccctcgagaaacccctcagccaccccatgcaggaaactgtgagtacctcctcctcaccccattccattccccagcctttggggttgatgccttgggatctggataccctgttccctcccaggcaaggcagaggatgaagaattgggtgtgtgggctcagaatggaataggaggggtctaactgaggctacgtcgtgccctgtcagtgtccttagacttggctgttttacctaggatttcggattctctggagatgggggaagcttcaggctcttccccaaaccctcaccaccccatgcatacac

SEQ ID NO: 6367 - DNA, 1116 bp, Homo sapiens
gatggggaagtgtcaccactgagggtccccaccctgctggctcctgtccccccagtccctttggccatagccctgaaccccagccctgacccaccttctgacccaagccctgcggggtcccttgcgcagcacaggagggtccctgccctcccccgatggtgagcttgcggtttctgtgtctgcctctctggcccgggcagggagggctggagggagaggccgtctgtctgcctcgctggtgtgtgtctgtctccagttttcttgtccgcgtgttgtccatgccctgcttctgcttgctccatcgctcactccaagaggcccccatgtgggtgacagaaggtgggggcagagggggcagccttgggtcacagccaggggcagcaggccatcatgggcagcagaggtgccagggctcctaccctgaggtctggaagatggtgggggtcaccctggatgatggggctgggctgctggatggggctggcgggatgggactgagcaccggccccgcccatgcctacacagagctggtgccagactccgggaggaggcttgtcctcggcccctcctgttcttcacccccagccctgctctgtcagcctctgccctgcagcatcagaggagctctgtgctagctaggactcactcactgtgcagccatctcaggtccttgcccagtgttccccctcaaaccaggccagtggggctgcttttagatgcatgaggctccccatgtgacagactccaaggatatctcagtagagggtagagacagtctgcatcccctccggggccacagggaaggatggctgccagccagccacaggctcaccaaggagtggcgagcccttgagaagagggatgttggggggttgggggcggtgcaggaaccactcgccttcccgccttcccaccagcccacctccttgtgcttacacgtgaagcatgtgatttcagctgggaggcccaagtgacctgccatggggccttcccaggttagggctgaagtccatgcctgaaaagggtcagccctgctcaggcctcagctggtgggctgcgggtcccaatcctgaggcttgaaatgagcatgggggtgccccacactcggtgcagtgg

SEQ ID NO: 6368 - DNA, 1050 bp, Homo sapiens
tcaagcaaaagcagcctctggccttccctccaccgctttgctccatctggcttaccactctccagggcctcctggggagcctgtcctgtgttcactttgtttcaggctggtctgtgccccgtgagccacatggcctagggtgatgccaggttgtcccgtcactggggtcccatctgtaaattctttgcgcccttcccggctgctgcctggggccctttcctgctctcccgtccgctgtgggtggtccccagctctcctctgtgggttttaccggaaaggtggccccagctgttgacttccagtcactgtcccagacggcacaaggttttctgtaggaaagctgccattgccccggccccttttcttcctttgtcccgttgtcgaggttttttcaaatagcgtgttgttcagtatgcaaatcaattattttaagaatcgcttttgtaaatatctttgtgaatattttagtatcgtctttgataatattcaacattttcatgacctggttatagcctttgctggtgtttttaaaatacctggactcaatgacaaagaccgagtcttctttttttttaaacaaaaacaaaaaaagcaaccagggctatttgtacagttgaaggggtgaacagaatgggcggctgtgctgggagttggaagaccgggcagcccgctatttagagccatccctcagtcagctggcagggacaagccaacgccaggtagcatgtggccacccttgcccagtgtctgtggcctggcaagtggccacgccctgtgtcagaccatctgggaattaagctccagacagacttacagatgccttccttaggagttcttgcttcttgcgttgatactttgccccagaaaggcctgggattcattctggttcttatcagggtgtgtccacactctgctcacaggtggatccacggctttccagtgcggagagtcgagatgctccctgcagcccaggccccgggcacctcctgcaaccatctctgggctcagcacctgaggcgggtttcctgggtcccctctccagcaagcctc

SEQ ID NO: 6369 - DNA, 1227 bp, Homo sapiens
agagatggtcctgaactctggagagatccttccctgatcctttcggacgactacttggagccataagtaacctcagcaaaaacgaggcctctgcaagccacttttccatgccaagcatccacccggcccacaggcatgtttctgccgccactccgcaagatggacagggagccagcaggcaggcgggaagggccaagtacaggcaatcacccccatcttcttggtttgaagctttatccatgtatcatgttccgtgtagccattttattttttaagaaactgctaatactttctccctaatggaagccctgatcccccagagagctacaggtctgctcccgacgggcctcgggcctgacccgtccacacagggccgtgtcaacagcagcgactcaagggacgtgtgtacatatgtaaatgagaaatagagacgtgtcaacagatgcattcatttctcttggaatgtgtattgtttttattttgcgaaacaaaacaaaacaaaaaaaaaagcttggaactccatcacgtggaaaaactagatcctgttggttatagcatttgtgagttctccacgtctgtctctctcgctcatgtaatatactctgaccctgagtggaaaggggtttttgttctgtttttattttacctacatgtactatttagcttcagtgtactagtcctgccacctgtgtatttttagggtgctatggaaataatgaaaagaaacggggatttcagaagaaaattgtaaccaaattcatactttgtataatttttgatatcatgatcacaggtgattcacacgtacacacataaacacacccaccagtgcagcctgaagtaactcccacagaaaccatcatcgtctttgtacatcgtatgtacaatgcaatcatttcatactttaaactggtcaaaaaactaattgtgatttctagtcttgcaaagctgtatgtagttagatgatgtgacaacctctaatatttatctaataaatatgtattcagatgaaacctgtatattaggtgttcatgtggttattttgtatttaaagatcaaattatttgactattgctagacatttctatactctgttgtaacactgaggtatctcatttgcccatgttaatttttttctaaataaattgacaaaaacaaaggtttggcgaattagctattttgtggatgttaaggagtggtttgggtgtttttgcttttgttttaaac

SEQ ID NO: 6370 - DNA, 1010 bp, Homo sapiens
tcaatgagatgcgcctgaactcaaagctgatatcaggaaaggcggaggagagtaggggcagttgggcactgatgtggagattcaaaaaggcaccaggccctcagctgtgtgtccctggaggcctctgactcttcaggattccagggttagggcaaagtctgctttaaaatacctccagagctgcaggtagagcccagcagtggctggagcccagaagcagcctgccccctatttgaaccaagagcacgtctaaggtgagatatctgatggccacataccaaggtcaggcccccacctgccttgtacccccagagcagaaccccagtcctagttcccagaacagtatctggtttctgggctgccttgggatgtgcagcagcatcactggggactcccatacctggcccctctgagctaagaaatgcagcccgtgttgggtagccccttatctatcagagggaccagcacaaagtaggcaggagagaggctctactgaattgcactggactcaggacaacaatttatctcagggcacaggtggcattgaggttggtgggtagttcaggagcctgatggccttaactatgctactgccagcctggtgagctggtgataggggccacatcctcctcctttgcccccttggatctactttgagctccaggagcaggtggctgccctcttctagccccatcccagcctgagccctaccccctgccacagtcccaggtccagccctacacaggtcccagctcattcccatcctagacccagggcaggctctgcctcaggtccagccaaaggtctagccccagccaaaggccaaaccaaggtcaagatctagtgtggggcccaatgccagtgctgggtccaggttcagatccaggaactcacctttcttatactgagagaaagcagcctggaggtgctgtacttgtccctgtaaggcctcaacctgctgcctcagagaagcaacatctggaggggagaaaatggccaagtaaagactt

SEQ ID NO: 6371 - DNA, 1045 bp, Homo sapiens
aatttattccaacacctcattcattcattcattcattcgagacagagtctagctatgttacccgggctggtctcaaactcctgggctcaagggatctttctacctcagcctcccaacgtgctgagattacagggacacgccaccgcgccagcccgaacatctttatcttaaacccagaaaagtgacaggagtgtctcccctacaagatgatgaccagccctccagacctgagcccaggtgtgattccaaggcccctgtactggggccagacagggagactcgctctcagggacttcccaaccagcaccatcttctccctgcggggatggcgagggagcgcgggccggccccggccctgcctccgcgctcgcgctcgacggtgtcctgaagcgcgctcccggggaggtgttgcagccatggctacggcagccggcgcgacctactttcagcgaggcagtctgttctggttcacagtcatcaccctcagctttggctactacacagtaaggacagccgctggagcgctacggtctgacgaacgagcgagcgctcggttcaccccaggacctgggctcacaggccgcgggccgggggaagtcgtgcaagcacaatcccgactcccgcgcgctaggagcggaggggaggggaccagactccgcaatgagagcaagcatactggtccgccagggtcttgggcgggcgcccagggccctgagaaaccggctagccaggcttttcttatatgggggcggggacggctggggagctcccagccaactctgtgtctgggtttttcaagaggatggtgaagtcggaggccagcaatgcggctaccgcctatttccgtccagcaagacccttgccctctctggtcacagtcctggggctgggctacttcgcggtgaggcgtggggtggggcggggcgggcctctgttttggcccgccgggccctcgtagggcgaggggagctctgggaacggggcctgtgcgcacgcgcatctgacggttgtctcggttactcatgtaagcggaaattcggtgggc

SEQ ID NO: 6372 - DNA, 1033 bp, Homo sapiens
tttattaggtacctgtgaggtaggatcctatcctctcaaacttccatttctcatgctacagagaaagataaggaagatgagcaagtgcctggaatggggcaggctgagcagtcacacaggcatagaggcacgctgagaacctggaggggagactgcagagtgccttccctgatgctgcagccggaagtgatccttccctccacctggcccctgggacactgtgctctgcagtgtgcagggcctgatggcactgctagattgctccttcagctcagggccacagcttaaacagctttacctttcccctcagcacctgtcccactatcttgcacacaggtgctctaaccatgtttattgaacaaaggagggaaactgatttcactttcacttgttcattatcattccaatttttatgtgaaaatggcacaacccatttggggtaccctcaccccaaaataaaagcccaagtctacctttgactggtaccaccttttttgtggtttcgttggtgagaaacctttatctttttcatacctttctattctcaatcacttctccaaaagtgtgtctttccagctctgatttattcaaaacacaagcatttctgtttagagattctagcccatgggttatctggctagttattacctctcctgttcacttagttatactttattattgctcacaggctggggaggcagaatgactctgtcaccactaggagccattagggcttcttccctggaggactgcctgcttgctttctggggacactagccctcatttcccttctgtggtacagtggggcaaattatttgtattaagcaaacatttatgggaaacaacccgctcccgaaaacggagcccccaagtaaagcacaaccctgaaagattatgaactatgaattgtctctggtagagataaatttctgcaaacatatctcagtcttccctctgtttctctggtgattaagaagttcctttttggtaaggaaaaggatttttaaccatagagttaggcatcatggaaatt

SEQ ID NO: 6373 - DNA, 1084 bp, Homo sapiens
tctggcccatacagtgttcaggccttgtgtgtgtccttgtgtcctgtagagtccttgggcaacaggtggttgtgttcacactcattcttggaggcaagttttatggatgtgctcttgtgatggtggggcggtggtaggggggaggtggggatagggcagctgggtagccgtctgcctgtcattctccccagctggtttctgaggtcagacagaaggagggtctggtgggtgagtggtggtgtctaggctgtgcccgtcaattccacaccgtgggagaggtggagcggtcacaggttccgtttccagaggagtgtggtttcatgtcccttcttggcacttctttctcagaacattgcagaccagcagccagcctgccgtggctgcctcacaggaaggggttttgcaagtagccactccgtggaagctggtttctcactggcggatgtgggtgggtcgcctcctcacctctagggtggccttgtctcctttcgccttgggctgtgttactctcctcacctgggaagtggggggtgagcagggggctggcatgggaccactgccctacgggcctctgatcctgtccctacctgtgcacttgaggcactccctccttccccactgttcagccactgcattgggggcaggggaccgtggaggacttcggggtccacctggattgccactggggttcaaaaaggaaagcagcaaaggtaggccaggccctcagaaaagtccctcggaaatagcaccctcctgcagtaggatctctgaggttgctttgagggttagacacagataaaaaacagtggccccacccttcactctgtagttcacagggtcttcccacataggctgtgtaatccaagcttcattacagccctggaggacaaagctatggctatagtctgggttgaggtggagtggggggcgagtgacaggggagggagggagcagggggatggctgctggctgcagtggccttcctcacctctgagggctgagcttcagaggttttcagaaaatgttgcatgaatgagtatggagtcctcatcttggcttttcttcactgggcacagttggatca

SEQ ID NO: 6374 - DNA, 1033 bp, Homo sapiens
cttcatttaatactctctttttttcctgagaacctaaggggaggctgtttgttgtgggggaggaggggagaaataaactaccagctctcaaaagcttacagggtgccaggggagagagagacaactccatgagcaacccttagtgccaaccacaccccggggagtataatggagggcagaggagtaactttagaggtctgggcatgagcaagcacaagagatggaaaggagaactgtagaatgatgaatggtctgctggaaggagagagaaaaagttcatgatggatggagccagacatacgcctggaaaggaggtagggtgtgaagctcttaaatgctacattaagggggtggactttcctctgtgggcaaagcaggatcttgatacaaagaaggatgtggtcagatgaagttttaggagcaccactgatggcaatgatgtgattcaagtgatgagttttcaggcaaggagactagttaggagatttttgcaatggtcaaggccaatgagcaagggtctggacagagtctatgacaacgaggaaggagagaagggatggatatagcaaaatggtggtggtgaaatcaatagggcttggcatcaattagatgttgggatgagggaaagcaaagagcaaagacatccaagtcccaagctgggagatgaggagatggcagcaccatcccaccatggggagctggggagggtgtgcagatttgcaggaaagagaaagtgcttagattgactgcattgagggatttttaccccacagagaagggagataggtggaggctggaggagaggtgagagcttgggtgaaaagcctggtgatggagagagatgggctgggctcactttctgcagctcatgttgaggatgtaggcaggttctgctaattctccaggtcatggaaaaggtaataatgacaactgcattctgaaaatggaaaaaaaaatcccagaatctttatattgggttacagagggaactctgaagatgagacagctggaaaccggtttttaaaaaccattc

SEQ ID NO: 6375 - DNA, 1038 bp, Homo sapiens
tgaagagctattcatgtcttctttggatgacactattcctttgcccaaaagttatgtagattcttttaaattttcccactggatgctggtataaatcttaagccaaaactacatttgtaaaaaccatcacagactctgtaatcacgtccagttattaacagccgttctgtgttacacataatttttgcagtcatctattttgattggtcaaactgggacttaaacctagtttgttcctccatcttcagctgtgttctctgggatgggtttcttgcattacagtggatggttgggcaaagaattcatcgctgaaaattaaaaaggtcgctttatttcctgttctactaaaaaatagtttgttccttgactctgactctcatatgtccttctcttaattggttagtaggttgttttacttatgtttttttggttggttttgccttttttttaaactagcatttcagatctgctcggtagacctggtgcaccaccaccatgttggctgcaaggctggtgtgtctccggacactaccttctagggttttccacccagctttcaccaaggcctcccctgttgtgaagaattccatcacgaagaatcaatggctgttaacacctagcagggtaaagataatctgaatgtttttatattgcttctttttccatttgtgccctttctttttggcagagtatggctgctctgcctttagtgtgttatacgtcagttagccctgataatatccccaatcagctctttctccccattagtttgtatcattctggtccctccttatcccatatgaaatagaaaatgagtttctgtaactctgtcttcgcttacagcttctggagtttctcatttagaaaatttagagtacattgtgagggattgagagttacatagtgtaacggagatcctggagcacatagtcagaagtttaagaacccagggatattaccagttggccaatagcttattaataaattactaaatatattatctcttatttagaggttgataatatctgtcaggttaga

SEQ ID NO: 6376 - DNA, 1037 bp, Homo sapiens
aaactcacaaacaacctagggaggggttctctgaagggcctagtttccagaatgaggcggtcatggcttaagcgaccatcatttgatcaataaagcagagtagcaacaggctgatgttggggacatcggtttgatgttataaaatcgtgcacatgtaccccttttgaggcctgaatgaggttcggttatttattcatttctcaataatttactcagccattcctagggtgacaagtttggagtatatcttctgtgccaggctctcttctaggtgttaggtgtatgtctctaacaagatagaaggaaagaagaaaagaaaaagaacaacattcctctctttaattgctaatcgcctgggcctagggagtcttcattttaaaagcaagtagccctgcttacaaatgtctcctcaatcaaaggcatttgccttaaacttgtatggtctaaactctaaataaataagcttctcaagggcatgacaactatatcggaaactgtagcatcttttcaacatgaattaaacagaacatgtgaaggatattagcccagatatcatgttattacatatatatatttataagtatacacacatatgtagtcttaataagatgtgatattccaaatggccctatgtgctgagtcacattcaaagaaagcacaaactgatgtagatgcctgaaatgatggtaacatttattattgtgacatttactgagggtttactatgtgccaggtattgttctgagaactttgtatgttaaaaaaaaagcctcgtataattaccagaataaccctatgaggtaaggactgttattatccccattttacaggtgagaacactaatgtactattattattctattttataggtgagaagactaaggtacatgaaaaatagtaacttccctggtacaacaaagtcagtaagaaaaccaaaatttaagcccaagaaaccacattccagccagggtctgttcttgcatccccactgcgaaattgccttattcaatctgagtaatgtgaatctgtactctaga

SEQ ID NO: 6377 - DNA, 1021 bp, Homo sapiens
ggccgggcgcggtggctcatgcctgtaatcccagcactttgggaggctgaggcaggtggatcacctgaggtcaggagttcaagaccagcctgaccaatacagtgaaatcccgtctctactaaaaatacaaaaataagccgagtgtggtggcacgtgcctgtagtcccagctactcgggaggctaggagaattgcttgaacccgggcggcagaggttgcagtgagcccagatcatgccacactccagcctgggtgacagagcaaggctttctcaaaaaaaaaaaaaaaaaaaagaacatccgtcgtggacaagactttgcactctttgcatgtattgtcacaactggttgctggaggtattaagcacatcctgtgtaactccattgggagaggactcttggaagctttcacctgattttgccccatgtgacttttcctttcttattttgctttgtatcctgctggaataaatcttagttgttaatattactgtatgctgaatcctttgactccttttagtgaattttctattttgggagtgggcttggggactcctgacacaggtactgatatgaagttatctttctttacttcatgatagcatctttttttgttcctcatcttttatattagtcctttgaaatagctatggactacctactacctttggtttcagactaggatgaattctagaggagttgagtaaattggcactaataggttaggaagtagtttactacttgttacactctcagtctcagaatttttgaactcaataaacttttaactgatatttaactttcttgattaaatatagcattttttctgataaatattataatcattgtatgtgcacaatcttaggcaaaaacatttttttctcttgtaaacacagtgagccatactcagaatcttctttgcagcaatgctaggacaatacaagagctctcattgaagaatagttgaactacaatgtcatgatgattgattttctaacactgaaatatttaggaggtgataat

SEQ ID NO: 6378 - DNA, 1050 bp, Homo sapiens
actggaaggggcaggagggaggtgttgctgtcactgtattaggttgatgttgggaaacgttttaacatgtggagcctttgtgggttgaaatatgtctccagctacaactctgcactggatctgaagaagcaaaaaaaaaaaaaaaaaaaaaaaaatctgttcagtctactcacaaaacagcacattgtggaatattatggagaattgtaccaaaacaggaaccatataaatgatgcatagggacaagaaagaggaacaattctatagcgcacaataaaggaaacctaagaatgggagttacaaatagtaaagaagcttttttctttttttatttaaagttttttttttaatccaagttttcccacatgatggggctttgttttgcatattgatgaagaactgcacaaacagaactaatatagttaaaatcagcttgccttcccatagtagaagcaggttcttggaagttacaatttaaggtaccccaaaaaagttggaaatagaacaaaacaaacatgaacaatgaagcaccctgtgaaatgccaaatgagtcactccttttaccttttttggggtgtgcaggctgggtggaataaatggggcttggtatatcaaactaaagatgacatcttaattttgcattgaacattaatgtagcggatataatttgatggttgcacttcattagatttaatttctaggccaatatgttattttttaaagtgcagtttaagggttaggcatgctttctggctcatagtggttgaaagtaatttaaattagtggggaagtagcatgcttgcatcacatagagtgagactggtattcatttacctatgttgcagcaatttgtgttgcagtttaccaatttagtgtagccctgctacactaaattgttccttcttaagatttgtgggttttattttcattaagaatatagacatataaagtactgtagtttacagctagtccttgaaatgtcttttttaggatctgttaggaataagattgatattgcattgtgtgtaacctgcacaatgtggaaagctg

SEQ ID NO: 6379 - DNA, 1051 bp, Homo sapiens
ttttttaatggggattatgttgatttttatagctttttattacaaggaattctgaacatgcaggacttgaactttctcatgtagtagttctcagactagagaaacctttcctgttttgtggcttgggttagtgtttagcagtatttttagtaaccgtcctaagtcagtagctatgtaagcactgagtgaagatggagtcacagggcaaactgggcttgcttcccacagggagggctgggttttgagcaggaaggaaggcctgttcagcagtgccttgggtacaactatgtctgagtaggcagccggtaacacaatgtctcccttgtgcaaagtaactctcttagtgagtgctcagatatgtgaggaaaaagtatttgggtaagtgaagaagcttggggtgtttcaaagagattcttttcgtgtttttgtggtatttgggtttaagggagtgtactgtttgttgctgcaaactactggctttgttttcagtggcattttagactttttgaacaagctcttactgcaggcagattgaagcgtcttactttccgaaaatgtgagcttaattttaaaagtgtgatttgtttgtgatgaaaagttaatttgtgcttcttgagatcagtgaaaattaattgtagcagtcctttataggaatgagttctcttaaaaatctgctgtttcctgtcattttcattctgaaatcagagccaacttgtgacagtgatgaaaaccacctaaaactgattatgagtgtttaaaatgtataatgttgatttcaaggttaatttgcctgttttaaaacagtgtggcagttaattgtttacatgactgtaatgtaaaagtattataatttacttcattttgaataatattaagttcagttttcaccagaagaactggttatgcttttagaaatcttgatattgtgattaacataaatggctgatatttttaaactattatttttatttgatttacagcatttaattatcaagctataagagtcaacttttatggagtatgtacatgtttatagtcttttgcttttgaa

SEQ ID NO: 6380 - DNA, 1087 bp, Homo sapiens
tactacttctctccattcttgtggatatttgactactgttttgaaaagaaacttttttgagctaaggaacaaaagagtggagaatcctttttggatatgagattgttaacttctcttgaggcagaaataaattatatgattgaattatccagacattgagcttacagcctagttcaactgtaactagaaaataggcattggtatatagtgtttttctgttggctggtctggggagatgattttttgattaggagttttagtgtcaaagggaagaggtggtagggaatggtgggaaataggtaaaatatgtcaaatatccactgtgagccagtcattgtactagctgtaccacgtaccatcttttgtgtttgggtgttttgccctgaatcatgaagcatgactaaatagcagctaataagaccaggccacttctaataatgaaaaaagtagcataattcaggtagtagtaggtgaattggtaaccaatgattggtaccataaaaataaaaaagtgttttttgaggttctttgtgtaaagttgtaaatctcttaatggttcttttctgtcattatggcctctgaactcttaggtactacacacgggtaaaattgactttattttttgtttatgtgatgacagcaaaattatgagaagaaaattgcaaaatctttgtaggtcatctttaaagtttcccaaatgctaatagaagttaaaagatgactgagttcaaaatttcatgtcattgcctctttaaatttgtttctaatgtgactgaatttaaaaaaaacaatgtgatacgtatatatagttttcaaaaaaattcatacactattcgaaggcttaatgaaaaaaacagtatgtctggccccctccccacctcagtcaacctgttctcatctgaacaggttactgtccaaagcttctctagagctgtcatgcagggacttacttttgccataatctgggactggatccattctttcgatagcatgtcttctttcttcctagtttattctctcactttgctggaatatatctttaatttacttcctaagagaggattaatgaatggcacactgttttagt

SEQ ID NO: 6381 - DNA, 1002 bp, Homo sapiens
ttattattattctgtccataccaaggatcatggtagtaatggagataaaaataaagaggacacagtttttaacctgtacccagtacattgttcgaaaactataggttaaaaccggttagtgggtcttaaaatgaattttcatcatgactagaatttttggtaatgaagtaaaacagtataaaactatcaaaaggacatcacacgtaataaggacaaatactttttcatgaaatttgtttttagtgagagaaatatatgtatatctccctatattacacacatggatatgtgcatacacatgtaaatgcatacctattcatgtatatatgtacttggttgtgttataaaatgtatttttattgtggatcagtgtccccaccccccaaaatagaaaactctgttctagtagataaacaatactatgctcaagactccaaggccaataaatcatagagctgggacttcagtagtaaataaggcagctatcactgcatcaataaaacatgaaattatcaataaatttactgagagacatttgtgatgttttatttttaaaaacctgagaaactttgtagaaaccatttacgttctgtgggaagaccaaatattataaatgctacagatattaaagtagtaatcaagatagctagcttatagtctaggggaatatacatgtattaaattaaataattatgagaatgatgtgttgcaaagggtaacaaattaggtgttataaaaagattgtgtaagatacaatctgagtgtataataaattgtgtgttgtataaagattgtacaaaatacaatttgagtgtatggtgtgtatctacagtttttctcagtacgatttacagatttaatacagtttcagccaaaatcataacagctttgtttttggaatttatcaaaatgactccaaaattggaaacatcaaaggataagatttgtgtacattgaaaaggagaaaggggaaaaaaccctttagagcagggtataatactg

SEQ ID NO: 6382 - DNA, 1054 bp, Homo sapiens
ttagtgtttgctagtcatctacagtaacaacctgaaagcaatggtggcttataataatgaaatttatatttcacttacatattggctgtagatcagctgggactctgcttcatgtgtcttcctcattctgggatccatactgagacggatcagcccctattgtgggacatgttattgtgccagtgggaagagaactttgataggatcacatgtgaattctgcttggatgtggcacatatcactttcaaaacaattcaaggggccaggcctggaattaatagggcagaaaagcattatttgctcgtaggttgcagagtgatttattgggaagaagattgtatataaagcaatcaaaatcataagagtatagtacagtagtcaatctcattctctcatcttggcttttcaacttgttgactacctgtccttgcccagattgcttcccaaccctgagctttcatcctactctcagtataatacattaagtcagcaggttcacagcaggccatctcttaacactcagttgagaaccattgacttaggtaatctctgatgacctcccagtttagaaaaaaaaaaattgtgaatttgtgactgacattttaaaagcaaagttgacctctttcctgaatttgtgtgtgtgtgtgtgtgtgtgtgtgtgtgtgtgtgtgtgtgtgtgtgtgtgaaaaagttttttacatgtaaagatttttttttttttttttttttttttttttagacggagccttgctctgtcacccaggctggaatgtagtggcgcaatctcggctcactgcagcctcggcctcctgggttcaagcgattctgctgccttgatttcccaagtagctggaattacaggcatctgccaccatgctcggctaattttttatatttttagtagagatggggtttcaccatgttgtccaggctggtctcgaactcctgacctcaggtaatccacccacctcggcctcccaaagtgttgggattgcaggcatgagccatcgcacccggacaagaaattatgttttaaagaaaaaaaattaattcc

SEQ ID NO: 6383 - DNA, 1046 bp, Homo sapiens
tgggttcacgccattcttctgcctcagcctcccgagtagctgggactacaggtgcccaccaccgcgcccagctaattttttgtatttttagtagagacggggtttcaccgtggtctcaatctcctgaccttgtgatccgcccgcttcggcgtcccaaagtgctaggattacaggcgtgagccactgtgcccggccatatgatagacattttgttacacagtatttatttcttgtccctgctccatttccttccaggcagattattcctagtctttcttatttaagctgagttgcaataggtcatacttgtcttttcttcagtattctggtctcttttgcattttaatcagcaaatccccaactgtgtcacctttcatccaaaatggtttagcagtgcagtttcaaatgacacaaatactgcatctcgtgccattaaaattgtaggatctaaagtctccattggacctaccatgcctctaatctatccttttatttaatctcaggacagatccctctcccattcccttaatgatctcttccaaatagctctctccaagttccatgcttagctatacttctcaacctctgcaggtagccttatgtttgttcatccagtaaatatcttatgcttcctgccttcttgctttcttttttttgtttttttggttttttttttttttgagacaaagtctcgctctgttgcccaggctggagtgcagtggcacaatctcggctcgctgcaagctccacttcctgggttcatgccattctcctgcctcagcctcccgagtggctgggactacaggcgcccgccgccacgcctggctaatttttttttttttttgtatttttagtagggacggggtttcaccgtgttagccaggattttcttgatctcctgacctcgtgatccgtccgcctcggcctcccaaagtgctgggattacaggcgtaagccaccgcgcccggcctccttcttgccttctaatttatctatatttgtctcattcttactcctttgttccagttacaggggaaaagtgtcca

SEQ ID NO: 6384 - DNA, 1022 bp, Homo sapiens
cagtcctctttgaacatcttactctcataatttcaaatatgacatatatggctaacatgtaaaactcctttctttcatgcttggtaatccagttgcccactggacacacttctattgtatgtcccacccataagtacttctaacacagactctctctctctcaccccccacatatgtgtgtgtatgtgtgtgtgtgtgtgtatttgtatgtgagatgtcttaaacattttatttatttaatgaaaaaactgataactgttgagctcagaaaccaataccccaacatacagtactttgacatactgaactgaagaaacctcaagatctcttctggctccatcatgtccccacctcccccctactgcccacccacctgtgtaacaatatatttaaaattcacacatattcctctttggacatacttgttgttcttctgtattcaccatttcttttgttggcgcagctattcaccatgtcactcaagctagaaatacagtgtcacccttgaatgctcctctgttcttttctcacatgcagtgaattgccaaaaatctcaaaattttgatttcttctctcccttttcatctatattatcactctcttgggtcaggctcctactcttatctagattattataatattttcataagtgcctagctcagttttcttgctgttgttaaaatttgtcctctaaacacctgtcaaagccatctcaaatgcaaatctgtcactccctagctaaggccatgcgtgatagtcatggctctctgtgatctggcccttgcatagtttactagccaattgcttctcaacattaatcagaacctatgtgcaacagcgacactgcttatacttctccagacgtgctatgctttccctcacctttgtattatattgtatggcacttagaatcctttaactaaaattccaagcctaccacactcctctatcttctgaatcttgtgcttatcctttggaactccactgtagtccctcatttctgatgtgtgatgtcacttctt

SEQ ID NO: 6385 - DNA, 1026 bp, Homo sapiens
ttgagaatgccctactctagagcggcacagtcctatacaactttctgtgctgtccattgtagtagcctgtagctacatgtgactgttgagcacttgaaaatgaaggaagagaattttaaattttgtttagttgtaattaatttaaatgtaaatagtcacatgtagctaattgacatcattttggacaaagcagccctggacctaatgatatctacttacatggatatggaaagctacctagaacaataagtaaagggcaagtcagtaaaagcagttttcagaagaaatgaaggaaaataaaaaacatggagttcagatttaggtggaggaaaaaagagggaaaagagataagaatgagccgtaagagcagaaaatgatacttccagaggaaagtggggcaattatttttcttatctgaggggcaaaatacccggatacaatggtgaaatgagtaacgcgaaaagaagaataacaatatggaagatgcctaatcattcacatgaaaatagttgatattactgtgaatactgctggaggttgttggttatgcgagaaatcaagattcattttaaacataaaaacttacgaaactatttttaagcatagtgtacagatccatgtacaagcatattcttaaaaattagcattatcttggactgaatttatttttatgtatttccaatactgttttaaaagcatttaacatcagtatttaaaaatatgaatattctgcacgttaagtaaattgtaaaatcttatgatatgtaccttttgtagtccatttgtttgaacacctcaagttaaccagagaagccaaaatattagaaaaaagaaacatttctggactcataccttcaaatgccttattacttatccccttgaatctctacgcagggagaacaggttagacccaaaggatctacctgacctgtcatgtaattacctgacctggattactctgaaaattgagtacatgaatacacagactgttgtatcggtatcagtgtgaaaaggtgcctacaagtt

SEQ ID NO: 6386 - DNA, 1047 bp, Homo sapiens
cacttgaggaggcagtctgtccattctcagatctcaaaccccatgctgggagaaccactactctcttcaaagctatcagacagggacatttaagtctgcagaggtttctgctgccttttgtttggctgtgccctgcccccagaggtggagtctacagaggcaggcaggcctccttgagctgaggtgggctccacccagttcgagcttcccggccactttctttacctactcaagcctcagcaatggcagacacccctcccccagccttgctgccaccttgcagttcaatctcagactgctgtgctagcaatgagggaggatccatgggcgtgggaccctccgagccaggcacaggatataatttcctggtgtgccgtttgctaagactgttggaaaagtgcagtattagagtgggagtgacctgattttccaggatccgtctgtcaccccttcccttggctaagaaagggaattccttgaccccttgtgcttcccgggtgaggggatgcctcgccctgcttccactcacactctgtgggctgcatacactgtcctgtccccactgtccaacaagccccagtgagatgaaactggtacctcagttggaaatgcagaaatcacccctcttctgggttgctcacgctgggagctgtagactggagctgttcctattcggccatcttctttggtgtaatctacatgctttcttagatttctttctggggtggttataagtgatactgttcgttaaatttcactttccctgtgctgattgctgatacttagaaaaaaaattgatttctgggccatgtgcggtggctcatgcctgtaatcccagcactttgagaggctgaagtgggcggatcacgaggtcaggagatggagaccatcctggctaacacaatgaaactctgtctctactaaaaatacaaaatattatccaggcatggtggcgggcacctgtagtcccagctattcaggaggctgaggcaggagaatggcattatcccgggaggtggataattgcagtgagcagagatagcgcca

SEQ ID NO: 6387 - DNA, 1048 bp, Homo sapiens
cctgcgaacttataggtactgtgacagatactttcacctaaattatttcaggaattaatgatctagcaggagagacaatttaatacaaagttgattgttttaaatgccatataaatagagttacaaaattaaaaatagagttataaaattactggagtggagatggggacagatatgagtaactaaattataggaactaaaagtaagagggttcttcgagatgaaccagtccagcctctgcatctgacaaataaggaaactgaggctcaaaaatcagtaattttctcaaggttacaaggcttgggaaagatccaaggaaaaaaagtttccctgattccaaggtcagtgctatttccacagacctgcaaaggtaaacatacctctttggtgaaggaaacaatgactgttttcttaaacatgtctatgaagttaccatctgaaagtttctttacttagtagtacagtgggtagaagcttggttctgcaaaacgcatagggaggatttggttgagaatttgtttagtataaatatagcctttgaaccaaaacatttcacaaacagcataacagcaggtagtatctatggagagcatctggggtcatcaccttattcaatgttttctaagctgtttttgccaaattagcaaaagaaaaaagtataataatttcaaaagataagatttttatttactagaatatcctaaagattgttaatttagtttttgtggcttttttttttcccttcatcaacatagaaaatggatcttttatgtttctgttttatattgaacaatgtgggatcacccttaaatttaaagaagtatttgattatacctgagtcaaagaatgttgatacggaaagtgagaaaaatttttttcatttcagacccttcataagatctgtaaacactgttaaactattatcgtaatttttaatacaatattatttttaagtcagattaattggtctgaaaaaatatacataatttcttttgcagatttaactgggtatgatcatgatttataggctgattttccttaatgatat

SEQ ID NO: 6388 - DNA, 1029 bp, Homo sapiens
taaatctatttaatgtttttgttatgtacaaatatattaaatgaaataatgaataatgcctaggaaaacacaacaatagcaaagcaaatacttgtggctgccacccagtcatggcaatccttggtgttgtgtgtggtctctgatgccattgtcctgtctttttcttgtctctgctctcccattatgccattggcaaggagttgagaagttagtccattacttctctgacaaagcgtggtacagtacaatttcggattttttcctaccaccttcctcataatcactttttttggtttttttttccagtttgcatgatgcatgtcagagcctgcatgaaagtacaggcatgttacagatggctctatttccaccttcctttttatggttaaaatgtatttaataataacaataaacttgtatgtacccaggaaaaaaattagctaaattctgtgtctgttatgcagtagcattattacactttagaacatttcctgctttctatttggtgcactttgacatatttttactccatcaggacttgacattttagctgccatcttttgctaataaccctagaacaagaatgcttatgaaaactggcatgagtgcttttccgtatgctaatgctgtagatctttgaagtgtcgtaaaacagtaaaggtgaactgttttgctcattggtgggtactactttgccttttttcatgttcattatgtttcccccaatgggtcactgtggaatcacctctttccagaaatactgctccacactgtggcttgagtttagtatctgaaagttatcctgggtaggctagatcatctaagaaggaaataggacattatccaggaaagttagttccttaatattggtattatatctgcctgtagtgttttaaaatatattaaaataatcatctggttatactgtatattctgaaagcctgtgaactcatcagaactaaccaaattgcacagaatattaaattttagtgctgtattttaagaaattatctgatggttcaaattctg

SEQ ID NO: 6389 - DNA, 1068 bp, Homo sapiens
aaaattcataatattttactgagcaggcaagaagtgtgctttgctggtttagtcctattaaggtctgtatttattgtggttgtcagaacctcaccccttttcacttgtctctcctgtgaatatggctactattttaactaaagatatggtgataatggaagatggtagtctgtaagcagagttctggccagtgttttgtatatttaaaaggtctatgcaaaagctttgtgatgaataaaggagattaggcttttaatggaaagtctatgtaagttttatttttccttgccagggtcagtcagctaatgttactgttgattcatttcccaaattccccagactgaaagtgtttcttattacatataaatcagttatatattcctttacatcttgttttacaaacacatgtgcatgcacacacacatatacacacacataccatttatgtttgtatttgttactgggtaaattttggagcgcttgagatacaccttgaaacctgtacctaaagatgtattcatttgtaacatatgttggtgctagagttttgctggtaattcaggcttgaacccttaggcttgtggatccatgatagccattttaaggttccacagcattatgtctttaattgtaatatttatatttattgattttctgctaatatctgaagactgaaataatgaacttgaaacatttgcacaaaactttgatggggtataaatataccatatatagggattgtaaactattttctatagcaaaacaagttaaaatattttgagaaaaataacaaatttaaataagactatcttgagaaagctggagttcataatattctccccctcccccatctccagtctcctaggtttcccttttctgtgttttttgtttttttctgtttgttttttgagacagagtcttgctccattgcccaggctggattacagtggcgcaatctcggctcactgcaacttctgcctcccgggttcaagcgattctcctgcctcagcctcctgagtagctgggactacaggcatgtgccaccatgcctggctaatttttttgtat

SEQ ID NO: 6390 - DNA, 1050 bp, Homo sapiens
ggatcctcacccttaatactgtatgatacccgcctagtcaaacaccctgaagggtcctcctgtaatactaaaatccaaagttcttaacggtgaaaaggccctgcatgatctggcccctgagtactcctatcccttcctaccttgccgggcctgcctctgtctactactagaacatgccaagccagctcctgcctgtgggccctcttcgtacttgttccctctgttagtcctcaagagacacacacaactcattccctgcatgctttcaggtctttgctcaagtgtgtctctcagtaatgttttccttggccatgctatttaaggtcatccagcaccctgtatctccttttccctgctgcttttctccataacatagtcattacgtttgctttgtgtatgaacttgtttattatctatttcgtttcacaagaatataaactccatgaggacgaggatggctgacttttgttcattttatatgccaagcacacctagaatagtgcctcacacacagaaagtgtgctataaatatttgttgactgaatacctggattaattgaagctttaaattgtgttcagcggccaggcacggtggctcacgcctgtaatcctagcactttgagaggccgaggcaggcggatcatgaggtcaggagatcgagaccatcctggctaacacggtgaaaccccgtctctactaaaaatacaaaaaaattatctgggcgtggtggcgggcacctgtagtcccagctactcaggaggctgaggcaagagtatggcatgaacccaggaggcggagcttgcagtgagctgagatcacaccactggactccagcctggacgacagagcgagacgccgtctcaaaaaaaaaaaaaaaattatgttcagcttacacttgtaatctcagcgctttgggaggccaaagcaggtggatcatctgaggtcaggagttcgagaccagactggccaacatgatgaaaccccatctctactaaaaatacaaaaattagccagccgggtggcaggtacctgtaatcccagctacttggg

SEQ ID NO: 6391 - DNA, 1045 bp, Homo sapiens
agacctttctgttggaataattctcaattctttgtttatgtgtcttctgaatcacgtttttttgtttgtttgttttgttttttcttttttattcagttgctttctacatatctgtacctgattgttctgagctgcttttccttagcaaacttgcctctttggtgttctttatttttgttgatgtcataccaaacccaaaccttttcccatttcatcatatcttgtctgtagccaacatctgttgattctgctttatgatattgtaactcttctgctctctattcttgctaactgtggggcaattctgaattcatattggtgtgaaggtagtagtcaaatcataaaacgagttgggcagctttccttctttttctctttttcaggatcattttagactgggattatctgttccttgaaagtttggaagacctcccctatgtgaccatttaggcctagatcttttttctggagaggactttgagtaacacttcaatttctttaatagctgttggtttgtgtcgattttctgattctcatatgaattttaatgtttcacatttttttcaggaatttattttcaaatctagtgttatttggctttcacgtagttctccccccaccaccccgcgactccacccccaccccctaactctaaatcaagttctcatcccacctggactaatgttatgattttcttgccttcacttttctcctttatctaatcttatgtatttctgcctaaattaatctgtaagcccagttcttaccacttcgccactcagaagtttcctaggtcttccattaaatgaaatattttctgtggtatttgcctcagatttacctgtttttttttttttttttttttaataccttattgttttttctttctttctttctttctttctttttttttttttttttttttttgatacagagtctcgcactgtcgcctgggctggagtgcaatggcgtgagctcagctcattgcaacctctgcctcctgggttcaagggattctcctgcctcagcctcccaggtagctggg

SEQ ID NO: 6392 - DNA, 1058 bp, Homo sapiens
gtattctcacatccctcaattattacggaatgaactgaccatgcttctagccagggccaaaacctgcactgtgctcactcagcccttgcctctacactctgcagggtcattctcctccacaacaacatactgttgtttctctcatcttaaaacacaacaaaacttctctgaactccatttttccttctaaccgttgttcatttcccaccccgaccccttttttccctaaaagaagtatctgcactttgtttccaatttttctcctcctgatatttcaggaggctttccctcccagcaccctgtttcttgcactgctcttgcgaggtcagctctgaccctacctttctcatccttgaattatttgacctagtaacagtatttgacactggtgattacttatttcctgctcgttgaaacactttgttcacttggcttccaggatagcatacaaagaaattccccatctcagtcttttgtcacagagtccctccagggctcagtccttagacctctgttttaactatgctcatttccttgttgatcttatttgacccactggctttgaaaccctctttgttttaaagtttgacggaagtccaaattttaaatctccagcctgagccgcttctttgaaatgcagacttatgttccacctggatgtctaataggcaaatgaaatgcagctttctctaaagggaacttattcttcctccagtaacttaatgggccatgcttagaatggctctttttgtccaagaaaattcaaaaccaaaaccaaatctattttcttctgctttaacatcagtctacagattatttttggtctaaagcatgagatagggctttttatttatttttaatcaggcggctagctagtttcttaacagtattgaataatatatttttaattgtttgaattgtcatctttattgttctgagaataatatcaaggatttaagtgaaattgccatctaatgtttgcattatagatttcatgcccctttaaaacatgtgttatatcaattgagagcacactcttataaagtacaatcaatgat

SEQ ID NO: 6393 - DNA, 1046 bp, Homo sapiens
gtcaggctggtcttgaattcttgacctcaggcaatccacccacctcagcagaactcatttgggcctgttgttttctgttttggaaggttactgcttactgatgcaatatctttaatagatataggcctatttggattatctatatcttcttgtgtgagttttggcatattgtgtcttttaaggaattgatccatgtcatctaaattatcaaatttttaatcatgtttgttcataatattcctttataatccttttaatgtacatttagaagggatctgtagtgatcttttttttcatttctgatactagctatttgtgtcatctttttaattaattggcttagctaaaggcttatcaattttatgatcttttcaaagaaccagcttttagtttttcttactgatttcctattttcagtatcattgatactattatatttttatttcttttattccacttactttggatttaatttgctctttgttttctattttccaaaggtggaactgtgagctttggtccattcaacttatttcatgtaacgtcaattcaccgaaagagttaagagatttgaagcaatggcctgagtttgaatcctagttctccactcattgacaaaccacttgtcctgtctgaaccctatctcccataaaatggaagaaggatattacttaagttatgagattgcttgaaattcagttacaatgtgggtgaaaactgattttaaactgtgaagtgctacagttttgatattatcacttccttaaatgtacaaagattatttctttacaatcaccattggaattttgcctcaatttatggtcaaactttgtctggttttcagtttccagaatttccatctctcacctgctacccaaatcaggatggctaccaaacctgcccatcttcagtaatctttcgtttctctgattcatcacaggttacttatagggatccagttatcttccctgaatgtttctcagtatttgaattgtaaattataatcctgtcttggaacaaaagaacttgaactcatattgagtcct

SEQ ID NO: 6394 - DNA, 1035 bp, Homo sapiens
cgttcctaggctggtctcgaactgcatgttcccaggctggtctcgaactcgtgggctcaagcgatccacccacctcggcctcccaaattgctgggattacagacccgagccagcatgcctggcctcacagatatttcttgatctacattttattcattatttaggtccaactttagcatgtgtcatgtatttatatacaggttctaaatctttccatttgaaaaatactcatttttctatccaaaatgaattcaattttcctttttattctagtcccagtctgtgtatgagtaaaaccccaaggaccctgtatcctgattttactattttttgttaatggtttgaaacagctttattaagatataattcacataccatacaattatttaaagggcacacacttcaatggtttttagtatactcacggatctgtacaaccattatcacagtcatgggcaattggttcaggatttgggaagaaaacgtatggcattaggattaaaagtacaatgtttagagtctggctgatctgggtttaaatcccaaatctaccatgtattaactgtgtgactttgagaaggttacttaatcactatgagcttcagttttctttttttttcccgtttttatttttatttttatttttattttgaggcagagtcttactctgtcacccaggctggagtgcagtggcgcgatctcggctcactgcaacctctgcctcctgggttcaagtgattctttgcctcagcctcccaagtagctgggattacaggccaccatgcttggctaatttttgtatttttagtagagatggagtttcaccatgttggccaggctggtctcgaactcctgacctcaggtgatatgcccgcctcagcctcccagagtgctgggattatagatgcaagccactgtgccggcctgagcttcagttttcttatctgtaatatgggattactagtggtatctggctcataggcttattttaaggattaagcaagataataaatgtatagaatttagcacagtaac

SEQ ID NO: 6395 - DNA, 1026 bp, Homo sapiens
ttaaatttcaaaatagaattttgtaatttactcttaattttcttagtatgttgtattccaaaattatagaaagtgctataatagacatttatgtacattacataaagtaatagacatttatgtaatgtgggcatagatttaaattttttttaaattgttaaaatattaacatttaaccatgtctgctttagataggtttaatcttacaaggatctatctacttatctttctatctatttataatgtatatatccattttaaataataataacaatacatgaataaatctggtccaaacttctatcttgagaaatgtaacagcaattttgaactccttcatccctcaagacaattattcctcccttcccagaggtaaccatcctcctaaatttgatgtcattcccttagttttttcttaagttttaccacatttgtgttgtccctttaacatacttttttttttaagcttttcctgtttttgagctttatacatatggaattattctgtatatattcttcttgggcttgatttttttatttatattacaattttgagatgtcatttatgttgacattgttagccgaagttcattaatttttcactatttgatataatattccaaattactggaatatggaatattctatgaatataccacagtccattttactgctgcttgacacctcggtttcacctagtttttggtatggaaaaaatactgctttaaatattcttttgcgtggctcatggtagctaagtacaaaaggttctctaggttatatgcatagacctggattgttgagtcttgggtgtatacaccatcagctttactaggtatggcagaatgtcttcttttacacagttgtggaataagccagatgagttcaagaggagcaagtttgtgagaggatggacaagtgagttagtgagttacatttcatttgttttgagttttagcctatttagttagaaatgttaagtaggcatttgagatgtgtttacttttttagctccacccatctttg

SEQ ID NO: 6396 - DNA, 1023 bp, Homo sapiens
catcagctggagggtggcagaagaagaagagggtaatcagacaccttgacgggaggtttgctaatctggcttagcagggttctttgctaaaacaggaatttacaaggaagtacacagataggcctgggagaaaagttcaggagcctggctcatttggtcaagcaaagaatctttgccagagcccaggggtgtgcagttggtggcttacctgtaagtagctgtgccattttacatgctcactggcagtgtatgagagatccagtttcttcacattcgtgtccacatttggtgttgtcactatttttttattttagctgtgccagtaggtgtgcagcatagtttggtttgcgtttccctgatgtctagtaatgttgaccatatcttttcatgcgcgtatttgccgtctatatatcctcttcaataaaatgtctttatatttcttgcccattttctagttgaaatttttttcaattgttgagctttgagatttctttatatatcctagatgaggcttttatcacatatattgttagcaaatatattttcctagcctgtacctcatttttttgccttcttaaacaggtcttttgtagagcaaacatttttaattttgttgaagttcagtttatcgtgtttttttttctttcatggattgtatttttggtgtcattccccattccccattccccactctccagccccagacggccacgaatctactctcggtctctgtgaaattgcctattctgaatatttcctataagtggaatcatatgtctggcttctttcacttagcatatattcaggcctcatccctgttgtatcatgaaccagttctttttatggcttcgtttatttttaaggttgaataatgttccactgcatggataagaccacattttgtttagccatttgtcagctgatcggcaattaaggttgttttcacttcttcgtctgcatcagtacagctgcatgtgtacccttcagccctgcaccttccttatacacgatgcacagatgtac

SEQ ID NO: 6397 - DNA, 1030 bp, Homo sapiens
caggtagaacataggaggttatgtgagctgagctttgaaagatgagtaaaatttagatgggtaaaggatatttctggaaaagtgcatggatagaaaatgaatgtttttgtaggaatgtggtgaaggtcttagaaagggcaggaagtatgatgtgaagaaagctcttttagtgaaattactctagcagtgacatataaactatacatcattagagaaatgaagtgaggaggtagggagccgagtgaggagattgtggcactagttaggcataagctgatcagaattcaatcagggtggtgattgtggaaatagaaaagaaagactcaatgataaaggtattgcggcagaagaagggacaccgatgtgtgactagatgttggaaagagatgatgccgcctgaattttgagcctggatggtggggataatgttggcctcattagtagccaaggtaagttggatcctacttttctaaatgtagagaaacattaaaatttatgttttactgtactgttggtctcttaatttgtttatgtgcaacaagtttttttggcattatttttccagccttaacatattcaaagggagattttatgaaaaaagcaaagtatgacctcttttacaaaagcagtttttaaggaaataaactgtattctgttcatagttacctcttttgctatcatgttaaatgctatgtaagatttagtaaaacttaagaatgtttaaagtatttctacaggtataattcagacaccattaccaaaggatggtatcttgttttaatagaattaccgcttaaggaatggggacctgtgaaaaattcattcagtagaattcgatggttccatattaacagataggcattattatggtactgtccattagagaaatattgtacagtaaggcagtaagttaattatataaaactggcttttaaaatgcatttattaaaattcttatcaactgttaactgatgactgatttagaactttgcaatatttagaaacagtctaatactctctgttgaaaata

SEQ ID NO: 6398 - DNA, 1048 bp, Homo sapiens
tgcctttaaaaaagaaaagtctgaaatacccctcacaactgttaaaaaaaaaaaaaagttctttcaagcacacgtggagtgttttatgaaagtgaccatttactaggctatacagcaagttcttatacatttcaaataaaatcaaccatgttttctggcgagaaagcatgtaggaagtgaataacaaactgtacacattgggaaatttaaaaacacacttctgtaaatcccacagattaaatataaaataatcaatttagtgaacacctagaacaaaacaatagagaaaataacagcctgagcaaaatagtgagaccctgcgtctacaaaaaaaaataaaaattagcccggcacagtggtgtccccctgtagcccctactcagaaagctgagatgggaggattacttgagcctgcaaagttgagtctgcagtgagccatgataacaccattacactctagcctggactacagagcgcaagaccttatttcaaagaaaaagaaacttaggacatattaaaacgtgtgtgaaaccctgaagccttaaatattcatatttgaaaagaagattttaatactaataagctaatctaagttagggaaagagcatggcagtaaattcaagtgaagtaaaatagagaatacagataaaagctaacaattctagagttcttactctattccaagcaccgttccatgttctttacaaaggttatctcatttaatcttcacaaagccatatgaggagggtattgttattatgtgcactttacacaagaggaaacttaggcacagagagaaacttatccaagcctctagctaataaatgtgatagaattggggcttgaaatgatgaattttttaaaaaaagatacattgaagaggattaacagagctgaaagttgttttttatgaaaggctaataaactatttgaaagattgatcaagaaaaaatataaagtacaaataatactgaggatataaaaggaagatacagaagaaagtcttaaaaataaaatatcttgaatcactttataccaataaatttta

SEQ ID NO: 6399 - DNA, 1051 bp, Homo sapiens
agactcttccaagctgttgagactccctccaggcaggggaatgactatctgggtctgagattatgtcattaagttctttttttttctttttctttttttttttttttctttttgagacagagtctccctctgttgcccaggctgggatgcagtggtgcaacctccactccctgcaacctcagctgcttgggttcaagcagttctcctcagcctcccaagtagctgggattacaggcacctgcctccacgcccagctaattattgtatttttagtagagacagggtttcacatcaggtctcgaactcctgacatcaggtgatcaacctgctgggattacaggcgtgagccaccacaccctgcgtcgctaagttttttaaccagagaggcttcaggtttcagacacacagaagcataattctggccatacaaaaacctcagtttcttctgtcttccacccaatcaaagtctccttcaaaactttaagtaagtttctatttgccacttcaggacacacctgcactgaactagacactgacttagaaacttggtttgatttggcaaattttctgttaaaatgctccatacttttcttatgcctattagagttatttctgacctactgtatttactttcagaattttctgaagctataatctttcaggaaatagtactattttttgaaatagtatttctattttttgaaaatagtatttctattttttgaaatagtacttttcaaaaaagtactatttgaagaactcttgagtatttactttctgtaaaggaagttcacatgtggcagctttctcctgagtatctaatttgcaattgcctaactgctcagtgacatccactactgtctgttctttgtgtttggcattagctttgagaccagctttctttttcattatgcttttttggtgcagctgtcgtctaatacttgttgaatttggtctgtttcctggtagaatggaggaaacaaagtcttgctcattatcactgctgctgtcattatgagtgctggaagaacaattgctagaagattcatat

SEQ ID NO: 6400 - DNA, 1048 bp, Homo sapiens
atatatatgtggaaaaccctaaaaacttcaccataaaacttttagaactgataaatgaatttagtaaggttgcagagtacaaaatcaatatacaaaaattagtagtgtttctatacaccaataatgaactagcagaaaaagaagagagtaatccatttacaaaagctaccaaaaaatgaaatacatttgaccaaggaggtgaaagatctctacaaggaaaactataaaacactgatgaaggaaattgaagcgggcacaaaatatggaaagacatccatattcaaggatttgaagaattaatactgtgaaaatgaccatactaccaaaagcaagctatagattcaatgcaatccctatcaaaataccagtgacagtcttcatagaaatagaaaaaaaatcctaaaattaatataggaccataaaggactgcaaatgccaaagcggttctgagccaaaaggacaaagctagaggcatcacactaccagacttcaagatatactgcaaagctgtagtaactgaaacagcatggtactagcataaaaccagacagtagaccaattgaacagaatagagaacctagaaataaatccacatatttatagccagctggcaaaggcgccaagaacatgctttggggaaaagacagtcttcaataaatggtgctgggaaaactggatatacatatgcagagtgaaactgtacccctgtctttcaccatatacaaaaataaactcaaaatggattaaagacttaaatgtaagacaaaggcaccaaagacaaagtgaatcatctattttcttttattattattattttttgaagtatagagatggggtctcactacattgcccaggctggtctcaaactcctgggctcaagtgatcctcctgccttggcctctcaaagtgctggggttataggtgtgagccattagcgcccagctaaatactgtattttcagcccatgtttgcctgcaatatgaagagattgctatacttattgaaaagaagagaccggaagtggtggttcatgcctgtaatcccagca

SEQ ID NO: 6401 - DNA, 1049 bp, Homo sapiens
gtaagtgcttggaaggggcaaggcagcagtcccggggaagaccattacaggcatagggatctgcacgtgccagggtcctgcagcaggactgtgagcggcaggtgcaaggaacacctattaggctggaacggagggagggtggaccactggagactttagctttttgtctgagtgagttggagcaccgttggagggatctgaatggggtgtgatgtggtttaacatgctttctcttaggatcactctggctgctgtgttgcaaatccatagtgggcacaggtggaagcaggaggccagttaggaggtgccttcagcaatccaggcaaaggggttagtggcttggtccagagcgagcagtggaggtagtaggaagtgtgtgggttctggacagattctgcaggtacaaccagtggatttgatgacaggaaatggaatgcaagaaggaaagagggagttgtcaagaatgacttgagattttaggcctggttacatcagtgtagcgatattctaaaaataaaaaaaaaaagattttagacctgggacttttaagattttacaccaagtaaagaggctgtcaacggaggtgggaaagacttaggatctagcaaatttgggagggaagaggcaaggaaagataaatagtgacaaattgtatagttgctgataacattgttaagtcaatatttatactatttgagctgcctttttttttttttccccctctgagacagtctcgctttgtcgcccaggctggaatgcagtggcacagtctcagctcactgcaacctctacctcccaggttcaagcagttctcctacctcggcctcaagtagctgggattacaggcacccaccaccaggcctggctaatttctgtatttttagtagagatggggtttcactatgttagccaggctggtcttgaactccccgcctcaagtgatctgcctgcctcagcctcccaaagtgctgggattacagacgagagccactgtgcgggccttagctgtcttaaaaatagcacttatagcagcctgtgttttcttttca

SEQ ID NO: 6402 - DNA, 1049 bp, Homo sapiens
gcaagatctgacagcgtggacaccaaggcaggcatttcggtaagatttctgtgtattacctcagatacactcagacaactctttaagcaagttattttcttcagggtttatgtttagatttgcgggatattgttttctacactgatgtaaataactgcgagtggtgttgctccagttgtacaagtgtgtattcctctaaggattgatggggaggagtgtagagaacgggaaggaatggatgagttgcttgttaagggaaaagatgatattcttatgctaatccaggccctggataaggagcagagcagccatgcgaacaatggccttggagccaggaagtctgcagtgagtctattccttctcagaaagcttgtcagacccggcgcctggagctgcctggcggggagggacccctggaaaggagagttttctccttgctattttatggaattggctgctggccagcttgttggaaattcccaaacttctctactagaaagtgaaaatcaacggtggggggcttaacaggaagaggaaggaatgactttactctgtagtctgttttttcaactgacttcagccttttcctgtgtttttttttttttaagttccaattgaactgttggttcagttgtcttgctgtttgaggagttttaaaatcttttacttaaaaaagaaattatttatatttgagtaattctgccttaatgttattttcctgaaaagaaacagtaccagtctgtgtatatagcaaggggaagtaaatttatttagatgcccatttcgtctaactattcaatagcttttaaatggcagcatgattaaaaaattttgattatgcagcatgtcaaatatctgcatctccttatattcttcactttgcaagattagatatttttaatgtaaaaattccgatgaatcatttaggaatttaaaaaatatattttatcgttagatattacaattacataattttaagaatgattgtggccaggcacggtggctcacacctgtaatcccagcactttgagaggccgaggtggacagat

SEQ ID NO: 6403 - DNA, 1085 bp, Homo sapiens
agttcctgtaaagttgtagtggtcctacattctgtttgctctgatctctttggtttcactccattaaacacagttaaatatcttgtcttgatgtgtgttctgagaatttctgacctagccactggcctctgctttgcctgttctcctggcctttggtttagtgacctccgctctgaggcactctgctcctttcccatgctagaaaatgacctgctttatttggtattgtagcacttacctatgaataaatattaaaatagtaccaaatgtcagtatttattcatctttattgtctttctccgtcgaagactgtaagctttaatagatatgggactgtgttttgtttactcttctagtcacccagggcttaaaacagtggctaccaccgtgtactcactcagtacattttggtttaatggatgaatacagttaaagtgaaaaaagcaagttgcaaagctgctttcttagccatatatttttacactgaccaacccagtaacaacaagcacctgtaacaacccagttgtagtatctgattgtcttttttcactaaggatctagaactccttggagaaatcactgagttcaagttcggcagggaaagagcaaggtgatcttggtattttggccagaaagcaaggaaaagttcaaaggattcagtgaccagtttgaattgaatactaattgtagtggattcaaacaaatcaaatatgtttaaatccacgtgtttgtaataacacttaagaaaaaaactagttagggctgagggctgtgacttacacctgtacatgccaacacttgggaggccaaggcaggaggatcacttgagcctcaagagtttgagaacatccacggctaaactgagagtccctttaaaaaaaaaatagtttgagaccagcctgggcaacatagagctggtctctacaaaaaaaaaattttaattagctgagtgtggtgatgtgtgcctgtattcctggctgaggtgggcgggagaatcacttgagcccgggagcttgaggctgcagtgaaccaatgatgacgccactgcactctagtctgggcagcagagcaagactctgtctcaa

SEQ ID NO: 6404 - DNA, 1074 bp, Homo sapiens
tcagtttgggagtgatttgctaacacagtattggataatccagtgtccgactttctgaaaattgactttcaagcagtcttcttggtgttattgtcaccctcaactttacttccagacataaccacaatggccagttccgaagttcttgggggaactccatagtataaactggttgcttcttggttttctcaatttctaacctaagaatcagactttttgggtgtgcaaagtcactgctcattcatctgcttcatgaattccaacagtgtttactgttattttatctccttttctccttgcctgttagataaagaagtttaaaactctttattgctgttttagtggactagtaaaagcaagcaagtatgctcaatcggttattttaagctcaaagtccctttgtcaaataactgaatctttgccagtaagacaggtgataatatctcaaggtgattttaatttatattttcatattaaaatactttttttatacattggtttctttattacacaagggcactgtaatgtatatattattttatttatttatttatttagaaatagagtctcactctgtctcccaggtggagtgcagtgatctcggctcactgcaatctctgcctcccaggttcaagcgatactcatgcctcagccttgcaagtaactgggattacaggtatgcactgccacacctggctaatttttgtatttttagtaaagacgggggtttcaccatgttgaccaggctggtctcaaactcctgacctcaagtgatccacccacctcgccctcccaaattgctggaattacaggcgtgagccaccgcacctggcctctaatgtgtatagtaaaatattgttgagtatgcttttatttttcttttaagaaaagaaccatctatatttttatttaaatcatgtattcattttggggggcctgtttttccattgaattgcatagatttttttctctttgatttatagaagctctttatatttcagaaatcagccctttgtaatatgagctacctatacttttctttttttgtttttttttcatgctgcgttacctcag

SEQ ID NO: 6405 - DNA, 1027 bp, Homo sapiens
atcccagcactttgggaggccgaggcgggcggatcacgaggccaggagatcgagaccatactggctaacatggtgaaactccgtctctaccaaaaatacaaaaaaagaaattagccaggcgtggtggcgggcgcctgtagtcccagctactcgggaggctgaggcaggaggatggcgtgaatccgggaggcggagcttgcagtgagccgacatcgcgccactgcactccagcctgggcgacagagtgagactccgtctcaaaaaaaaaaaaaaaaaaaaaaaaaaaaaaaaaaaaaaacactttgtccttttatctgtctcttctgtttttgagactccaattatacatattttagattatttggtgttgtgccacagctctttaattcttcagtttttctcacttgttttttctctttgtattttagttcaggtaacttctatttacctattttcaaatgcacagatttttttttttcttcacctgtgtccatctgagctgtgtattgttgagctcatcaaacattcttcatctttaatagcatgttttccctttctcacattcctgtctgacttcatttttctgctgagactctccatctgtgtattctgttaccaccttcaccagttgccttccccttttaatcacagttctgtgaaaggccctcctgacagcttcagcacaagtgctgtctgacacttggcctcttgattgcctgccctcttggcagtgagtgattattccttgctttttaatgggtctcataagtttatttggatgttgtacatcatgttaagaatagcagagattgtcacaatgagatatcaacctcaccccaattaaaatggccattatcaaaaagaaaacaaatgctggggagggtatggagaaaggggaaccctagcacactgctggtggaaatgtaaattggcacagctactatggagaacagtgtggaggtccctcaaaaaactaaaatcagaactaccatatgatcttgcaatcccactatttggtatatatcca

SEQ ID NO: 6406 - DNA, 1034 bp, Homo sapiens
tcacatttacccacatagtttcacgttgtcccatgttttttttacctactctaccaattatttttgccctccagaagtaaatgaggcagagatttgaagggcatcactttattccaaagttgatcattagtgagggggatttttacagtcttctttccctcctccctcagctgcctcctggttagagatgctaacaagaattacgatggtcctaagatactggaggaagtaaaaaagttgaaggccctacatattttagttcacgtttggcatttcttggtctttaccctatgtaaggcaaggagaaaaagacatgaaatttaaattacagataaacacaagtgtattagtccattttcacactgctatcaagaattgcccaagactggataatttataaaggaaagaggtttaattgactcactgttccacatggctggggaggcctcaggaaacttacaatcatggcagacagtgaagaggaaccaaggcatcttcacaaggtggcaggaaggagaatgaacacaggaggaactatcaaacttataaaatcatcagatctcgtgagaactatcacaagaacagcatgggggaaccgcccccaagatccaattacctccacctgatctctcccttgatgtggggattatagggattacaattcaagatgatattttaggtgggggcacagctaaaccatatcctacaaggaatgactgaaactaaagatactaatttcctttcccttggttggccaggctgtcgtcttcattactgactaatagagaccaagcaggttggtttaatcccattgccctctagtgctttccaatgttggccaaaatgttgcctccattttaaacattcctcctggggaagaatgtctttctatcatacgataagggagaagagaagaggaagcaagagaaaagtttaaagtgttgtacagaagtttccaaccacaggaggagcaaaacaccaaagaagttgtagaatacagggtgtggtgaagagttggagcccaggccgtgctg

SEQ ID NO: 6407 - DNA, 1045 bp, Homo sapiens
tatttttctttttggattaaattatttgtttatgttctgaggaaaaatctttaaaagcttagttttattgtttttgttgttctttataaccttagccttcagaaaaataaatgtttaactttgcttcttctgtgacttgttcacctgaattcaagaaggtggaattgggcctaaggaggtggctcacgcctgtaatcccagcactttaggaggctaaagtgggcggatcacttgaggtcaggagttcgagaccagcctgggcaacacagtgaaaccttgtctctactaaaaatacaaaaataagccaagcgtggtggggggcctacaaaaattagccaggcgtggtggcggggagggggttgggcagtgcttgtagttccagctacttgggagaaccacttgaaccagggagagaggttgcagtgagccgagatcgtgccattgcactccagcctgggcaacagagcgagtcttcatctcaaaaaaggaaaggcagaattgaagaagctttggaagaggtgaggaatagagctgtggaaattactattttttttttaattgagaatctcctgtgtgtaggtgccttacaaactggcttcatgagtaccctataaaacagatgtttttatttttaaaatcatcatggttttgttttgttttgtttttttgagacagtcttgctctgttgcccatgctggagtgcagtggtgcaatctcagctcactgcagcctctgcctcccaggttccagtgattctcctgcctcagcctcccgagcagctgggattacaggcgcccgccaccatgccaggctaatttttttgtatttttaatagagacgaagttccacagtgttggccaggctgttctcaaactcctggcctcaaatgatctgcccgccttggccaccgaaagtgctgggattacaggtgttgagccactgcacctggtcattatgttttaaaattacatacaagttgttaaaaaaatatgaacagcagaaatagattttagaaaaacagaatgaaattatccatctcttcccc

SEQ ID NO: 6408 - DNA, 1028 bp, Homo sapiens
aagattcaaacctgtgtatctgactccaaagttatactatttatactattccaaggagtattttaagtatttgttccatttagttagaaattatttactgtgatataaagtctaatgaatttcaactttagatttatgattgcttttgtaaaatatacagataatttgcaaagtaaggtttttttttatttttatttttcgagacagggtctcactgtgtcacccaggctggagtgcggtggcacgatcacagtttaccacagcctggacttcctgggctcaggcaatcctcccacctcagcctcctgagtagctaggactataggcacctgccgccactcccggctaacttttgtctttttggtagaggtggggtttcactatgttgcccaggctggtctcgaactcctgggctcaagcgatatgcccgcctctgcctcccacagtgctgggattccaagtgtgagccaccatgcctcacacaataaagtttaattatttgtagtaatttcccattcaaacgaagaccaaaattcagcttgaagggaacattcaatagcattccacaaagtcaaatgagttttctgccttagagttttccttagctggtttaaaattccaggtctgtttttcttgatccatagcatgcttttttctctcttaaaaatattttagaagaagattgttaggatttagaaaaacatagcatataaattcttgaaccattcatttttaaaaataatttaatttgaaaggtaaaaatatactttctactttctgtctcactaaatcagtctattctggacttttcctataaaagatgtatgtggccctttgtgaccgtcttctttcacttggcagagtattttaaaggtttatgcgtgtagcatgtatcaggtacttcatttcttgttatggctacatagtttttgttgtatgactgtaccacattttaaaaatctattcatcattgatggacacttggattatttccactttttgactattctgaatgatgctgcggtgaa

SEQ ID NO: 6409 - DNA, 1491 bp, Homo sapiens
catcttctgattcattaacatgggatatctttctgtatatgtaggtcttttaaaacttctctcaggactgttttatcactgtcagaggataagttttgcacttcttaaaaccaagtaagctaagttagcaattcccaaaaattatatgagatggtaactcccgaaattctgtggcataacaagattatttccttaatggcaagcatattctggccccagaataatttagaatcaagtatagaattcaagagaatcaaggctgcagcagtaatactttgagtctatacccttgtgtatatttggcttaaatgttttaggagaattggcctttgaaaatttaagatatttgttatttcaaaataaaatgtgtaatcaactaatacaaagcaagttttgtactttttgttgaatttattactaagtattctttttgatgcaattgtaagtagaaatatttatttattaagagatagggtcttactgtgtggcccagtatggccttgaactcctgggcttaagacatcctcctgctgcagcctcctgagtaactgagattacaggtgtgcaccacctcgcctggctcagaatggttttcttaacttcatttttagattgttcactgtgaatatatcgaattacaatagtttaggctgggcatggtggctcacgcctgtaatcctagcacttggggaggctgaggtgggtggataacttgaggccaggagtttcagatcagcctggccatcacagagaaaccttgtctttaccaaaatcacaacaaattaattagctggttgtggtggtgcatgcttgcaatcccagctactggggaggctgaggtacgagaattacctgaacccaggaggtggaggttgcagtgaaccgagatagttccactgcactccagcctgggcgacagaacggtttttgtatgcttcaaccttactgaactcatttattcattctgatatttactttagtggattctgtatgattttctatatgcaagatgctgtcatttgcaaatagagatagtttttctttttttgtttccaatctgaatgtgttttatttcattttcttgcctaatgctcctcattagttttcaatgttgcatagtattttattgcatggacgcaccataattacttttaccaatctcttattgatggacatgaaggttatttccaaactcttgtggttataacaatgctgtaatagataacctattacaaagaacagttctcaactcttttggtcttgggactactttacctatttatgtataagtttcaagtttgggcttagaaagaatttaataatcatgctaattttgttttgttttctttttttttactcctggacccaagcggtcttcccacctcaacctcccaagtagctgagactacaagggtgaaccatcaccctgggtaatttttaaattgttggctgggcacagtggctcacgcctgtaatcctagcactttggga

SEQ ID NO: 6410 - DNA, 1042 bp, Homo sapiens
ttttttccttttagtgagcatgctttaacaaaaaacaataacagaaactgtgtcaaagaaaaggacctgtaatcttcagggtttgtagtctttttcctcttaaaaaacccttttcctaattaatggcagttacatctgcatggctggtttgggtaagtcttcattttgttgtattgctgagtaacagtcaacaaaggtttatcaactcttggttaagggttcctttcatgttgtgagtaaacatgaacaatataggatcttatccttttaagctatcatgcaagaaacatgtgaggtctcttaaaaattcactgtgctggccgggcatggtggctcacgcttgtaatcctagcactttgggaggctgaggtgggtggatcacttgaggtcaggagttcaagaccagcctggccaacatggtgaaaccccgtctctacaaaaatacaaaaatcagccgggcatgatggcgggcaggtgcttgtaatcccagctacttgggaggctgagacaggagactcgcttgaacccgggaggcggaggttgtagtgagccgagattgtgccactgcactccagcctggatgacagagcaagactccatctcaaaaaagaaaaaaaaaaaaaaattgtgctggctgggctcagtggctcacacctgtaatcccagcactttgggaggccgaggcgggtggatcacctgaggtcaggagttcaagaccagcctggccaacatggtgaaaccccatctctacaaaaatacaaaaattagccaggcataatggcgagtgcctgtaatccaagctacttgggaggctgaggcaggagaatcgcttgaacccgggagtgagccgagatggcgccactgcactctagcttgggtgacaacagcaagattctgtctcagaaaaaaaaaaaaaattaactgtgcttataaatgggagctaaattaggaaaaaaataaaaagtaaaaagaaaatgaaaataaaaatttaaaaaatatattaacaaattaactgtactaaggtaggattcttttttttttt

SEQ ID NO: 6411 - DNA, 1028 bp, Homo sapiens
tagtgaagaaaccttttccaaaggcctgccagctaccttcaactctcttagaccccagtagctaggattgggttggttacatgccacgccctggctgtaagggaggctacaaggaagacttactggcactttttggcctctgaagtacaggcagactgtgccagccaggaagaaaggtagaaaaggaataattggttttgtttgtttgtttgttttgagacggagtcttgctcttgttgcccaggctggagtgcagtggtgggatctcggctcactggaacctccgcctcctgggttcaagtgattctcctgcctcagcctccccagtagctgggattacaggcacctgctaccatggctgactaattttttgtatttttagtagagacggggtttcaccatgttggccaggctggtcttgaactcctgatctcaggtgatccacccgcctcagcctcccaaagtgttgggattataggcatgagccactgttcccggccagaaggaataattgttagacaactcacagtgtctgccatatttgccacagaaaataactgacttgctctctgctgtcttactgtgataatatatttttttaacgcaatttacaaaagggggggaacattcttaaatttgaaactaggaattatgatatttgcagtttcatattgtatacagtaaacagtcttcaaattctagttctccttgagatcttatacaatgataacagttttaaaattatgccttctgttttttgaacagctttttactattgacagcttttaaggaagtagttttcatgttgtcgtgtttactctcttactagacaggaagacagaacagaaatccatcctcaacttctggggataatctgaggattataatgaaatatcagatgcttaaatgatttcaacagacttttagatgaagttgccattagcaccttgttatcatcaatgtaacacataggcaagtggattaaaataagagggctaaactggcctttatgttgaaattagaagttt

SEQ ID NO: 6412 - DNA, 1021 bp, Homo sapiens
acacatcatcacacctggctaatttttgttttttgcttttttgagacggagtttcgctcttgttatccaggagtgcaatggcgtgatcttggctcactgcaaccttcacctcccaggttcaagtgattctcctccctcagcctcccaagtagctgggattacaggcatgcgtcaccacaccaggccaattttgtgtttttagtagaggcgaggtttctccatgttggtcaggctggtctcgaactccggacctcaggtgatccgccctccttggcctcccaaagtgctaggattacaggcgtgagccactgcgttcagcctaatttttgtattttttagtggagacgggattttgctgtgttggccaggctggtcttgaacccctaacctcaagtgatccaccgccccttggcctaccaaagtgctgggattacaggcttgagccaccatgcccagcctagagatgaggtcttgctatgttgcccaggctgatctccaactcctgggctgaagtgactctcccaccccggccttttaaagtactgggattacaggtgtgagccattgtgcttggccaacttcatttctaaataactaaaatttccttagctctgtttctactaggtaatagagaacaatcctgctaaacaatcttgccactttaggataaaaagtcagtagcttctggcttaactaaattaattacatgttaatctaaacccttggtaaatacttggtccttttggtaaatgttcagtttcctcacagagcccaccccttccctttttttccctatggtagatggtattggtagagaaatcttataatttttcctggcattaagggagagtcatcttatctttgtgctgtcctctgtccttctgagccattgcaaatgactggcttggtcttgaatgggattgtctgcctctgccacttctgaggatgatgtccctgctactactgtagcccctgggcaacacatctgtgcatgctgggtcctccttaatcccaggctgtt

SEQ ID NO: 6413 - DNA, 1001 bp, Homo sapiens
gcaaaggagctggatataagattaacatacaaaagtcaatcacatttctagagtgactaacaataacaaaggaagctgccattgacaataatattattttgtactaatagtaataaatgtaacaaagtatgtgcaagacctaaaaaaggaaaaatttttaaatgaagaaaaactaacaaagaatgaaataaacatatactttattcattgattggaagatttaacattgtgaagatttcagttcttttcaagttgatttgtaaattcagtgcatgttcaataaaaatcctcgtaagatttcaagggctcagtggctcatgcctgtaatgccagcactttgggaggccaaggtaggaggatctcttgaggcaaagagttcaagaccaataagattttcatgtaatttgataagattatatgatatttatgtagaagagtaagtggttgaaaacagcagggcattttaagaagaaaagcagggaagaataatttgccctatcagctatcaagacttagtatgaacctatagtaactgagatggtgtggttttgcccagttgaagtcagttaaattttaattttgagatttctgtaaaagatacaagtttagtcttttattatgtatatttgaaggtgttacattttggaaagtgtgtgtgtgtgtgtgtgtgtgtgtgtgtgtataaatgatagctaaatggcttctaagtaaaattcagcatatcttgtatatgttgatagaatagaaggggaaggaatgttttgaaataatgaaaataacatggtatgcaaatgctttgcaagagatttgggaaatgtagatatctctggttttaaggatgatctagattcaagtaatagttcagtaatttcataaaactcttatgacaaaattctggatggagaatattctatgaatcccctagagagtttcaggtttttgtagaattatgtgaaaaatcttgaactaattagataatctttagaagttacttcacaatc

SEQ ID NO: 6414 - DNA, 1033 bp, Homo sapiens
ttcattctttttatcagctacatagcattaagatgtaggatgcactgaaaattgttaatccagttccctgtttattgatatgcaaaacagtttatttctgataggaaagaattcagttgaaaaaagtaacttgaaattgtgattgtgaaatatgtgattattatttttattttcatttctaaaaataatttataaaacagtttaatatatttttatattagtatctgaaatttaaaaatggatatagaataaataaaatgtagtaatttatcatttgaagctcttggggaaaaaaaaaaacctttttttccttctaggatgtcacagaacatcctagagttgttttaggcattcaaattaatcctgcataaaaaccaagtgctttttggaattatttttcatttaagcatttcttttatctgaaaatctttttgaaggtcgtgtgttgtttactcttttgtaggccagcgttaatgactgccattgatggaagacatgatgtttgtatccgtgtagaatcaaagctgatagagaagattcttctcaacatttctgcagactgcctcaacagagtgataggtaatatatcagtgtgccatcaagaagttgttttattcaggagtataaatggtatatcggaacagaaagagcactgtactttaaattaagagcttttctgtccatatgaaaaccgaaggataatttagcttaagtgaaatataagcctatgtaagttagaaggttgacttgctttacacctgttagtacatgaacagcgggaggcacctaatttcttcttaacctacatttcctgttggtaagcaaaaactattttacttaactctagttttataagagtgaagtcaatgagtgtgtgacataatatatatgaagatagtccactgtcagtggaatggatttgcaagatcttcaaccgtgatgtcttagttgtcagtggctaagaataaagcaaagataatatatttgtcaggtattcaaactccattcctgttctcattagcctcagatcctc

SEQ ID NO: 6415 - DNA, 1294 bp, Homo sapiens
agactggaagtagatgttggggaaaaaatagattagaatttatcagtcacagggcctggatgctttataaggatcaaaaagaagatgcctagactagcatttgaaattgaattttttctctctctccaaactggcagtacattggcatcgcctgtggagctttaaaaattatttactttattgggaaataattcaaacacgaagataacaaaaaaggctaatgtggtgaacatccctatacccacaacttggttttactaaattttaactttgtgcttcagttacttgccttaaataaattgaggtctactggtccctttcctggatcccattcttcttcctttctcaccagtggtaattgttgtcatgaattgagcatttatattatcccatgccagttttatacataaatgggatattgttttgcagattttaaaacttttaagagtggtatcaaagtttataccagtccaaaattctatttttatgcaactttttgtttttgatgtaatgtttgcaattctagtcctacattttaaatgtatgtatttcattctacatctataccaatatctagccattattctgttagtaggcagttaggttgttgaaaaagattttttaaaactatgtttagtctctgaatgggcaagaattatgtattttactgatgaagtaactgacagcaacttctttttggaagcagtattaagtatagtggttaaaataatggattctggaattggactatttgcatttgaatcttgactctactatcctattgaataactatgatttttgacaagtttattaatgtctttatgccacagtttccttttctgtaaaatgaacatgggaattattcttgtcttataggattattgcaaagattatataagattaattcatacaaagcatttagtacctggcgcagtaattgcgcaataaatacttttgctatttaaatacccttttgtttacatagggggtgatgctatatgtattttcagtaacttactatttttacttaacaatatatttgtctctagacaaatatagaactgtctcattcttttaaatcctgtgttatttcatgggacatatgaatgactcgatttgtaagtcaatgctagttaaattgtttaacccatcatcgaattttactgctgtaagaggctgttgctaatgcagtccaaattctttttatagaaaccattttcctactgaagtttttcttagtttttaactctttcaggtaatgctacagtgaacattcttgtagtctgttttttac

SEQ ID NO: 6416 - DNA, 1048 bp, Homo sapiens
aatgggagttcactcatgatttggctctatgttgagtaggagtggtgagagaaggcatccctgtcttgtgccagttttcaaagggaatgcttccagtttttgcccattcagtatgatattggttgtgggtttgtcataaatagcttttattattttgagatatgtcccatcaatacctagtttattgagagtttttagcatgaagggctgttgaattttgtcaaagcccttttctgcatctattgagataatcatgtggttttttcctttggttctgtttatatgatggattactgatttattgatttgcatatattgaaccagccttgcatcccagggatgaagccaacctgatcatggtggataagctcatcagggatattggtctaaaattctttttttttgttgtgtctctgccaggctttcaggatgatgctggcctcataaaatgagttagggaggattccctctttttcttttaactggaatagtttcagaaggaatggtaccagctcgtctttgtacctcttgtagaatttggctgtgaatccgtctggtcctggactttttttggttggtaggctattaattattgcctcaatttcagagcctgctattggtctattcagggattcaccttcttcctggtttagtcttgggagggtgtatgtgtccaggaatttgtccatttcttctagattttctagtttgtttgcgtagagatgtttatactattctctgatgatagttatatttctgtgggattggtggtgatatcccctttatcattttttattgtgtctatttgattcttctttcttttcttctttattagtcttgctagcagtctatcagttttgttgatcttttcaaaaacccacctcctagattcactgattttttttgaagggttttttgtgtctctatctccttcagttctgctctgatcttagctatatcttgccttctgctagcttttgaatgtgtttgctcttgtttctctagttcttttaattgtgatgttagggtgtcaattttagatctttcc

SEQ ID NO: 6417 - DNA, 2060 bp, Homo sapiens
ctttatactcccactcccaaccagagacacattgtttcagccacaataggttacatcactaaccttttttgggttttgtaaaccattaaggattacatgaattaccatgtaatcctgttcagacttggtaagacatttactgaatattgcttgttcttattccctagatataaataaaataataacactttattcaaaagagctccatggagtaatatttactaagggccaggttgctcagttttatgcacagaaaggcaatacagtgttgaaatacacatctgtttcaagttcccatatctataagacacttctctctctttaaacttaaaggaaaatatgtatgcacacttatatggatttacaacagtacagtgatctgaatttcggaacttaactttcagtataaaaagtttagttctctgccacacggaatttcagccgtatgcttgtgtaatgtatataaagatttaaaaaaatagatgggattatttaaactaaaaaaagatgtggaagttactcctaagtgtaaatactatgttctatgacattaatatatataccttattttctcttaatttctatttgaaggtctcagccaatttcttctccagtcatcctccagtttggtcatgcagagactcttcttccactgctttctctcatgggctacttcaaagacaaggaacccctaacagcgtacaattacaaaaaacaaatgcatcggaagttccgaagtggtctcattgtaccttatgcctcgaacctgatatttgtgctttaccactgtgaaaatgctaagactcctaaagaacaattccgagtgcagatgttattaaatgaaaaggtgttacctttggcttactcacaagaaactgtttcattttatgaagatctgaagaaccactacaaggacatccttcagagttgtcaaaccagtgaagaatgtgaattagcaagggctaacagtacatctgatgaactatgagtaactgaagaacatttttaattctttaggaatctgcaatgagtgattacatgcttgtaataggtaggcaattccttgattacaggaagcttttatattacttgagtatttctgtcttttcacagaaaaacattgggtttctctctgggtttggacatgaaatgtaagaaaagatttttcactggagcagctctcttaaggagaaacaaatctatttagagaaacagctggccctgcaaatgtttacagaaatgaaattcttcctacttatataagaaatctcacactgagatagaattgtgatttcataataacacttgaaaagtgctggagtaacaaaatatctcagttggaccatccttaacttgattgaactgtctaggaactttacagattgttctgcagttctctcttcttttcctcaggtaggacagctctagcattttcttaatcaggaatattgtggtaagctgggagtatcactctggaagaaagtaacatctccagatgagaatttgaaacaagaaacagagtgttgtaaaaggacaccttcactgaagcaagtcggaaagtacaatgaaaataaatatttttggtatttatttatgaaatatttgaacattttttcaataattcctttttacttctaggaagtctcaaaagaccatcttaaattattatatgtttggacaattagcaacaagtcagatagttagaatcgaagtttttcaaatccattgcttagctaactttttcattctgtcacttggcttcgatttttatattttcctattatatgaaatgtatcttttggttgtttgatttttctttctttctttgtaaatagttctgagttctgtcaaatgccgtgaaagtatttgctataataaagaaaattcttgtgactttactaccaggacttttctcttccccatgtcaaaatacaatcaataattgatggtaaaagtttggaaattcaagcagatttgactcacctggcaatttttttttattttttatttttgttatacttttaagttctagggtacatgtgcacaacatgcagttttgt

SEQ ID NO: 6418 - DNA, 1028 bp, Homo sapiens
cagctgagacctgggttgaacactgtaattgtgtggctttgagcatcttctgattgaagttacacatttcaggagactcaattttatgcacgtggtattgccataagggtaattgctacctccctgtattatagcggagttcctctgggcatgcataatacctttctttcatcatgctcatcaagacttattcatactttgttatcaattatcctagtagctctacatattaggtagttacaagtattacaaatcatagattaggccactaacataaagaaatgaggtaaattccctgcagtcttcttgtggggccatgtaacagtagagaccacttgagtttgccaagtttggtggccaagtcccatgttttgtctgagaacagacagaggctcagggatattgggatgatatttggtatgaagggtttcttatttggactgcaccaagttaactgtgtgctgtgaaacattatatggcttcattttcattgggagaactagtgatataaatgatgtaacgtgaactaagtgatttagctaattacacatatttttggatgcttctaaaaaactaatatgtgatccttggagtagaggaagttgtacattcaaggttttctaccctttttgtgtgtgtttattttaatgaggacaatgggaactacaccatttctttcctgttagttcatcctggattacctttttatatccattaaacatagaaattctgaagccatgtctgcctacatgtcatcctgattgcctttgtgtataattgcagatcaaatgtagaagcagtgactacttaaaaaaaaagttgttatagaccaaggcttgaggaaagagaaaggtacagtgacaatgagatatcttgggggaaatttggtcccgtagaccaggggttagcaaatcatatcctgtgggccaaaccacagtcacctgcctgttttggtaggcctataagctaggaatggtttttacatttttttaaaagactgatggggagaagtgaaaggaaaaattata

SEQ ID NO: 6419 - DNA, 1063 bp, Homo sapiens
ctaatttagtgagatctgagagccaccttagagattacgtagtccagtttttctccaccctgctaagcttcacaaaatattgatgcctggacctcactcctagtgaatatgattgaatggatctgtgttggggaatggaggcagtcttcaaaaactggctacaaggtttcttggttcagccaggcttgagaacctcagcctagcctaattccttccccatgcaaatgaaagcattgtaacatgcctgagggccaccggctcagatgagttttctctacttcagaaagctattttccctttccacatttcttttttttttttttttttttttaatgtaaagccatttcccagccagtgcagtcttctgtggtcactacattcctcatggaatatttaaaattaaatattccatgaggaatgtagctggaacgtttaaaagcttactatccttgtcctgttttaccgttacctaatgggaagacagctttctggaaaaacctgaagaccattctttcttagtgagctgttcttgacggtggtgactttatctttggaaatttgcccgattcccatatcacaattaaggaagtggcttaagaaagtagcttgtaattctctagagtgtaagtctccagatctcactgttgaactttgtatgttccagtaggactaaatctaaaataatttccttgtcacatttgatagacatgagtattagggacccacattggaagaaccctccaaaaacggacctgtctttcctttgtgagttttcagtgtaattctagcatttctgggagaaatatgtaagtacctcaagggcagaaatcctgcccacttaaatgtttcataattatcacctaaaacttagaatggatcaaattaactaattagctttgtaccttttcaacacaagctaatagattgcctgacttcgtttatctgatcatgaattttgatcaactttatctcattaggtttaaaaattaatatgttgcgttatatagcacttatctttacagagattattcatcttcaatgcaataaataaaagaaaagccaa

SEQ ID NO: 6420 - DNA, 1027 bp, Homo sapiens
gattcaaattctaaatatacgaaaggttatttccatttcaaaaagtgatgcagaaagacaaatagcatgttctctcactcatatgtggattctaaagatgaccgcatagaaatagagagtagaatagtggttaccagaggctggtaacgatagaagggaagggaggatgaatacagttacataggaggaataagtcctggtgttccattgcacagtgaagtgcctatagtagctagaagagaggatgttgaatgttctcagcatgaagaaatgataagtgtttgaggtgatggaatgcttaccctgatttcatcattacacaaggtatacatgtatcgaaatatcaccttgtacttcatatatatgtacagttatgtctcaattaaaaatttaaaaaactcttaaaaagaaaaaagaatcaagagagaagaatacaaaaaatgatgattaagtggaaattaaaccatagttttatctggatttgatgtaattttttaaatgatttgatttagactgtgctattggacaatgccacctattttctttcatatacacttttattctaatgttctaatcaattaagtcctgtatatttaatattcatttctgtcagggttgaatttgatccaggagaaatggatgtgtactaactagtcaggtgtaactggaatcttactataaagtaaaaattattgtaggccttctaaggaatttataattcattaaaatacatataataacactaaaaagctaattaatatataatattctagttaaaaattaggcatatatgactatatgcaatagtgtggaaaacaattaggcatggaaattattgttagagtttattatttttcaaaagataatgataaaacacacctgtaaatttaatataattataaattcgtcaaatctcaggatggtaaaaccttaaatataccatttgtaactgacattatgtattctctttcttcttcagaggaaaaccctgaagaactatggaaatttcttttttattttatttatt

SEQ ID NO: 6421 - DNA, 1164 bp, Homo sapiens
tctggaccacttcctgataaggggcagagttagatgggatgccgaggatgtctgtgtgttctctatgtacacacagcaagacagacattttttcctttaacatgtgttttgctttctatagagagaatcctttttctgacagtcactttctttccaaagcttagaacatcataggctctttggcagagagtacagctttcaacaagaaaaagaaaagtttttggccactctgcccccttgcagttcaagtataattcaaaatatctgcttctatttgtttgccttttgcaaaacctcaagggtgattttgaaataaataggaataaaatatttgactgaaccaaaagagcccagtacctggccatccgaaagtatttatttatttgtttaaacattgctggagtaatagaaaatttaaatgcagttatcaaagaccaaaagttcagagattaaatactatgttagagtcattccttctaattaattttgaactgttttcgaaaaacgaagaacttgctggggagacaatgatcaagatcgtaacaaagttcccctagaagattaacagagcttggagtttactgtggatctctgcctgtgtggagaagaaacagtcaaactagaggaaacaaaactgtctctatagacaaattaaattttagtggatgttcatgtgcacaggtgggcagcagcaccttagtctagtatgttgggattgggatcagagtctttttccataaatgcagcagcattgagcaatataattccatctaaaatcttattgtatattttctcatctgcttacttttttttgtttgtttgtttgtttttgagacaaagtctcgctcttttgcccaggatggagtgcagtcacacagtcttggctcactgcaacctccgcttcctgggttcaagtgattctcctgcctcagcctctcaagtagctgggattacaggcatgcgccaccctgcacagctaatttttgtatttttagtagagacagggttttaccgtatcagctaggctgatctcaaactcctgacctcaagtgatccacccacctcagcttctcaaagtgctgggattacaggcgagaaccaccacacacagcctcgtttgcttacttttcaaaacagctctgtgtttgtgtgcgtgtacatggt

SEQ ID NO: 6422 - DNA, 1047 bp, Homo sapiens
gcagaacgtctagctttagagagttttaggtaacttcacccagctgatcccactgtgcctttaaccaccttcctcttggccccttctgacactgataatgcctgttccctaaccattggcccctctgcctggctctgtctcactagcaggcccatccccactctgtgctctgcctttcttaacacccctaaagggccacgcaggaaaggatgggacaagttgattatgacatccctttctagctctaaggaattcaataattctgatattcatccctaaagaaatttatcagcagctattaattgggctttcctaatttgacactgaaaggccggtagggtcccctaagtcttgaagccattttcctggtcccgaatccagcagattccagcctatctggtttggggggtgtctacagtgaatcatctgtattcacatttatagagaactttgccatttgcatgttcatatctgtcatcttatgtaaactgccaaacagttctagttgtagccctctttagtttctattttcccgaagtttctatttcccaaagcaaaaagaggtgagttttcatttcttttttttctttttttttttttttttttttttgagacagggtctcgctctgttgcccaggctggagtacagtggtgcaatcatggctcactgcagccttggcctcctgggttcaagtgatcctcccacctcagcctctccagtagctgggactacaggcatatgccaccatgcctggctaatatgtttttatttttcatagagatgaggtctcactatgttgcccaggctgatctcaaactcctgagcttaagcaatcctcccgccttgacctcccaaagtgctgggattacaaaccactgctcctggcagagttttcaaaaatcctctagctcttgctaaaaaaagttggtgctttcttagctctggtgggtatgcaagtgtaatatttaaaaggctcatagatttttacagttcagaaacctggattctgtctgtcattagaaattcaattacacaccgcagacatc

SEQ ID NO: 6423 - DNA, 1052 bp, Homo sapiens
tggcttcattaatcatggcacattccctcaggtccataaataactgcatttgcttcctctggagttaaatgttttctttattcaccttcctttcattctcttctgaatcttgaacttgagaactctcacaaaattgtccctaatattattttgtgttatacgcttaaccatgagccctcattttctcatctgtgagtataattgagagaatagcctatttgtgagggcatcattgtaggaggaacaccgttttgtacatttttttacattatctagaatcatagagaaatgagatgtttttagaaagccaaattttatccctttaagccccagactgaaaaccaactacacattaactatcttatttagaaacatttcaaaatagtcttactaaaaaaaaaaaagtattcactcaaaaaaaaagagaatatgttcaatataaaggaacttttaaaaatgactctgtcattattagttttaccagttattaaactgggcactaatgtaatggtgccctgaagatggggagacctgtgggattgttggctcccacactaaagaacccccataactctgtatttcagtttcagtgttagaaccttgtatagtcagggttctccagagaaacagaacaaacaggatgcatatctgtgtgtctatctatatacagatatgcatctctctatatagacatagatataaaatatatgtaacatatttaaataaatttatatatatgcatgtacatatattaatttatacatatattaattatatatatacattattttaataaattatttattattatggagccttatctctctatgtattatacattgatatctatatataacatatagatattatatctgaattatataatatttctgatatatatctgaatagataacaatatatctgtatgttacatatggatatctatgtattatatataggtatacaataaatctctgtctatacacacacacacacacacacatacacacatagaaagagagagatttattttaaggaattggttcgtgtga

SEQ ID NO: 6424 - DNA, 1048 bp, Homo sapiens
attttaaaattagccaggtgtggtggcatgcttgtagtcccagctacttgggaggttgaggtgggagaactgcataagccccggaggtagaggctgcagtgagctactgcatgccagcctggtgacagagtgagacctgcctcaaacaaaaacaaaaacaactcccctcttcttctttcctccagctcctggtaactaccatccttcctccagcccgtggtaactaccattgcactctctgtttctatgaattcgactagaattcatagaaatttagatacctcatataagtggaatcatgtaatatttgcttttttgtgactggcttatttcacttagcctaatgtcctcaaggttcagccatgttatagcatgtgacaggatttccttccttttaaaggatgaatgatcttcccttgtatgtgtataccacattttatttacccattcatccatctatgcacatttgggttgcttccacctcttggctatttgaatagtgctgctgtgaacatgaggatacaaatatttcttcaagactctttcatttcctttgaatatacacccataagtaggattgctggatcatatggtagttccatttttaattcactgaggaacctccatactgttttccatagtggttgcaccttttacaatcccactaacagtgtacaagggttccaatttttatttttctacatcctcaccaacaccaacacttgttttttttcttttctgtgtgtgtgtatgtgtgtgtgtgtgtgtgtgtgtctctgtcacccaggctgaagtgcagtgacgcaatcatggctcactgcagcctcaaccttcccaggctcaggtgatcctcccacctcagcctgctgagtagctgggactacaggcatgcaccaccatgccagattaatttttatattttatgaagagatggggttttaccatgttgcccaggctggtctcaaactctgggcttaagcaatccacccaacttggctcatgctgggattacaggcgtgagccactgtgcccagccattttctgtttt

SEQ ID NO: 6425 - DNA, 1049 bp, Homo sapiens
ttcattaatgttttgtagttttcagcatacatattctattcatgttttgttaaattcgtaccttagtatttcagtatttttggagctattgtaaatggtattgtttaaaaaatattagtttccagttgttcattgctggtatatggatgtaaaattttgaatgtgtgtttaccttttgtcctctgaccttactaaagtcagttctaggaggttttttttaaatcacttatttggtttcctatgtaaacaatcatgtcatctgcaaatagagacatttttatttcttctttccctatctgtatgtcttttatcttcttgccttattacactgaatgaaattccaatataatgtcaaatagcaatggtgagtgaagacattcttaccttgttcctgaccttaatgggtagaattcagtctttcaccacataatatattagatgttggctttttgtacatgacctttatgaggttgtgaaatccccttctaccctcgtctgctgagaattttttttttttaatctgaatggatgttgaagtctgtcaaatgttctttctctctctctttctttctttccttttttttttttttttttttgatagagtcttgctctgtagcccaggctggagtgcagtggcatgatctcagctcactgccacctccgcctcctaggttcaagcaattctgcttcatccttctgagtagctgggactacagtcatgtgccaccacacccggctaatttttgtagagatagggtttcaccatgtttgccaggctgctctcgaactcctgacctcaggtgatctgcctgccttagcctcccaaagtgctgggattacaagcatgagccaccaaacccagcctgttaaatgctttttctgtatcaagtggtatggtcatgtagcttttcctctttactgtagtaatatggtggattacattgattgatcttttgaatattgatccagctttgcattttcaagataaacctcattttggcatggtgtataatatttttatatactgatggattcaatttgttaatatt

SEQ ID NO: 6426 - DNA, 1050 bp, Homo sapiens
gaactcttgcctggttgcaagtgtcaagccaccgattgctttcttaggctatctatatggtctcttcctgagggctattgtccgttaatacagaatacagtacactgttagtggattagcgagctcggtaatccggtctcctaaatgaacaaaaaagtagacgctttttgaggttgagcatatttcgattaaatcttggcttaggccctagatcaagggtttagatcagaataaaatgaaaattagtgttgcacgtacgcatattgcatcagaatcttgcagtgattgttttagtttcctgagttgcattgatagattcttttaaaatatgactgatttgcataactttagaagcagaatcattttcagtatatatggtgcacattgagggcaaaaagtagttttgttaatgtttaaacttaagttacctacaactttgaactgtatgtagaagttttgtagtttgaagtcaatagtgccataatataccttataaggcgttcttactagatctttgttatatttacctttttctctccctatggggtgatgtaggatagtgcttgaaatttgcacttcagtagcatttaatgttcagtgctcttgtcataaacatagaatggatattgagtagtttctgatcccagatggtaatgtgtaggttcaagggtattgtgtgtagcaagtgaagattgcagaaataaaacttcagttcatgcttgaaatttaagtattgttgtgatgccagaattgctgctcaccgtttttaggtttcaggtcctctgacaccttttggtatcgttaattttactgatttgtgtagaatgtcagttgtattttaccagctaatatctagaaatgctggcaagaggggtttactccagctttagattgtaggtatgttagcttttttcatacagtgtattaaatttactgagtcagcttgctgaataagacagaagcccaagaattttaacagtgtgtagctttagttgtctaaaagttaggccttcgggcttcaaaagttagtggtcatcgaaaagcattaat

SEQ ID NO: 6427 - DNA, 1049 bp, Homo sapiens
ttatttcatttgacctgtaaactctaagtaactttgcatggaaaatgttatcctgattttatagacgagatagtgagtttagaaaggcagtatggtggaatggagcatagatttggagttggctagacctaaagtccagattaaatctctgctcaaggctgggcgtggtggctcatgcctgtaatcccagtgctttgggaggccagcgttggcagattgcttgagtctggaagttcgagaccagtctgggcaacataggcagaccctgtctctacaaaaaaaaatacaaaaattagtcgggtgttatagtgcgcattggtagtcccagctactgaggaggctgaggtgggatcacctgagactgggactttgaggctgcattgagctgtgattgggacactgtactcctgcctgggtgacagagtgagaccctctctcaaaaataaataaataaatacatccccgctcagccacttatcagttacgtagatacactgcctaaccttagtgaaccctgtttcgacaactccaaaatgggagtaaaaatcctaaacttgtacagtggttttttagttttgttaaaagtacaggtgaggtttttttcagagtattggttgccatctgagagtgatcccctttcacctcctctaggacttttagcattttctggagacattttggtggtcacagctggggtggtagagtgtgctattggctaggggcttgaagccagtgatgctgcttaacatcctatatggcacaagacccctccccatcaacaaagaattatctagcccaaaatgctgtgtaaaatgtctggtatataataagtataatatttgatgaaaatcagtacctttgcccccaggtgtgatatttaagaaggtcaacttactaaatcagtgatggagttagtcctaacatctgggtgttctgactgctgctaggccagtattctttatatgataataagaactttgtccacagaagatatccctaataacaaaaaaggtttatttgaagaggactcatgtgttctttggctgatt

SEQ ID NO: 6428 - DNA, 1064 bp, Homo sapiens
catttccttttcctgttgtaagaacattacattgtgttgaaattaaagtggatatagaaggtaattagaataaactgccacatcatttttatagtaaagtggtaataacactattgctttctgtttttttaatcagaaggagtatgggcttataatgatgttactgttccctgaagcatattttgaatgatacggtttatatttgcacagttgcccaggtaatcattgtgatattaattgatcaatttgctatttatttgcgttttaaatcagtactagtatttgtgcttaaaaattttgcatatgttttatcagatttaatttttaagtgtcagatactaaaacaaataaccttaactttattaaattataattttttatcatgaggtggtattcatttattcatatagttagaacaaaaaatatttaaaatattgaggtagaaacaaattagtctctttttaattaaaagccagattacttgttagagtaacattttcccaaatgaggtaaaattgttgcgactgttaaacttaaggaaattttgatctaggtgtggtatataccttcttgtggggtgctaatgaaaacagggatggcaaaaatattttgtttgtgagtgtatgcatttatgctttttgacaacctaagaaacactcttacatctgagtatctttcatggactagctgtaggaaatctatataaaatagcttagtatactgaaagtatgacatagttttacatatctagattgtggttgtgattatatataatactataaaatatgctaacgtgctgcttaataatactatttggattttttttaatactgaaaaggtcacacagattgtgattattgtgtagtgtccaagaactaaggcctaccatctgttactcaaatgtatgaaaaagttaagataatttagtgatataagtggttttgacaccactgtttttggaataatctaattatgatttttataaagactaatatcaaattttaaacgtttgcaaaaatgaaacctaatagttatactgttatttatatttttctattacaata

SEQ ID NO: 6429 - DNA, 1056 bp, Homo sapiens
acagttggcactttttcaactggaaaattcaaggaactgctctttctgctttctgctcaatatgaatcttcaatttagaaatgagagtccatcattaacaattcaacatagcttattaataggaaaaaaaaacctagtaacaaatgtaaaatctttgattaaatgagaaagtcatagaagttcatcagatttgtatttaaagcatgatttcattagaaaagttgataataaggatttaactgtgacataattggaaaatacttgtttaaacttaaaattttgaaaagaaatgtaaatgtgatgtaacttatgaatcagtggttgagtttcttttttgctcacaagaaccctaactgtgtgttacttgaaagcactgatggaaatcagggaaaaagctccagaagttcctacgaaataaaattaaatgataaagtcctggtatctgctaacttgccttccattcctgttatcttttcttcttagtctgacttcattaattctttcaccctggctactggtttagctcagtgttttatgagccaggcagcttcagactttgcttttgatgctctttgttcattacctctaaagctgtattatcactttcattttatcattaatgtttcatgtatatgttatagtttcatattgttactgcaacttttacttagctataatttaaaaaatatctgtgatctgtggaaataattattctatggcagaaaagtagttattgcattttactttataagttgtttaaggataagcatacctatatattaagcactacaaagaaacttttacaatggctttatttttagcaaaccatcatagttaaaataagatttagtgtacatgtcaggaacacagtcttatgaaataaggtttagggagctatttttagttactatatcctacttgaaaattgtagttaaatttctagcatataccctattaatttagatgcaagtacagatttgagataaggtagatacattatttggatgtcaactcggaagttgttcaagaaaagatattttgttatttagatgtaac

SEQ ID NO: 6430 - DNA, 1054 bp, Homo sapiens
tcccaagtttcgtatcaggaaaatataataaatttttgaaaaatgtaatgggatatattgtatttataatacagtaatcactatgtaaccaacatttttatttccatcaaaaattagttataaagaaatagaaatctaagaagtttaatagatattaccattgaacactagatttgtattagtatcttttatatttatctctctcatttcctatattggccatgtttacttttaaaatagtaaaagtcataagctctattttaaaaataaatgttagtttattaacccaagaataatagctaactataaattcatatttgataaaataaaaagatgacattcatcataagggatacatacctgtgctagcatatggcatttttaaaatcacatgagtaatttgtaatcatcatagaaatattagaaaatacaaataagcaaacacatactgaaaatttagtgttcccaaatctaaaacagagacactgtttttttcttttgggattgtattttagatatgttcttaagttataataaagtaaatacttaaaaggcaaattgatacattaaggatttcaaagagtaaaactttttgttaagctttgatgttctttagaaagtttagattattccacaagtcactgtcgttgaaagaaaagtagttacagtggggtcttatgggataaggcattaccatttgttcagttgagagacagctatcactatgttttaagcattgttcatatattagctcatttaatcctcatagcaaccttatatgataggtacctttattagccccattctgcttaggaagcaacagaaagagtatgtattttgcctaaggttgcacaataagttaagctggggttccaattctagcaagttggttctagagtgtatgttattaaccattatgccgtagtgcctgcaagtagatctctagatgtcagaaatactcatcttcctctggttacctggttgttataaatctttatgcttaatacttatgtcattatatgtaaatttcgtattaaacactcaacttattcag

SEQ ID NO: 6431 - DNA, 1232 bp, Homo sapiens
tagctgggactacaggcacgcgccacatgcctggctaatttttgtatttttagtagaaacgtggtttcaccatgttggccaggctagccttgaactcctgaccttaggtaatctgcctgccttggcctcccaaagtgctgggattataggcgtgagccaccgttctggccacctcctacttctttcattagtcttaattccttagtggatttgacagtgtttatattatctacaccaatgcatttttttgtatgttaataataggagatatttattgggcatttatttacatacttatttgcatgtgtaactgttgtatagccagtttatgtatataatcttactaaatctctacagtaaatctatccccatttcatagatggtttaaaagaagttaacttccccaagcattacttttagtaagtagtgagactgaaggttgagttctggtctgtcagattccgaagttgtttccttaggaaccatattatcttgtgtacaactcttgggctaatcttgttaatattctttatttgacctcacactgttgattcataccatgtttaaaattgaaatacattacctatatttaaaaattgagacctcacataaaaagctatatttctagctgcttttgaaatttcgaaggatcttccaacacttggctgacattcctgcgtgacaaaaatcagctggagctgtgtaatgtccgacctgtctctgtcaatgaacagattattcattgtcatttctcatctgtttttgagattgtaactttgattctgtataactcatagaattagtagttagacctatatatgttagttattacattatttgtatatgtacagactgctttagacaatattgtagtgttatatgttaattttatcaattaaaatgtgctataggatcattgtagagatcttgtctctaattaacaggattcataaagagaaaacaaaggagagaaacatccagattgaaaagacctacatagtgccaagcacaataaaagaaaccctatactaggcaaattattatgaaatttgttttaggacaccagaaataaagataatatctaaaaactttttagaatcgcctaggagggattaggaatatgaatagcatctaacttgttggcagtagaattgaaggtagaaggtggtaaaacatcaccttgaaagttctgcattcagcctagaattctgtatccagttaaaccatcaatc

SEQ ID NO: 6432 - DNA, 1051 bp, Homo sapiens
tttttctgtgctagttgagatgaccatgtgatttgttttcttctttctattaacatgatatattgtttttcatatattgagccatttttgcatcccaggaataaattttacttggtcttcgtgtataatccatttaataagctgtggaattcagtttgttggttctgtgttgaggactttatatcaatgttcctaagggctactggtctatagttttcttttgtagtttctttgactttgctatcagggcaatgctggcctcattgaatgtgttaggaagtgtttcctcatccatttttggcaaaactttgggaaaaaacgatgttctttaaatgtttgatagaattcacagataaaaaaatcacatctagggcttttgtctggaatttttttattgttattattgattcagtcttgttactagttataggtctattcagattttctttttgtgtgtgtgattcagtattagtacattttgtacttctcgttatttctccatttaatctatattatctaatttgttggcatacaattgttcatagtactgtcttctcttttttttaaacttctgtgcagttgatactaatgtccctacttttatttcagattttagtaatttgaatcttctttatcttaatacaggtaaagctgggtcaattgttaaaattttttcaaagaaccagtttttggtttcattgatttttctctgttatttttctattatttatatcctctctaagctttgttatttccttcatcctgctagctttgggtttattagtttgttctttttctagttccttaagatttgaagttggattattgatttgagatcgttttcaattaaatgtgtacaactacaaatttccctcttaggactgcttttgctgttctgtaatttttggcatgttgtgtttttttgttttaatttatttctaagtattttctaagttcccttgtgatttcttctgcgtttaaccgtgtattttttaatttccacagttggtgaattttctactttttcttcagttattgattttattgattt

SEQ ID NO: 6433 - DNA, 1047 bp, Homo sapiens
tagtttgagaattatgtatgcttaactatgagatacagatactattgaaactagtcagttgtttataggtacttgtaaaattaaaaatatattccaatagcatgcagatttttcatagaggaaatttgaaagcatggaagcacctgaatttacagtactctgtattagtggcatcacaagtttttaagcaaatgtattagctctaattgcatacacttaatcttttaagctttggttttattattataatatgggggtgataacagtatctacttaatagaattcttgttattacatgaaataattaatgttaaacacagcataatatgtgtcacattataaagattcaggcaatgtttgttagtattagtacttttttttcttcctaagtgcaaaagataactttatatcacttttaaacttttcttttagttgtgctgaaagacattatgacaccgccaaatttaattgcagaggtaggtatgaatgtactgtactatgttgtataacttaaacccgatagactgtatcttactgtcataacaataatgagtcatccagattatcgagtgagatacatatttaagaattatctttaaaaatttcaaaaattttaattttactgttgtgttttaggaaaaagtattgcataaagctattaatattgtcaggaagactaaagtgcagcatagactaagaattaggaaaattcctagactaaaaatagtataaggagagggtttacctactatttgaggcagttggtctaatagtaagcaatcacagggagaaagcagaactacttaactcttctgtgttgaggaatgacataaaaggtaggaaaggatataacaaatgttgataagaggagtctgatggatgagaggagggaactgctttaaatgagtttctacttcagacataagttaattctcagagcccacaaaaactttcacttttatttgtgaaatacaactcagttctcatggcttaacactttaaaccatgagaaaactgaagagttgagaagcttggcagatgctgctg

SEQ ID NO: 6434 - DNA, 1050 bp, Homo sapiens
gttttacccttatattcacattgaggtccagatcctggttttgaatgagataattacgtgcagtcggactgttttctgatcctaaaaatagagacaataatatctatcttgtaaagttatggtagtgttaaagatatataaaatgttggcaagtaccttaatatacaataactactgctatatgttgtcattgtaataataatcatatttcttcctttgttgaattgctttcctgtagtaatcttattgtgatcatcctgaaacatagatttccgagcttcaagcaaacactattatgttgaaaaatctacattatttctaagtttagcagtgccagtggaaagtttattgaaatagaaaattacttttttaactgaggagtgtagattgtgaattcgtgattcatcttcttaggagatgatcggaatattgataaatattgatgcatagaatatgaacaaaacattacatatcttgtgctgtgatattaaagtagtattctgttctggtagtagtatggcagtattttaggtctgaaagatgtacataatctgtactttgaagtctgttttttaagagattaatcacaagagatttacataaaacaactaaggttaaaaataaatggtggattagagatacatcaggcaaatttcaatttcaaaagcagatgacagaatctcagtatcagggtagcatttaaagcaaaaagcattaaactggatcaaaaatgtcattttacatcaacacagggtacactccaggtaaagacttaacagttatgaacgaatgtgctaaacatcaaaatgtattaagtaaaagctgaaagaaatgaagaataattggtagaaaagcaatgataggaatccttaatgtacttcaaaaggcacgaagtaagaaggtacagtcatgtaccacataatgatgtttgagtcaacacctgacctggtatacgacaatggtcctataaaattataatggagctaaaaagcttctatcacctagtgatgttgaagccgttgcaatgcaatgtatcactcacatgtttgt

SEQ ID NO: 6435 - DNA, 1050 bp, Homo sapiens
ttgctgttatagatttactaccattattacccagattttctattttactaaaaaataataacacagttcgttatgataaatcagtatagatctttaggctcaacacaaccctgctaccttttaaacttttttattatacaacaaacacatatgcattatcaagaaaagatgagtttagcaaaatgaagaaaaatagtcttatcaactagaaataagcaccattaaaatttctgtgtgttaaaagataatatgctgctgaaactttttttttcttgaaatgtccctcttttctttcacttttcattttcttaatccctaaccttctactgttgaattttctggaccaccgttataccccctcatcaatagggcatttttttctgcagtagctgagcacaatggtcatattgaagaaattcccttgtgggggctttgcctagaggtaaaatcctcttggccgggtgcgttggctcatgcctgtaatcccagcactttgggaagctgaggcgggagcatcttctgaggtcaggagtttgagattagcctggccaacgtggtgaaatgccgtctctactaaaaatacaaaaaattagccgtcatagtgtgcattcctgtaatcccacctactcgggaggctgaggcaggagaattgcttgaatgccggaggcagaggttgtagtgagccaagatctagattgtgccactgtgctccagcctgggtgacagagcaagactccgtctaaaacaaaacaaaacaaaacaacaacaacaaaaacaaagtaaaaccctcttcactgtgatgactctaaagcttgcttttgtctctctaaatcacaacaaaccgtttgcagtgtgatgctgtgctcaaaattgagaattctcactgactgttccaggcatctgtctactcattcttgccatgctgagggctgtcatttctcaccactgaatgcctttttttttttttttgtgcttctttttaaaagtcttttcctgtttgctttgaacttcaataaaaacagggggtaagaaggtaatatgcttttattt

SEQ ID NO: 6436 - DNA, 1491 bp, Homo sapiens
ataatgaatactcatagttaaaaataatcaagtaacaataagacacaatagtctgaggcttaagaaacttttccttcataatcagctagatgtattacagaactcctgcctaaaaagatctagaggttaaagtgtactgtagactcaggtattatcagtgtacccaactctataacaacatacatgattccattcagttgttctttgatctgtgatttagagataagatgatcataaactctttgcttatacttttagatttgtgggtcattgatcattggatccataagagatgttataggtgatcttttccaatcctcttaatttataaatgagaaaagaagatacagaaatgttatgtattgtggcccaggttatttaacaaattactgggtatatggcaggatttggagttagaactcaaggttgtcttgtttctgtattcccctagtcagctcttcatagacctttaggacttagctatattctgaagtactataaaaagagaaataaacatggttttcactaatgggaatttcatttagaaaaacaaattttcagactattttctatttttcagatgttgacttgagtaaatatatcaccactattgctggagtcatgacactaagtcaagttaaaggctttgttcgaaagaatggtgtcaatgaagccaaaatagatgagatcaagaatgacaatgtccaagacacagcagaacagaaagttcaactgcttcgtaattggcatcaacttcatggaaagaaagaagcgtatgacacattgattaaagatctcaaaaaagccaatctttgtactcttgcagagaaaattcagactatcatcctcaaggacattactagtgactcagaaaattcaaacttcagaaatgaaatccaaagcttggtctagagtgaaaaacaacaaattcagttctgagtatatgcaattagtgtttgaaaagattcttaatagctggctgtaaatactgcttggttttttactgggtacattttatcatttattagcgctgaagagccaacatatttgtagatttttaatatctcatgattctgcctccaaggatgtttaaaatctagttgggaaaacaaacttcatcaagagtaaatgcagtggcatgctaagtacccaaataggagtgtatgcagaggatgaaagattaagattatgctctggcatctaacatatgattctgtagtatgaatgtaatcagtgtatgttagtacaaatgtctatccacaggctaaccccactctatgaatcaatagaagaagctatgaccttttgctgaaatatcagttactgaacaggcaggccactttgcctctaaattacctctgataattctagagattttaccatatttctaaactttgtttataactctgagaagatcatatttatgtaaagtatatgtatttgagtgcagaatttaaataaggctctacctcaaagacctttgcacagttt

SEQ ID NO: 6437 - DNA, 1018 bp, Homo sapiens
accccttcgcaccaaactgacaagtgctctgaagaaattgtctaccaagagactttgtcacaatgctttagatgtgcagagtttaagtgccctagggtttgtttacaagctggaaggagaaaagaggcaagctgctgagtactatgagaaggcacaaaagatagatccagaaaatgcagaattcctgactgctctctgtgagctccgactttccatttaaatacatactctaggaaattagctctaagtttttcccttcattttgggttctcctgtttgttttttttttattattttaatcccttgtttattatagagctaatatttattgaatagttattgtgtaccaagcattgtgctaaatactttatatgcattatgatgaatcttgtgcggttttctttctttttttctttttaattaaaatactataatccattgagaaatagcaatattctagctattgtaacttctaaaaatggtatggccattagatctgtgctttttatctctgctctttgaatttctcatattatatagtaaatatattcctacgtaaacctttgatacctagatcaggaatactcttccaggagtacaaaattacattattgatagttaagctcttaattgtgtagcttgcaaaagacagcactttttagttacagatgttttgactttgatgaggatatttagctatcaatctaatagtcacctaaaatatcttttttgttggaaaaaagtttataataaaaaagtttgtcatctctagtgacttcaataaagaaaaaactagaagaggagaaaaaggatttcctcaaattttaaatatgtaacttcagggattcaatccccaaatgtttattaagtagctagaaataattatgtggaaaaaaatgaataatggaaaatagtgagtctcaaattgttctctttttttttttaactaaaacaaatctgcaatgaatctagatgcaattaattttattccttccaactaaaattacaatatttttag

SEQ ID NO: 6438 - DNA, 1033 bp, Homo sapiens
cgagattgcgccactacattccagcctgggtgacagagcaagactctctcaaaaaaaaaaaaaaaaaaattctaacaagttatccagttaaaacatgatactgttttgcctatgaaatgattaaaatgttaaaaaaaaatgagataatgtgctttcatatattgtaaatggttctagaaagcaaattggcaatagtgtgttaagagtgagaacattaaaatattttatatcttttcatccaccaattcacttttaggtgtatactccaaggaaatgggtttatttctatttctaaggaaataataagaatgcagaagaaaatatgtaaagatgtttggcaaaacttggtgaataaattaaatgtttaataataagggaataattaagtcatttcacatgttttatatagccatcaaatgttgtaaacaatttttaattatggggagaaaaagcttacaacataagtgtggggaaaagaatagaagggaaatattttaaaatattaatagtaaccaaccagagtggcaggattatacatgataatattctttttcatagttctctgtatttttccatgaaactatattatttaactaggaaaaattaaagaattcattgaattgagtagatgaaaggttgtgatttggtagtgacttatttggataggtaattaatatcttgattatttaaccttaatgaaaatgtttttttaattttttaaaacaatcttttttttaggttactgtgcataatgatagtgatgatactctttatggtaaggtttcgttgctcacttatctttgatgtatcgattatatgaagtacacttgaaaagcttttaatttttaaatcacttctaatgttttatttttattattaaaaaatttttaggctgggcgcggtggctcatgcctgtaatcccagcactttgggaggctgaggtgggtggatcatgaggtcaagagattgagaccatcctggccaacatgatgaaaccccgtctctactaaaaataaaaaaattacctgggcgt

SEQ ID NO: 6439 - DNA, 1030 bp, Homo sapiens
aaattaatgagtatttttggaatgaattgtctgctctgccattcatcttgttcatttggtacttctgggtgattggaaaaccctctgctaagattaatactgaacacttagcccaggaagatagatttttcctctagtttacatgtgtaagtagcttttttcctatcagaatgttcttttagggatggtgattcctgtttgtatgtttgtttgaatagtttttccttaacacttgagtgttcatttgacttaaatttataaaataatcattttctagtggacagttcttgtcttttctgttttaaaagtcacattgaatattttaacaggtttgtgtcccagacactttaaattcctctcaagagaaattatttggacctgtcaaatcttctcaagatgtatcactagacagtaattcaaacagtaaaatattaaatgtaaaaagagccaccatttcatgggaaaatagtctagaagatttgatggaagacgaggatttggttgaggagctagaaaacgctgaagaaactcaaaatgtggaaactaaacttcttgatgaagatctagataaaacattagaggaaaataaggctttcattagccacgaggagaaaagagtatgtattaagaactcatacttctatgcttgtcttcttattctgaagttaaggttaaatcttaaggctctctctcttcagtttttttcaacagtacactgaagtttttgtgttcaactttatattttgaaaaatttcaaacctatagaaagactagtacaatgaatactcatttatccttcacctggattctccacttaccattttatgagtatgtgaatacacatcttttggtctgtacaatttgaaaataagatccagacataatgacaccttacatctaaatatttgaacatatttttctaagaacatgggcattttcatcatgatcacaagaccatgaaattttcatacccaaaaaatttaatattgatacactaatataacctcgtatactgtttgtattgagagtt

SEQ ID NO: 6440 - DNA, 1030 bp, Homo sapiens
tatttatttttgagagagggtcttgccctgttgcccaggctagagtgcaatggcacgatctcggcttactgcaacctctgcctcctgggttcaagcgattctcctgcctcagcctcctgagtagctgggagtataggcatgcgtaaccatacccagttaagttttttttgtatctttagtagagatggggtttcaccatgttggccaggctggtctcgaactcctgaccttgcgattgcccgcctcggcctcccaaagtgctgggattataggcatgagccaccttacctggccacctattcccatctttaattggccataactccgtgagtatagatggagtcctcttaccagtgtcctacaaacactagtagacctgtgttcatgggtgtgctttaatggtgttgacacatcacacatcacagtactcttctggattgcagaagtataagtagaacgatgatgtattaggctaaatactctcattttaataatttaccttcatgtccctgaaagcaattattgaacatatgtttggaaacaagaatgatagcttcagatgtagtacaagtcccactttatctggtcactatgtgattagaccgtgttacttgggcttctgtaatgtattaaatagtacctcctcagtgacgaaaggagcctttaatagtctagtttggctggtgcagtggctcacacctgtaattcgagcactttgggaagctgaggtaggaggattgcttgagctcaggagttcaaaactagcctgggcaacatagtgagaccccatctctacaaaaaagtaaaattagttaggcatgatgatgcacaggtgtagtcccagctacttgggaggctgcagtgggaagattgcttgagcccaggatttctaggcagcagtgagccatcactgcactactgcactctggcctgggtgacagagtgagaccttgtcttaaaaacaaagaaacaaaccaaaaaacccagtttttttttttcatttcaaagttgaaatttttgtataatgttg

SEQ ID NO: 6441 - DNA, 1050 bp, Homo sapiens
gaagtttacttttacatgttttgtatgtttgaatattggcttatatggtgactttttggttttattaaggtttgccagattaataacaattttcttatttttaaagggtctatccatgttagttcagctatcactgaagaccaaaagaaaagtgaagaagtgcgaccgaacattgcagaaattgaagacatcagagttttacaagaaaataatgaaggactgagagcatttttactcactattgagaatgaacttaaaaatgaaaaggaagaaaaagcagaattaaataaacagattgttcattttcagcaggaactttctctttctgaaaaaaagaatttaactttaagtaaagaggtccaacaaattcagtcaaattatgatattgcaattgctgaattacatgtgcagaaaagtaaaaatcaagaacaggaggaaaagatcatgaaattgtcaaatgagatagaaactgctacaagaagcattacaaataatgtttcacaaataaaattaatgcacacgaaaatagacgaactacgtactcttgattcagtttctcagatttcaaacatagatttgctcaatctcagggatctgtcaaatggttctgaggaggataatttgccaaatacacagttagaccttttaggtaatgattatttggtaagtaagcaagttaaagaatatcgaattcaagaacccaatagggaaaattctttccactctagtattgaagctatttgggaagaatgtaaagagattgtgaaggcctcttccaaaaaaagtcatcagattgaggaactggaacaacaaattgaaaaattgcaggcagaagtaaaaggctataaggatgaaaacaatagactaaaggagaaggagcataaaaaccaagatgacctactaaaagaaaaagaaactcttatacagcagctgaaagaagaattgcaagaaaaaaatgttactcttgatgttcaaatacagcatgtagttgaaggaaagagagcgctttcagaacttacacaaggtgttacttgctataaggcaaaaata

SEQ ID NO: 6442 - DNA, 1042 bp, Homo sapiens
tcatattgtacattattcttatcaagatcagatgagatgaaaaaatgtaatagtactttgtaaaccctaaaactctattataactgtattttggtggatgaaattgtgatgaggatgaggacagtgagtctgtgtgacttcatacttttctagccactttcatgggcatagaaaacttttttcttgaggactgcatgaagttttctatataataaggttgacaatgaatttattatactatactgtgaatactattcattggattcctgagaagtccctgtagttcctcttcactaagaatttagtaagaactcctaaaagttaaactatagaatagcctcagttccatcttggtctgtgttctttatctgggctctactgatttgtgtctgtagcccatgtcaagtgtatctctacatggtataacttttgcatatgctttaaaacataattttatgtcttcaaatcagaattggaaaaatggaaggaaaaatgcaatgatttggaaaccaaaaacaatcaaaggtcaaataaagaacatgagaacaacacagatgtgcttggaaagctcactaatcttcaagatgagttacaggtatgactttatgtatgtttttatgtatgaatgtatctgtcttcattatatttctaataagaggagaattcagtattttatatttagtaattcacttagatatgggtgaaataatacctggcaaatgttaatatgtaaatataacttttcagtgcacattgaaatgacatggggaagaaattccaagatatagcctattaagtgccagtgaaatatagtgattgggtccttagttttatgtttcacatatttaattcataaaccactgcttctaatgtccttgtgcccatttttctactccttaaacttcttactcatcaaatactgctgtggagaaaatgaccatcaggagaattattttgattactttaaatctcttcaaagtttaattattggaatagaattgtatatctgaacacatataaaactatactatatagaaggtat

SEQ ID NO: 6443 - DNA, 1042 bp, Homo sapiens
agcagtattttatggttttatacattttctttatcagtatttcatgatttttgaacctattgtaaatggtcttgttttctgttttcatttttctgttgtttgttgctattactgtaattttacccactaattttccaaacgttggcagaaatgttgatactagtttgaaagctatagctgtaattgtgtattgaaagaagttaccagtaagctgatttttggaatgagatgggatatggataaaaataacatggacatttaatttataaaatgatatgtgttgttttatagttaaatattttatctagactacttaatttgtcttgtaatcttgtttgcagctatatttatggtgttacatataataatttctaaacattcttagattcataatatatcaaggttgattttaatattttctttatttcctgattaggaaatactgacagcccagctgacagagaaagatagtgaccttcaaaagtggcgagaagaacgagatcaactggttgcagctttagaaatacagctaaaagcactgatatccagtaatgtacagaaagataatgaaattgaacaactaaaaaggatcatatcagagacttctaaaatagtcagtagtcttttttgctatgcctttttaattgaacatagtaattacttaattgactaactcttaaagaataaaaaagtgtaagtctcaatagaccaaaaaggaatcagagtatttaaaatgtggaaatttttcatgatttagagtcttgaaatttatcattaagattgatttgtcaatcaatgactgagatgtagcattttctccaatattttggttatatctctcagtaattagaaaatattagtatttctaattactttggtagagtaattagaaaatcaacaatttatggtttagtccccagtctgcgtttaaaatatggaaatgtgattcaacatgaactcttggtgattttgaatacttgggcccatccttaactttattttataaagatacaaattattttgaaagtaagcctaatggtag

SEQ ID NO: 6444 - DNA, 1032 bp, Homo sapiens
gcagtttagttacatatgtatatatgtgccatgctggtgtgctgcacccatcaacttgtcatttagcattaggtatatctcctaatgccatccctcccccctccccccaccccacaacagtccccagagtgtgatgttccccttcctgtgtccatgtgttcccattgttcaattcccacctatgagtgagaacatgcggtgtttggttttttgtccttgtgatagtttactgagaatgatgatttccaatttcatccatgtccctacaaaggacatgaactcatcattttttatggctgcatggtattccatggtgtatatgtgccacattttcttaatccagtctatcattgttggacatttggattggttccaagtctttgctattgtgaatagtgccacaataaacatatgtgtgcatgtgtctttatagcagcatgatttacagtcctttgggtatatacccagtaatgggatagctgagtcaaatggtatttctagttctagatccctgggaatcgccacactgacttccacgatggttgaactagtttacagtcccaccaacagtgtaaaagtgttcctatttctccacatcctctccagcacctgttgttccctgactttttaatgatggccattctaactggtgtgagatggtatctcactgtggttttgatttgcatttctctgatggccagtgatgatgagcattttttcatgtgttttttggctgcataaatgtcttcttttgagaagtgtctgttcatgtccttcgcccactttttgatggggttgtttgtttttttcttgtaaatttgtttgagttcattgtagattctggatattagccctttgtcagatgagtaggttgcgaaaattttctcccattttgtaggtcacctattcactctgatggtagtttcttttgctgtgcagaagctctttagtttaattagatcccatttgtcaattttggcttttgttgccattgcttttggtgttttagacatgaagtccttgcccatgcct

SEQ ID NO: 6445 - DNA, 1044 bp, Homo sapiens
ggcctgcagttctctttttgttgtgtctttgtctattcttggtatcagggtaatactggccttgtagaatgcatttggaagtattccctcctcctctgtattttggaatagtttgagtaggattggcattagttcttctttaaatgtttggtagaattcagctgtgaatccattggatcccggggttttctttactgggaggctttttattacgactttgatctcgttacttattggtctgttcagattttggatttcttcctgattcaatcttgggtaggttttttgtatctaggaattttgtccatttcttctagatttttcaatttactgacatgtagttgctcatagtagcctctaatttctgtggtatcagttgtattatctcctttttcatttctgattttatttgaatcttctctcttttttttcttggtctggcttaaggtttgtcaattttgtttaacttttcaaaaaccaactttttgtttcattgatcttttgtatttttaatttcaattttgtttatttctgctctgatctttattatttcttttctactaattttgggtgtggtttgctcttgcttttctcgttctttaaggtgcattgttaaattgtttatttgaagtttttcctgttttttttgatgtaggcacttataactataaattccctgtgagaactgctttttctatatcccttaggttttggtatgttgtgttcctattatcatttgtttcaagaaattgttcagtttctttcttaatttctttattgacccactggtcattcaggagcatattaatttccatgtatttttacagtttccaaaatttgttattaatttctagttttattccattgtagtcagagaggatgcttgatgatgtttcaatttttttgaatgtgttaaggcttatattgtgagctaaaatgtggtctttgagaatgctccatgtgccgaagaaaaaaatatgtattctgcagctcttggatgaaatgttctgtaaatatctgtttaatattagatccttgtggtct

SEQ ID NO: 6446 - DNA, 1034 bp, Homo sapiens
tgttaagtaacttgtaagtggtagtgcatagactttaaatcaggcagactgacactagagttcacattcataaccactcctcaaatgtcctcctactcttgacatctagactcaggatggacctgtgttacaggaaggagaggttgttatatttaacaaaagtgttcaatttttctttttcagttggctattcagttgttgctatcaatcatatcgttgactttaaggaaaagaaacaggtaaaataatatttctaaagttaataagttcataaataagtatttgtaattctgtttgtattggtaatttggaagctacagattagaatatttcttaaatgcacccctttgtgcactactacttttctattttatatagaaacagtcgagctgatgcatatttatacaatgatgatttttgtgaggtaatatgacatagtgttcaggattcttaaaggtgatttgaaattaagttacttttcactgttcaaaaagtgcattgttattggctggactgtaatcaaaatatttagtcctttttattctattgtcatgggcttattaactactttctctcttaaacattactaataagtatgtatatttctctttaggccaacaactgtatcctgtagattatttcagtctaaaaattagttttcattcttcctattcactgatgtttacagttgcttctctatttagctttctttttaaaaataatttttaaaagtttttttgaataccagaaatcaccttgctttctttttaaaaaaaatgcatattttttctgagaacacctcgtaatttttccattatgccttgtgctattaatggatacaatctgcagtaactatttatcgtttgttgtaggaaattgaaaaaccagtagctgtttctgaactcttcacaactttgccaattgtacaggtaggtgttttgttgtttacgaagcataatatctatttattcagttaaaaggtacctaattattgtgctattctctagcttgagctgcaccttactctgagtacc

SEQ ID NO: 6447 - DNA, 1485 bp, Homo sapiens
ctcttcaggaaacattcttttactatcaattcagcattgctttgatgatcttctttcctgaagtcctacaatttttaaattatctcgttatgtagtttaagatatatacatctctttctgtggctgtattgtaaattcctagagaacaaggactgggttttattgatcttcactatcccttatagccagtaccttttaatgaatactttccactggtaaaaaggaaaatcaattattgtcttttgtgcttttttgacatcatgtcttttttaaatagggaaaatcaagaccaattaaaattttaactagattaacaattattgtctcggatccatctcactgcaatgttttggtaagttaattatttttcttctctccttttggctttgtgagttgtattgattaatgttgaacaatgttgcattttgtcttccccattttacattttccctcgcccccgccaaaccatgacacctgcttgctctccttgtcctcagaattcacacagtgtaatatgtctgttccacttactcatggcacatgtgtagtgataccacaattaaagaatcccttggcaactgttactcattgaactcacgtgcaccagacttaaggtgggtgctggggggtattgccatgaataatagcacaatccttgaacttataaagcttaaagtttaattggcaaggcaagcactgaacaaataataattacaaatgtaaggaatgttccaaggtagggaagtggtaaataaaggatgctctgggagtatgtaacctgagtaagttgatattcaagctgggagacagaagagtcagtaaatgttaaataggtgacaagcagggagctaatgttcccagataggatggattatgcataggtcctgaagctaaggaaaacgtggtattttctgggaagtgaaacaaaacaatagggctaagcctagtgagccggttacatggcataaggttaaagatataaatttgggtgaggattccaagagcagttggaagcccttgaaggttttaactaagggagtgaaatgaggtttgaattacagagaatggattagagggagttaaggagggtacttaagaggcatccaggagggagaattgatgggatttattggttaattgggtgtaggatgattactccctaggtggcctgagcagccaggtaggtaatggtgtaccatttcctgagacggaccatacaaaccagcaggtttgggggcatcctgatgagttactgtgagagtttcaaaagagcccgtcaaaaaagatgtgcacagtggctcatgcctgtaatcccaacattttgggaggcctaggcaggcagatcacttgaggtcaggagttcaagaccagcctggtgaaagtggtgaaaccccatctctactaaaaacccaaaaattagcaggccgtgctggcgggtacctgtaatcccagctactcaagagtctgaggcaggagaatcacttg

SEQ ID NO: 6448 - DNA, 1019 bp, Homo sapiens
atctagtgctgcagaaagggtaagtctagcatgaagtactttgttttcatctttcaggttataaaacttttcagtttctaggggataaattaaaatagtaaatgaatatttgttgcatttttttctattttaactgcatttgctcattgtaattgctaaatagtaaaatttatccccactttctttaggcttcaacttttgtttatataatcagtttttcttttatactgttacaaaatgcctttcaagcttctcttatattttcaaaagctatgaaacccatcaaaattataaggacttaaatttatgtaatttttttatttttggatacttaaattttctattaatttgctataagtcattgaaatgttataaataattttctcatatctactctttgttcattttatttcagcctttagaaataagagggccatatgacgtggcaaatctgtatccttttctgagtaaaaagttgttgacattgtctttcaggaaattttgaatttgaagtcgtattatagttgaacatgtatttttctcaaccttttactgtaagtttaccaattaataacttcaaaaataaattatataacattatagagagctttatgcttctgttttttaattaatcatgagatagaaaagagggaatgagggacttcatatgataaaagcttagagttaaatgagtcttttctcagatgcatgttccagttggactaagaactgctgttgaattaattagcctctcaagatgaccaggttagctggcactttctgttatgtttgtgttagtctcgtgtccttgggtgactctgggttgaaatctttaatgctcccccaagaggcttgctgtttgggctctctgaaagtgacgccaaggctgcggtgtccaccaactgccgagcagcgcttctccatggaggtaagcaagttcttccagtacaaactgaatggtcatgttaaaagcaagtcatttttacagccatacctatttttattgccctaccctacag

SEQ ID NO: 6449 - DNA, 1068 bp, Homo sapiens
aaaagtgttttaaaataattggcagagtagatttactaagttaatcttgataaatgggaaaataatgcttaacactttatggttgactttacgtttattacttgaaataaggaataattcatagctaaatttctgttcaagttcttttgattctgccacctttgtagctaatgggtatctctctctttctccataatccctttccatttctaaggacagagtttgggtctgttttcatgacactatggcctttcataagttacccttccaaactctattttctcctaatttttttgtattcctacttcacatcagccatattgtcccctaaactattttacctaggttcttcttatctttctctccatgcctttgtaaaggaatatttctctttttcttactccgtttaccctattctgagtagtgtcacctttatataatacctcattgctttaaccaggcagttaattcttgtggatgcctccattcctattatatttgctcttattgtgcttctcgcatgcatgtagtatagggaaaagcactgtctgttaggaatcttaataccctctgtatggacacagtgcctagcctattagtaggtttctaggaaaaattggttaaatttaagttgaactctgctgccagcctaatctaagcatttaataatttctatttattctttgttcattgtcaccagttaaagagatcaataaatttatgagtgattttattcattaactcaactagtatttactgaacacattttgcataaccaggccattgttgagtgttggcaatataatgcaattgattcttcagaggtaccttgatgttctaataagagagatagggtacatgctgtaaaatgaggcaagcatgtgctccacatgggagccatacacttgattgctgtgtttgctctcttgatttgtctgtctaccatatataaagtgtctgctacatcaatgtctgtgactgggttctggctacataagatgccatggacagaccattagagataacactgtcctgcagttttacccatgaggtaatctttaggaatga

SEQ ID NO: 6450 - DNA, 1049 bp, Homo sapiens
aggagatgaatgttattctcatacctgcttacacaacatccattctgtagcccatggatcaaggagtcattttgaatcaagtcttattaagaaacacatttcataaggctatatgccgtagataacgattcctttgatggatctgggcaaaataaattcaaaaccttctggaaaggattcaccatgctagatgccattaagaacattcgtgggtcattggaggaggtaaaaatatcattaactggaatttgaaagaagttaattccaacctgtgtgaatgacttggaggggttcaagacttcggtggagtaagtaactgttgatgtggtggaaatagcaagaaaactaaaagtggagcctgaacatgtgactgaattgttgcaatcttgtcataaaacttgaacagctgagaagttgcttcctatggatgagcaaaggaagtggtttcttgagatggaatctactcctagtgaagatgctgtaaacattgttgaaatgacaaaaaaaggattttgaatattacatcaacttagttaataaagcagtaacagggtttgcgaggatgtactccaattttgaaagatgttctattgatagtaacatgctatcaaatagcatcagatgctacagataaatcttttatgaaagagttaattgatgtggtaagcttattgttgtcttctttcaataaattgacacagccatcccaatcttcatcaactaccaccctcatcagtcagcagccatccacatggagggaagaccctccgccattaaaacgattatgactcactgaaggctcagatgatcattagcattttttttagcaataaagtatttttaagttaaggtaggtacagtgttttttagacatcgtgctatagcacaattattaaaccacaggataatgtaaacataacttttgtatgcactagaaaaccaaaaaaaattgtgactcactttattgtgatattagttttattatggtggtctggaggtcaaaaatcatggacctgtgtgttctctcctgggaagtctttgacattgcc

SEQ ID NO: 6451 - DNA, 1035 bp, Homo sapiens
aatgctgacaaggaggtggagcaacaggaactctcatttattactagtgggaatgtcaaacagtacagctactttggaagacagcttggtggtttcttacaaaacgaaacatactcttactgcacaatccagcagttgtgtcctttggtatttacccaaaggagttgaaaacttgtggccacacagaaacctgcacactgatgtttatagtagctttcttcataattgccaaaacttggaagcaaccaagatgtcattcaggataaactgtggtacatccaggtaatggaatattagtgctaaaaataaatagctatcaagccatgaaaagacatggaggaagcttaaatgcatattcctaagtcaaagaagccaatctgaaaaagcttcatactgtgtgattccaactacacaacattctgggcaagcaaaaccatagagtaaaaagatcagtggttgccaagggttagaatggaggagggatgaacaggtatagcacagacgatttttagggcagtgaaactactctgtgatataacagtgcatacatggtattatacatttgtccaaatccctagaatgtagaagaatacaaaatacagatgtggcatggaggaagaaagaagttagatgaaaacaaaaggaaattttgagttctgaagaggaaagttgatggctgggaggtggctgcatttgaaatgggttggtttttttatattgatttgccaaaagtaagtggagagtaaagtgtaaagctgaagtggaggagagttgaaaaggtttggtaaactttgggtttgcgcagtggggagccaaaggtgatgagggcttgacaagttgctagaaggccttagcctagtgataggatgaatcactcctgtatttcatgactttctccagcaatgctcagaaaattggaagtagagatgctgtgagtatcactgaaactgccaactccatatgggcccttggttgagtaggaaggcaagtgacactagagtgtcgatgggctgggagaatagcagggaatatgag

SEQ ID NO: 6452 - DNA, 1054 bp, Homo sapiens
catctccctgtgttctgtccccatttttccatgccatgaaaggtgtctgttcatacctatctccactagacagtgcactcagcaaaggcagggaggtgatgttttgaaatcccagtttacaacatggtgcctggtacatagtagacacacataataatatatgctagataaatgaatataagatttctctgtaaattattgagaatctacacttgctgtttgaggttcaagatgaattctacttagtaatatatgacataaaaattgtattgctttaatttctattctaatatacccttaccaaatatccaagctgataagatctttccatatatacatacatatctacatgaaaatggaagaaagttaaaaagaccaaagaatatacataaatattaaatatctaggataacacacttcatagagccctgcacaatgcatggggtttatctgttctttttcgcttaggccttcttgcctggtgggaaacagttaaaatcctaagaagcatctgagccagtattgagcacattaatattttcatattgaacacgtctatattttcaagttgcactgaagttatgagtataaaaatgtagttttgaaaggttttcctcaaccatgtggaaacatacggagattttaactgctgaaacaatttcaaatagtttacaaatcaataaaagccagacagaaattaaagtgtatcttttttcctgaggttaatatcttagtttgtttgtgctgctacaacaaagcaccacaaactgtatggtttatatacaatagaaatttatttctcactgtttttaaggttggaaaacccaacatcaaggcatgggcagattggtctctggtgaggacccacttcctggtttccaggtggcacctgatccctgtgacctcacatagtggaagggactcgctggctttctgacatctcttttataagggcactaaccccaatcatgttctcatgatccagtcaccttccaaaggtctgacctcttaatcccatcaccttgggggttaagatttcaacatatgaattttg

SEQ ID NO: 6453 - DNA, 1047 bp, Homo sapiens
tcctatcatggtccccccagtgacattactaatcttaattacctcccaaagccccacctctaaatgccatcaacgtatgaatttgaagattaagttatcagcacatgaaatttggggaactcattcaaatcataaacaggagcttaggtcccatcaaagtgaaagcttaccaggaagcccaatgtgtaaaaaaaatacgtaaacagagttatgtgtttgaaggtggagtggagaactatcttctcccctcctccctccacccacagcccctgagggaattctgagaaaccccaaggcagcaagaacaaaaacaatgtctgcagaaagattttttaacactactgtaacacctcatttgttctgtattgagttcattttccagaaaaccttttttttttttttttaagaaacccatcttggatgaaattttgtttaagtgtgttacttttttgccttcttaacaaggctgaatgaaaaccttttaatctgttcttgatgacttttgatcatagtgatgaacatttagttaaggttctgtgctttaatgtggtgatttccaacctcagagtttctgaagtgttaggactgtttactggcactatgcttttgaaattgttagaagaagcagggtggcatcaagggagggtcctggacttgggagctacactgtccaggattatatccaagccttgcattttattagcattgtgaccaggtgtaaccactgtttgcctcaatttcttctttcccaaattgagaagaataattgtactcaccccctaggattattgtgagaaataaataagtttttatatgttcactgcttagaaccatgccttcgtataaaatgtgctgtataagtgctatgatgatgatggtcgatgtatctgtttttatggttcttctgtcttttttgatgtagtatggtggttaagcctatagactctgaagcaaaataacctggatttgaatccaccaccgttgtgatctgattgttttaagctgattaatttttgtgaacctaatgatttcagtaaaacccaccat

SEQ ID NO: 6454 - DNA, 1028 bp, Homo sapiens
agaagttaacgcctatcagttggagaaaaagcaaatattttgcattgacagtctcccctaccctctattattgtcattttcttaagccatcactgctctggcttctagaatacacatttttgaatgaaggtttttgcagtgaatggtctcttgtagatctcaaagtccactagaaagagtactgggtttttgtttgttttgaacgttgcaaacagtaatgcttctttaccactcaccctccccccaccctcaacctccacaacgttcccgtttgcttatagttgtcaacgaccatgatctctggacccacactacagtaacaagtttgtcagtcattttcagataaggtgcaaatcaagggatggctttgtccccacttcggcgcaggtgggacagacttggggaagacgcagctgaagagacaaattctcagggtgcgtcagtctcatcactgaccgttgcttttaaaccctccagggaaaatatgccagtcattgttatgatgtaaacaaccgaaggggtggacggtgaggataagaagaaccgagataatatttggccagagctacgtgtagcacagggagccagggcggcagctgcacctgcgagcagcgcaggcggcaggcgcggcctccgggcgtggtggtgggcgtggccgggcggcgggggcgtggccgggcggcggggcgggcggtgccgccggttggaagtgggtggagttgcccttggaggcggcaccggacctgggccccgaggcccgccgcgccctgtcgggcctgagccgagtggccccacagagccggcgcgctcccgcctgcagggggagagcagacggggcgcggggaccggccaggccgcggcgggtgctgtttctgtttcactttccttcactctgaggccggcgcgctggcgggcgaggagcggcggcggtggcggccgctgggtaggtaccgggcgggctggggagctgcagggacgccagactcctcacccaagtttgcgcctcaggcgagagcgacacctccaga

SEQ ID NO: 6455 - DNA, 1069 bp, Homo sapiens
tgaaatgcataaatgaagctttataattggtgtgcaaaaccagacatagaacctgcccttctggactctctggtcaagtgaagaaagagtaatcaagttaagaaatgtaaaaaaaaaaaaaaaaaaaaaaaaatgctgttaagtgcaatgaggaaggacagactatgatataatagcagatgtgtatcaggatactggagcagaatgatatgcagaagaaactcgtgttttgtgaaattcctgaagctacagaccatatgccatctcaggcagatagtagcccttgagtagtggtgcagaggactacttatgggtgggaggcagggattattagtagctctctctgctttgatatgggtaaatgaagttacttcagtcttctttcagatgactatgcaagtgcatttcaactctttctcacctcaaaccagataggttggtgcttccccattctctcagagagaaattctggatccagcactgctgggctgccctgtagaagtaggtagatatagaaagaagggcccaaaaggtgagctcatcaaaaggaaataggaggtagagatggtggggcagcccagggtcctggcaggagatgcaaaaaatcacatcatcatatcacatgatcacatttgatgacatgatcaaatcagcatcataaaaaccacatatttagactcttcttacctactaatacctcttcccttcagtaggccagggacatttgataaatagataaaatttttaaatgagttaaaattttcaaacacaaatgagttttagctttaaatgatcacttaatactagatgaactaaatccgcattaaccatggtttacatggctgtgagataattttaatagcctaacaaaccaaaggaaataaacatgtctgcacaaataattattttattatttaaactaagtaattacatatcaggcactttgctagccactgggggtagagtggtaaataagataaatgtgaaatgtatacactattgagcaaacttatatgccaagaagaaatttctaacacatgtatttagatgtatgttcttttttttttcc

SEQ ID NO: 6456 - DNA, 1055 bp, Homo sapiens
gtaagagagagacaaatcaagggtacatgtaaggaagtgatttaatgactgaccatagaacagattagtcctaaattgggctggaaggacagaaagggcatcaaagtagtaagtaatgtttcagaggaaacagaaatgaaactaagttggttcctgatctgtttgtatgtagtgagaagtgctgttttttattcactcctactattaaatagtctgggaaaactttacgaatgaccttgtcttgaagaataaggtagcattggtttggtcggagagtacagagagtatttgagccaggatgtaaaacatgagggagaaaaatgaattggaaaagacaaggaattcttgggataattgaataagccagttggctagagaagggagacagtgagcaaatagtaccagttatggtttgtaggttggactcaagttatataaacacatgaagtcaggtagtagagagaaattagtccttgagcagggaactaacacaatcagattagcactttaggaagattgattatgaacatgtctctgctctgctcaaagcagaatggtaattaattgaaggaatggaagaattgttgggagaataggtgggacagatattgagagggagctctgaatgtggcttggtgagtaaatgtgtaaatgaagggaaagagagaagttaagatcattctcatattttgagctgatttggaaaaattatggtatcacttaaaaatttagtttaaaaaaagcgagacaatgactgggctacttagtattttattggaggaggatagatgagacaatcttgacatagattaataaaaggaggtacttgaaatgtttagcatctgttggaaatatggaacttgaaatcagcagagatgtgatatatagtcaggcagatagatagatggatagatggatagatagatagatagatagatagatagatagatagatagatagatagatagataatctgcctatatgttagttttgaagccacaaaagcagatgaaatccacaaggaagacagaaaaggtcaaagagttcagagtaca

SEQ ID NO: 6457 - DNA, 1047 bp, Homo sapiens
ggctgattttatgaatagtaatttgaaattttgagaacttaattttatcatttgaaaagtatttggttttaatttgaatatatacttatttataaacgagtataatttatatatacacctataaataatttggaagtatttttatatattctgtccactttctaacatagtctaattactaattgtaatcatttttttggctaaatacagctagtcctgaatctttcatttggatgtcccaatgagcctagaaatcttaagctatgttaataagtttccaattttttttttttttttttacaaaatatttccattgctgagttggttggaacattttaaagatactaagttcttcttcaaaaactgttaggaaattttttaaagttgatttttgttttgattatcaatgtatgattgcttaactttaaaatcaactttgatttatagctaacttagttttgtttaaattatacagatgatacttcaaaagctgacaaaccgaaagtagatgaagaaggtgatgaaaatgaagatgataaagattatcacagaagtgacccacaaattgctatctgtctagattgtttacgaaataatgggcaatcaggggacaatgtagtaaaggtgagtgaacaagtactatggtatttttatgatcagtttatagtaaacccttgataatttgttgacaaattttctaatgcttcaaaatgtttgctttcaaagttttaattaacataattaaataaaatgccattctttgacaatcctatgcttagaaatggttactattcccacaactgaactgtcttgggccaatgccaccatctagtggctaatgcccagaatcacacctctgtttctccttttatacctttgctggaaattcatatgcatggtttctgttttttagagtggtgaccaacttagacttagagaatttcatgtcactggtagttctagcccttttattcattctcttctaattttatcctttatttctctatttttatttgcaactcaacaagatttccatgtcagagctaa

SEQ ID NO: 6458 - DNA, 1029 bp, Homo sapiens
tctgcttttatagattttctttggtctttaaatggtgttactttaataatgttttctacctttttattacaagcagcttttatttttattacaaatcttcactacttcagctgttagatttttgtcactttatcctagcaaatgtcagccactgagaatattgtttatctctctgtattctgtgttttattcaaatgcctatattcattgtctctaattttcttttacttcctctgtgtacatctataggctagtgggttgaattttttactaatacgtttaatggcattttcctattaggaagtgaaaaacaatttttcacttcagattaagttttcctggcatcttataacaacatatatgagcacagtaattcagtgaatatttatccactatgtgaacagtagacagtgaagatgtaagtagtaagaaaaaacatctttcactcaaggaacttggttaggtcttatacatacaaatagttaaggtaattgattttgttaaggggaatttattggacagggcatgtaataaagtgcatctatctttagagaaatgaccactgtacctatttatccttacagtattttcagttgtttcttatggtctttcccaaaagtcatccccctttttgggaagttctttttcatagagttcatggtcatcctttagctctccaatacatgagttagctcatactgaaagttaaatcaatggaaaggctgaatatcttctcataaacaaacgtaaagtccacttctctgcatgatttctcatatgaaagtataaaagattgaattttagaaatttatttgaaaaattaaccacccctgcttgttgttctcctttttgacatctttgacactttgctattctagttgaccttttatccattcactttttcctttatggacttttcttcatccttgtaccttcattcttagtttataaatgacttttactaagctaccctgattcttcctttttttcctgtggcattcctgctttgtctccactgcctctacttct

SEQ ID NO: 6459 - DNA, 1027 bp, Homo sapiens
ataagatagccaagagaagccctctttgaggtggtggattgttgatcaaaagaaattgagagacgttgctatgtgaatatctgaggtagagcactgaagcctgaggcaacacactgcaaaggccctgagaattgattatgtctggttatttgagaattgcaaggaggccagtggggctggagcacgacagtgcagatctagtagggcttatttttaattaattatactgagactgggtggggaattcaattctacctcacattttatatcagtataggtttatgatggcttaaaatggtaaatattttaaatgatactataaaagatcaagaagaaaatatagttgaagaactgatctcagagtggggatggcctttcacgttgtacctaaaaaaattgaattgactattaatattaaaagcacatggcaaaaatatcataaaatatatttgcaatgtatgatagaaaaaggtttaatgttattaatacataaagaattcatacaaatatgtaagaaaaagctcagcttttcataaaaatgagcaaaggacatgatcaggcaagatacacaagaaggaaacacaatgggctaataaacatataaaaatgattaactttcttagcagtcaagaaatgaaaaaaaaatactatcttatgcttattaaattgccaaattaagaggtggggaaagatagtactcattattgatgaggctatagaggaatgggcattcaaatttcttttaaaaatgtagaaaaataaaactacattttattttttttttttttgagatggaatcttgctctgttgccaggctggaatgcagtggtgcgatcttggctcattgcagcctccgtctcccaggttcaagtgattctcctgcctcagcctccttagtagctgggattacaggcatgcgccaccatgcccggctaatttttttttttttttttttgtatttttagtagaggcggggtttcaccgtgttggccaggatgttcttgatctcttgacctcgtgatctgcc

SEQ ID NO: 6460 - DNA, 1042 bp, Homo sapiens
tgtttggtgttcttttgttgtattttttagaatgggggtgggggcctaagtgtccttatgaagctgtggtccacgacaggagcttgttgggggagtaccagggttctgctgctttcctgcatctgagcaacacaacagagatcatcagttttaaatagagtagccctcacaatcaaaatatcatagaatatattgtaaagttatgttgctaattttcctttgaaatataaaatattttaagctttttgtcaaaagtggtaacatcttaatacaaataaaaacctttttgtggttgtaagatttagcttataaatcattcaaattgaagtgaaagaattaccaggtcattgttaatgacttagtctattaagaatatatgtatttttgtaaaggaaaagcacttgtagatatttaatcagtacaagatatgtcttttgcagaaataaaatgctgcttagagattctccttaaatattttttatttttgtgctcaaatgtattttctgttgatctatggaatgttctgtacaaagctgtataattgtactgttgggctagatactttttttttttaatctggacttagccaagtatatttcaccatgttaaaatacagtatctttgttattaaaaattaaattgcataatttattattgtttgtcatctttaatattagtcactgtagattgcagccttcattaaaaatatctcctttaagtactagtcctgtagcaaattttattgaaatttattgagtatttgagatcataaatattttctaaggattcttcagctgtttattttaaaatggcacactgtccctcaaatactagttaaggtgtatacacacacacccttgaaggattttttgttttgttagattaatcaaatccaaaagaacgttttgaaagtaattaggaatcaaaggcaggcccaagtgaattgaaagaaagactgtttccttcagccagttagatagctaagctttgtttattaatactttccatgtgcacttgcctcaggaattcattaggccaaagc

SEQ ID NO: 6461 - DNA, 1030 bp, Homo sapiens
tttctccttacaaaggccttttcctccttcacgactttgctgtcatacagtcctgctccttcagcaagccctattcttcctgtgaagttctgctcctcctataagccctgatcttccttaaacagctttgcttcccctacaaagccccactctacctacaaagccctgcttctcctgcaaagcaatgttcttcatacaaagcattcctcctactacaaatcacttttcctcagacagagccctgctcatccttacaaagtcctacttcttcaataatcccaacttatccttaggaagccctgctcctcctaacaatgtcctgtttctcctacaaagcactgttcctcctcacaaagcaccactcctacaaattccactttatccttacaaagccctgctcctcctgcaaaccctgctcttacttacaaagtcctcctttttaaagagagcttctttttccaatgtcctgttgctcctagaaatccccacttcttcaaagtccaactcctctttacaaagtcctgctcttccttcaaagccccaatccccctacaaaccctgctcctttacagagccctacttctccctatagagccttgcccttcctacagatccctgctccaccttacaaagtcctgatgctgctacaagcactgtttctccttataaatatgtgctcctcttcacaaagacctgctcctacttacacagccctgctctcctacaaagcccagcctctccttgcaaagccccgcccatcatacaaaccctgtttcttatttaaaagccctactcttcctacaaagcccactcctccttacaaagctctattccttctagaaaagccctgctcctcctaaatccctgtgcctcctacaaagcccgcatgccttcacaaagtgcaactcctcttacaaatctcagcaccataacaccccttctcattagaaattgtgctcctcctaccaagcttgctccaccttccaaaagcttgttcttcctaccaatgcctgtttctctttacaaagcc

SEQ ID NO: 6462 - DNA, 1035 bp, Homo sapiens
tcggttccgctggatgtttgggttattttctggggcttgggcccccactttctctaagagaatgacctgcatcttgagtcggcatgatctgttggatgagcataggtgtcagcaggcgggagtgggttttccacggaggtgcctgcctgcctgcctgccttggaggcgcgcagatttttgtccttttcttcgcttttctttcccttcccccttcagattaaacaggctctgcggcgagtttccacttaattgtgacctttccgttgctgtcagtgtagtgggaggtagatgcatcagtgatggttttatttttcatatggtacagacatgtgactcaggtggggggaggctttttgaaccttttatttaaacccaagttatctaagcttgacagggatgatttcccagctgtatcttcgtaagggttatttggagagcgctgtcaggcttcaaactacatattgccagatgatgtcatgggacagccccctccccctctttccctatttttactggtggttgtgactggttaatttgaagcacaatttaaaaaaaaacctcggattttgcaattttttattttgacataatatttaagtactttttgaaagtttgctttgatatatttaaagatcatgacttgtcatgcagctgtgtgtgacaaaatagtaaaagtttagtgaacattatacattttctttattcctacttgcggttcatttcttaaaacctccctcttaaatgactaagaacttactaaaatagctcactcttcgttaagtactgtattggtgttaggaataattttcggattcggtaggtttttcaaaaatgtctgagggccctgataactggaaattgttaaaacaagctctttaaatcaatgcagcaaattgcgaacagtaatgatacacgtttaaaagcgtagctacaattgattggtagattggagctggggttagggattaccctagaaaatgctttgaaggaatttgtcacccagctgcttggagacctggttcctgctgctggtac

SEQ ID NO: 6463 - DNA, 1046 bp, Homo sapiens
aataaagaagaatgaacaaaggctccaagaaatatgggattatgtaaagagaccaaatctacaactcattgacatctcagaaagagagggagagaaagcaagcaatttggaaagcatatttgaggatatcatccatgaatatttccccaacctcactagagaagccaacattcaaattcaggaaattcagagaacccctgcaatatgcaagatgaccatccccaagacacacagtcctcagattctccaaagtcaaaatgaatgaaaaaatgttaaaggcagctacagagaaggagcagttcacctctagtgagaaccctatcaggctaacagcagacctttgagcagaaacccttcaagacagaagagattgggagcctatattcagcattcttaacaaaaagatattccaaccaagaatttcatatacagccaaacaaagcttcataattgaaggagaaataagatacttttctgataagtaaatgctaaggaaattcgttaccaccaaacctgccttacaagaaatccttaagggagtactaaatatggaaaggaaagactgttaccggctgccacaaaaacacacttaagcacataaactattgacactataaagcaaccacaaaatcaagtctgcataataaccagcttaacaacatgatgacaggaatgtaaaaaggctaaatgtctacttaaaaggcacagagtggcaagttgtataagaagaaagaccaaactatatgctgtcttcaagagacccatctcacatacagtgacatccataggctcaaagtaaagcaatggagaaagctctagcaagaacaatagaaaagaaaaaagagcagggattgttattgcaacttcagacaaaacagacttttaaaccaacaacaatcaaaaaagacaagagcattacataatggtatagagttcagttcaacaagaagacttaactatcccaaatatatatgtacctaatacagcagcacctggatttataaaggaacttcttagagatctacaaagagacttagataaccaca

SEQ ID NO: 6464 - DNA, 1027 bp, Homo sapiens
cccatgctcttttcactgtatagccgcagtgtaaatgaaagtctctgttaattaaataacaaataggttattgttattttataatctcaaattttgtttcctgaatttaccacgtacttattaagcttagtgtctttccttttacgtgttaacagaattttaacacaattatctttaatatctttttcagaatcctcagtttaataacacatctacgtatgtcatctatgctcacttgctacgacagatagctaccttagtggaagctgaccatcatttcctagttcactggtttaaaaagtaaatcattctatgatattaagaacttttatagtctcacagttttaagtttggtattagtaattttacaataaaatatatttaaatattttcaggtctttagaaatgatgcttatattcacaatgcttcaaaagccagttacaaaaatctactttagtactacataaaggataattaaaaatctgtttttaatgtaagtaaccaatttgtttgcacaagctgttgagaatttctgtctactgccttcactttttatatagcacattcctattattggttttttacgtatctcaaagatggtgactggatttgctcagacactactattttaatgtgtgtctttttattttctatctgtaaattcataaatttcaccattatttaaatggcgctttctccttacctaaaaatgtcattgtaaaatataggctagccatcaatatcaatttgtaaaagcataatacttttttcacagaactatacccacatgaacaatgacttctccatgactgataaaagtagaaaggcaaaatatttccaaaagaaattttaaatgcagtaaattatcattattcatagtagttatattctataatgtcaccacaaacatggaattaataaatacagaaccattgcttcaaggggaaatacagggttaggttcctgtgagcctctgatcacatttttgtcagccaatcagtatataactttgctttatgagtgttt

SEQ ID NO: 6465 - DNA, 1048 bp, Homo sapiens
ctatctttttaccctgtttctacccttggttcaggaaaataaaatgttctccatatatatttaatatatatatttatatttgctgagatttgcaaatatatagtcccataaataatccaaaatttttaacttgaaagatggtttgtaacagaattattgttgaattgattagcttctaatagatgagatgtcatgtacatgtttaccactttgatttttttaagtcaatcatgttaataataacattattcgtgtgtttttttaggcatgtttacatatcacaaggattcacactgccattggtttagcagctttaaatgtgataactattctgaattccgattggttggaattgtatcctttaaactttccactaggaggtgctaatagattagagatttttaaagattttatctgtattttagaaaactgttttctttagccattttatccaaattaaatgttattgtcaaatgtactattagattttcagtaatcttcattatgtgtaatatatgtcagtagacttaattgaaagaaatgagagtttgatttttttctgaaaaccttatctcaaaataaaaatggttctttcctatttcacatataattgaagttatcactaatttaaggcattttttaaaaaaaatcaaagtatttcccatttataatgaagtattttttttctgttctttcactttgtgctcatttccctcagtttactgaattgaaattgggggaattaaatctagctctttaatatgcctccaaatcctgaaacataaaggaagcatccataaaaattgaatggaatgggaatatttaaagcatatagtattattttatagtatttttaaaaattttataagtccatctgcaatcctatgattcctatcaggtatattgtagagggcatttctgcattgggtaggagattggacaagatgccttctacattagctttttagattccaagaaatgtaattgtttgtggaagaaaggagggaagagtaaataaataagcactggagataagaaagtataaaag

SEQ ID NO: 6466 - DNA, 1083 bp, Homo sapiens
atgcatgaaacactggcataaaaataagttgtgtagcttaggaccttgtaaacagcagagcactttagaaaaaaatatattaaaaaactgagttggcattttcatttttttctttgctttgttatttgatgatatttttaattcatacaaatgtatgtctggtgcgtaaaaaattaagaatgttaaatcttacatatgaacaacactggttttttaagtcagactgatctgggtctgaatattgggcctacatctttaccagctctctatccctgaacaggttacttgtatatttacatgtctatttttcctcaccagtaaaatgagaacaaccacttttaagttgctttgaggctgaaattaaaggaaacaatgcatgtaaatgcactcagcacagtgattatcatagaccaaacactgagtaaatgctgattctagtagttttaagtcttttaattcagggggctctcaaaatttagttttaaatcttacaaacttctttaaaaatgttttccttttctgtagtgtattcacatttttattcattgatttctctgacagctgttctgatgctgtgaagttcataaagactgaaggaaagagtcttaagatagctgtaagaatcctaaatgatgataacaacactatcagatagtaggtgggggagatgacaccaaaaggattcagaagataatttttacatgtgcatcaaggggcatctactgtccccaaaatgctcttttttaaattactttttaatactaaaaaccggaataatagtatcattcattatattatctactcctcggctgctagatgttttgtgtatatcactcttttaatctttttaaccatcagtcctcaacctttttggcaccagggatcggttttgtggaagacagtttttccacagaaccagggaggagtggggagagtgggaggtggtggtagttttggatgaaactgttccacctcgggtcatcaggcattagattctcataaggggcatgcaacctagattccttgcacgtgcagttcacaatagggtccttgttcctatgagaatctaatactgccgcttat

SEQ ID NO: 6467 - DNA, 1120 bp, Homo sapiens
ttcttgagaccataacaatagagattttatcaaggattactcctcagtttgggaagtatggttttttgggggttgtgggggtgaggcacagagtttcactcttgtcgcccaggctggagtgcagtggtgcgatcttggctcacttcaacctccacctcccaggttcaagcaattctcctgcctcctgcttcagcctcccgagtagctgggattacaggtatgtaccaccacgcctggctaatttttatatttttagtagaaacagggtttcaccatgttggctatggtggtctcgaattcctgacctcaggtgatccacccacctctgtctcccaaagtgctgggattacaggtgtgagccacagtgcccagccaggaagtatcttcaatctaaagatttcgccaaactccaagcaacttttttttttttttttaaacatagctacctattgactgcctccaaataatttcctttaagtgcccaagatgtggcttcaaacattaaaatctcagactattaatctactgtctcagcatagcagattacattcactcacatattgtagtccttacagtgtgactgtaaaatcatacctctactatcagtcaccagactggtttcagacatcttaatgactagggaatcatgttgatacagacattgacacagaagtctgtgtcttggaatgttggtaactatgtggatataatcactttacccattctacccatatcgatcgcctcagctaaaacttcagtttcagttatgtctttctctttaactctgatttcatgcaaccctcttctctttccagccttattttgacagaaggctactacttgaccttcctttagatcaccaatcctttgggacagatatcttcccagttgacactgtctctcataacagctagttattttactccagctatttctgtgcacatctaactctcctttctgggggagttaacctgtgagtcaccattttgattacttcagatatgcttattactgctgaagaatagtaatccttattctaaaatgcttgggtacatcaaataactttatagaggtagctttacaggtttttctttattttgattctttttctcttactctc

SEQ ID NO: 6468 - DNA, 1049 bp, Homo sapiens
ttataattggattttctggttttatatttgggttttttccctctcacacattttattcaaccattatttgaatttcattaatatatttgattaatatttcagtcaactccattacatttggcagcaggatataacagagtaaagattgtacagctgttactgcaacatggagctgatgtccatgctaaagataaagggtaagcatttgaacaaaaacaaggactttttaaatgttaccctcttcttaaaacaatctttgtaaccttagaaaaataatattttttactaaataacattaatatatattgagcttttacaatgtacaggttgctctgagggcgcaggaaattataaaaccttaagcccacagctcatagaaggtttacattacacttcagagggcatgaaaagatacctaagaatacaatgaggtctctaccaagtgttgagtcatagagagggatagcactgcaggagttcccaggaaggaactctcagtgatggttgactggagtggttgggaaatccctcagaatgaggtgtgacttgacctggactgtaaagtcaagtctcaattcaagaaagcagagtttgcgggacattagtctgtaagacaattgggataagtgggggctgctacagcaaacgttaaagcacatttaaaaaacagtgactagactagctttgctggagcagatgattcacacaggagacaaatgaagtttaggattagagaaataggtaagaaccaggttttggaggactgggtatttagcctaagtaattcaaagttcaccctgtgatctgaaacaaaggggatgattattctaaaagaagttttaggaggtgcgtttgaaagcaatgtgttggctaaattggagagagaggagactagaagcaaaagcagcaattaggaaagtgagcattctagaggtttaagcataatcaggatccataataatggtggcagaagaaatgaaaatgaaggcatagatgcaagagatattgcagtgtaagaatgggtaagatttgttgaatggatacaatga

SEQ ID NO: 6469 - DNA, 1034 bp, Homo sapiens
cgcccaggctggagtgcagtggcgcaatctcggctcactgcaagctccgcctcctgggttcaagcgattctcctgcctcagcctcccaagtacctgggattacaggtatgtgccaccatgcccagctaattttctatttttagtagatacagagtttcaccatgttggccaggctggtcttgaactccagacctcaagtgatctgcctgcctcagcctcccaaagtgctgagattaacagacgtgagccaccacacccagtccaaaacttcccattttgatcccttttagatgagagtagaagatatatattatctttggaagtggatcccaggatgttacctataccttttaacttctgttaccctgcacccattctactccttcagcacttttccccactttcagcagctgttacgggaagagaaagaggacacttgtttccagtgcctctttggttcctttcgggcctgagtcttatgaaatacgttttcccatagaaacaactttataataataattagatactctgagtagcatattaaacttataatgtggctgtaatgttatacatttgtaacagtaatgcttttgcttcttgtaaaactgaatcttgactccagcagaacatttgaaagttgctatggataagaatgaaacatcaaacagattgcacttggacttaaagacaactgagtggtactttcctaagacctagtattttactaaataagaatgaaaggctgactagaggtcatacctacagagggagttagctaatgtgagggtgtaagtagttaccaggatagtaaagttaagcaaagtcaggagaaagcaagtagatagggattgagaatgcagattctgagcagtgctgagtcaattggcaacacttgcctaaatagtttggctaccagaagctggcatttaacagcaaacacccagtgactgctttccatgaccagggcatttgctagccatggaaggcactaagacacgatccctggacaaagcattcaaataatgaaggtctgg

SEQ ID NO: 6470 - DNA, 1034 bp, Homo sapiens
gttcacgaaataagtcgcacaagaaaaagatgggagaggagaaaatactttggtgtttacttcttgtttaaacaataatacagagtttttaaatgacccattaactcaattttaagtataaattataatgtgacaacttaagctgtcataattttgggccaatagtagaatagtattgcaagcaatataatcatggatgcactgtactctgcacacccaaaccacactggaatctgtgattttaggctctcggtttggtttggtttggtttggttttttttgttttgttttgttttggtcgaggggagagggtctcactctgccacccaggttggagtgcagtggcacaatcatggctcattgcagccgcaaccttcccgggctcaggtgatcctcccacctcagcctcccaagtagctaaaattacaggtgtggtgccaccacacatgttaatctttttattttttgtagagatagggtttcaccatgttgcccagtttggtcttgaactcctaagctcaagcgatccacccacctcagcctcccaaagtgctggaattataggcataagccactgcctctggcctcaattattttttaatgaattttttaaactaaagtatatttagttgagggccaccatgataataagtggaaaccatctgatatgaaagatgagtgccctttatgatgtcttttgctccaaaggcaaatagatgaaagttaaaagtgcatattttaacttaatatagaagaaagctttgtaacaacagaagttctctagtaattataaaaagccatgttactgcaaattagctccccattgtcaaaaatactgaaagagtaagaagctggttcaccttagttgaatgctgtagaaggaaatttgtgtttgattggttaaactagtttgacttcagtggtccatacttagccaactccagtacttggaaatggctaaaattaaaaagcctaacaatacaaagtgttagcaaggatatgtagcaactggaactcaaacgttgccacgtagc

SEQ ID NO: 6471 - DNA, 1054 bp, Homo sapiens
gtcgcccacgctagagtgcagtggcatgatctcagctcactgcaacctccacctcccaggttcaagtgattctcctgtctcagcctcccgagtagctgggattacaggcacgtgccaccacgactggctaatttttgtatttttattagagagggggtttcaccatgttggccaggctggtcttgaactcctgacctcaggtgacccgcctgcctcggcctcccaaagtgctgggattacaggcctgagccactgtgcccggctatattctgttatttcttcatgtaaagaaacctcaacctttgcaagggtgttttcttaacctttaaaatattgcatgaacacaatgctacttggaaacagttttgaaaaggatattggtcacattaaggttttcatcacaccagtgctagctttttcaaagatacaggacaactgtaaagtttgattggaatatgtaataatagatattatctgataggtaggattttcaggttctgtcagaatttggtaattgttgtaattcaatcaaaagtcaagagcaaagttgcgtcaaaagtaaaacaaaaagattaaataactacttgattgttcttgattggaaacacgaatgttcttaaaatcagttatgtatagtccttgattaatgctgcaatttaaattatttagcattgtgctgctgcatctccatatcccaaaagaaagcaaatatgtgaactgttgctaagaaaaggagcaaacatcaatgaaaagactaaagagtaagtatacatttaatgattaaatatcattgagattttactcttttggaaaatatattcactgtctggctgattttttctctctaagattcttgactcctctgcacgtggcatctgagaaagctcataatgatgttgttgaagtagtggtgaaacatgaagcaaaggtatacttcctttttggtaatctttggtaatccaatgagttattttttatttagcaggtgaaatgcctgacttcctaaactatttactttctcataagtattacttttttttccttataatctatg

SEQ ID NO: 6472 - DNA, 1048 bp, Homo sapiens
agtctctgcatttaaaacattttttaaatgttctcccctgactcaccaaaaagaacttatttctgccttaaatagatttaggttctacaaagtataatcagtataattccttatgtagttcaagaattatctttcatcagttatatgtaattatttaaattaaaacatgttcttctgtggcattattgttcatttattacttttcagaggccttgtacctttgcacaatgcatgttcttatggacattatgaagttgcagaacttcttgttaaacatggagcagtagttaatgtagctgatttatggaaatttacacctttacatgaagcagcagcaaaaggaaaatatgaaatttgcaaacttctgctccaggtatatttaaatacttaactgtaaagagtatgaattacatagcatatgtttatggttttctaaataattctagtataaagttaaactagtaagcaatgggaagcaatgttacctaattctgtacctagattttagaataaatataataaacattttatattttaatccacaagtatgtttactagcacctagagttatttttgtctagagccaactatcatgtgatagttctcttattatttttagtttttctctttggtacttttatattcatcaaatataaaaatatttgatgaattatttacttacaagccagatttatttagcattgataaaatggatgatactggttcagtacagataccagtggatattttacaataacaagaatacagagatttatactttatttaaatgttcatgaaaagtaaaaatagtataacatgaaagttaatttttaatgaaatatgactttattttgaatgtagtttaaaattttgactacattaatgcattaaaaaatccagtaatatttaactgcctctgtattctttttataataattctttgtataaacattagtaacagtgatgttaaccttcaaagtagagtctcaatataaatttagtttttctttggtatagttaacactgactattttctcattgaccaaag

SEQ ID NO: 6473 - DNA, 1006 bp, Homo sapiens
atctgcttaggggagatgcagctttgctagatgctgccaagaagggttgtttagccagagtgaagaagttgtcttctcctgataatgtaaattgccgcgatacccaaggcagacattcaacacctttacatttagcaggtaagtgaatgaagtttcacagatttaggctggtaatatctgagattcattttacccaggtaaaatattttctgtaactaaactttaaaaattcaaatcaggccaagcatggtggctcacacttgtaatcccaacactttatgaggctaaggcaggaggattgcttgagcccaggaatttgagagcagcctgggcaacatggcaaaaccacacctctataaaaaattacaaaaattagccaggagtggtggtgtgcacctgtagtcccagctattcaggaggctgaggtgggaagattgagcccaggaggtcacggatgcaataagccttgattgtgccactgtactccagaaacaaagtgagaccctgtctcaaaaaataaaaaaaataaataaaaattcaaatcaagtatcttctaatgccaccattatactcttcagtgtatttgtacaggacgaccgtacttgaagctattagctgagttcgagttcactttattactagtatgttacattcagtaagaacaattgaagtaggctctgccagtccccatgtgctttgggaatcattattccaggtaatcattttattggtatcacctttggtaaacaagttttgaaaaatatgcctacttgagccagccttccttataggaagctaaagctttctatttttcctgatggtagctgctaagcacaagcaggaaaaaaaaaaaatctcaaaactctcagaagttacataagcctctcaccaaagttatctgttgttttggtttgtgagagttctcataacaaaataccaaagaccaggtggcttaaacaacagaaatttgttttctcacagttctggaggctaggagtccaagttc

SEQ ID NO: 6474 - DNA, 1026 bp, Homo sapiens
ggactcatacaagtttgtctaaatatacatgatttaaacatggtataaaaagcaagaaaaaataatgcaaaatttctgccatttcgtgtaatgtgggagatggaaatgtatgatgttcatttcagtcttgtattataacttggtgttatacatgatttttacctttaaattctcactccatgtaagttgagacctcactgtccaaagaaaccaattactctatgtgtctttcaagtattttggaagtgataagccacaaatgctaacatggtgagaaaaagctttacttccactggctatcaggagtttctagtccatgcaagacaaaatatgacttgacctttgattggaagttgtgctgtgcatatttatgttagcttttatatctttcttgtagcctatctagaacacttaacattactgtgtccaagttgtctttgtaagtcacaaataatttgtatgcataaaatatttctgtccacttctgcagcgttaaataccataccttgagacctagaaagacttttagattaatgtaatattttatggtagttttataattgtattcttctttacttgatctttttaaattcttttgctttaaatcctttagcaaaaggataaaaactataatagaaataagttttatttcatggctttaacagcacctaagttcctctactagacttgcagagatgtgtacctctgagttctctctagcaaaaaagcatgctcttgtggccttctggggaagaggactctgaggcccactctggtttgacttgtatgtgattgcagacctttgacttgcagcctctgagacccatgtacctgagttcaagaagtggtatgtaacacccatgaaggcagagactttggtaggaaggttttcataggaaagatacaagcaaatcagtcaatataattttgggaatctacaaagctaattgataacacaaaaagcttccaacttgaggcaagggggaaatgttttccagaaggtaaattgttaatagagtccaatga

SEQ ID NO: 6475 - DNA, 1048 bp, Homo sapiens
attttaaaacttgcttatggcagatgttgtctctgacacgtaccctaggcggatgatgtcagcgctcttctgacagcagccatgcccccatctgctctgccctcttgttacaagcctcaagtgctcaatggtgtgagaagcccaggagccactgcagatgctctctcttcaggtccatctagcccatcaagcctttctgcagccagcagtcttgacaacttatctgggagtttttcagaactgtcttcagtagttagttcaagtggaacagagggtgcttccagtttggagaaaaaggagggtgagacgttctacaaaaataactttctaactggtattgtagccccgtatttgtcatttgggatgctaaaaagtcatttttaaccttaaatacaaggtattagtataaaattagttaacatagccttaaaaaggtttaaccttgtattactttcttccttccaagttgacagttgaagagtcttgtgctactaacctactatttatttatttatttttgagatggagttctgcttttgtcgcccagactggagtgcagtggcgcgatctcggctcactgcaacctctgcctcaagggtttaagcaatgctcctgcctcagcctcccgagtagctgaaattgcaggcacccaccaccatgcccggctaatttttgtagttttagtagagatgggatttcaccattttggccagactggtcttgaactcctgacctcaggtgatccacccgcctcggcctcccaaagtgctgggattataggcgtgagccaccgccccccgcccttaatctgctctttagatgtaaaccttttctgttaaaattcatcccaccttatgcaacagtgtggagcttgttttcataaacttttttgtgaagtagcttacatcctgaaagataggaaaactggttttaaaaatatagatgcaattaaaaacaaagtttaaaataaaaatgagagtactgagactgccccattgattagcttttttctaatgttgaaattttgtagctttctcttgttcagtat

SEQ ID NO: 6476 - DNA, 1836 bp, Homo sapiens
gaacaattcttatagatctgtctcctgatgataaagagtttcagtctgtggaggaagaggtatgttcatataacttcaatagtaggtttgccgtatatatttagttcactttgtatcctcttgtttctttttcttcctttagtttgcattatataattttcacctataaaatctgttttcaagctgattatctaatattactagagtaatattactctagaaaatattactcatgaatttataagactcatattctttgttttttgtgtttgtttttgtttttgtttttgtttttgttttagtagagatggggtttcgccatgttgcccaggctggtcttgaactcctgagctcaggcagtccacctgcctcggcctcccaaagtggggcaccatgcccagccctcatattctttgaataacaaaaatattaaaacctgttttgtattctcaaaaatagaatcagacgagtcaagaaccatgttccccaaatcagaaaataacacaaatgctaatgcacatatatttcaaaccatttttctgacagatgcaaagtacagttcgagagcacagagatggaggtcatgcaggtggaatcttcaacagatacaatattctcaaggtaataaattagtgaaagtaaagttttctgagactgtcgttttcaaagcctgaagccataagtaactttcataagaatctaatctgtctagcctggtaagtccttgacttggcatcagagactattttgggaaagaggatacccttggaaggttaatattctccaaatccctgtgctatttttaataaaggataataattcaattcttgttgaacatattcaagtttatgggttatgctttatcttggggtaatgctaaatactataggttcaatactttatataaagtactgttaaagtactctattgtaacaaagctgaattttttttgtggcggataccatctttatagtcatacaatgcttatttttttatcctgattgactacaggtttctgaaagtccccaaatatattatctttttataaactttaatagtactctcttcatcttttccagaaaaatatattttaaaaatgttttgagtcatttagtgactgctgtcttactgatttcagttactcttcttaggaactttttcaacattatgtttttcttgaactatagtaatcaaaactgcacaccatacttgatgcataatgaattcgtattaactacattgatgcagtatattcctaataattgtaaaaataagacagaattaatatgtgacaaatgcctttctaatacacaaatgctaaactctgaacagtatcaaatctttcagctgtattgtattactgtttcataacatactatgagtataatatgtaatcaggcaaatacatgcctactacaggtacatttcagtcaagtccactttgtctacaagcattaacaaaatgtgtggagttttgttaggagtgagagcaggagagaggttgtgtgtttgatttctaaagtagttggatttgagaaagatacagttttcttcctctaataaaggtattttcatgcgttgtgtaataaaaattttttcagtgatgaaacgggttttttttgttgttgttgttcctttttaatgcataaatgagatctatttgtgacagttacgatccttgattacatctgtggcaatattttgcattatttgagccaagactaaaaccatcagcttccaggtgtgctctaggaaccagcagggggctgtagcacctttaaacacagctaagaaacaacactagtattgtgaattttgttcctagaaatactccta

SEQ ID NO: 6477 - DNA, 1029 bp, Homo sapiens
accaagttcccagatgtgacactgtatttctgaccactgatctagaaaaaaacccctagagcagtactttgcactttggcagcacattggaatcacccagggaatattaaaaaactattaatgcctgtgtcccaccctcacagaatctcttttaattggtctggggcatgatctggatattagaatttttaaaagcttcccagttgatttcaaagggcttccgagctgaagaattgcagtcatggagggaaacaggttctttctttgtgtttgttttgttcttactgttacccctctaaatttaggcctgcataggtagtacacagtaggccctcctatgtatgacgtcccactcacttctattttagatcataaattggagtggttaggaggcatgtaatttcctgtaaattgaacactgctgtttttatttgtcatatatggtctgaaggctaaatagttctgattattagtaataagcagcattctaatacctccctcttctttggaagatagaaccatcaactggtctacagaaatctcctgttatcttctaaaaagaaacaatgacgttaatactaaaaggttgtttgaaactaagaaaggctagtcacatgcctgagaggagtgagagggtaatctactgaaactggtggtgaggggagactaccagtttacttcctatctaaggaagtaacatttcagctgaagtctgaaaattgagtgggtatcagccagtggaagagtggtaaaatagataacattccaatggtggagaaaattctgtggatggggaccattaataaagcaagtttggcctttgtgaagaaaagaaaactaatgtgcatggggcataatgaacataaaatgagattcaagaaattggagccattgtacagaatttggattttctcccaagtacagtgacagcctctaaaaggttttaagcagaaaagtgacttgatctaatttttgtttgttttaattagttggatgggaaaggtttggacaggaattacagaagaaaca

SEQ ID NO: 6478 - DNA, 1047 bp, Homo sapiens
agcagcttaagaaacacctaggaggatgaataaaagcaagtctgctactagacatagtgaaactgcagagcatcaaaagacaagaaaaaaaatacttactagaaaagacaaaggattaatacactgacagcagatcagtggcagcaacagaagccagaagacaaaataacttagaagtgctgaggaaactactgttagcctagaattctatacacagataaactagtacttaaaaaagaggatgaaaaatgcatctgctcttttgctgagagatctagtagattgttctttagcaaagaaagcagttgaatccaaaagagcaggatgcaagaagcatagtgcacaaagaaatcggcaaacatgtcagtaaaaaggctgaaataatataactgataaggaataatattcaagaccaatctgtatgatttgctactatttgtatacgtaggaaaaagtacaacatgcatttgcttgtttatgaataaaattccttcaggatacacgtgaactgttggaaggaaacctcagtgccactgggatcagatgtgaaagactaaactgtatatccttttattccttttgaattttataacaggactatttaaagcactataataagcattgtctgcaatacacaagtaatagatttgagatttttaaaacaaggtggaatgaaagtactagttgacaatagtatgggaaatagaagctttaagatgctgatgaaatttagactttaagtcaagtatgcatattaaattttcaaagataatcactaaaagagtagaaatcgaagtgtaaagattgaagaaaggtaatacaaatgaaccagtcgaataaaaataagaataacaggtgactcgtgcacttttttccccaaaaaatatgtcaaagaatcaggtgaacaggaaatatctgtaaaaggttaagagtatcctggacgcacctgaagaagaaaaataaagcaggagaaccagagatgaagaatagaattaatgctgtcgtaactgagatagtgtgatattgatataggtgtagagtctttga

SEQ ID NO: 6479 - DNA, 1042 bp, Homo sapiens
gtgccacagaacactagaacttgtttcttctatttagctgtaaatagacggttaaccagcctcccccatccctcttgcttttcctacccttcccagctgctagtaaccacttattctactcttgacttctctgagatcgactttttagcttccatttatgagtgagaatatgcggcatttatctttctgtgtctggcttatttcaccataatgtctttccggggctcatttatgttagcgtaggtcttcattcatagcatctgctcagtacgtttattgacttaaacttgtacatacgaggaaaagcatttgagaataaccattgtatttttgttatttcaggctagatcgcctttttattttactggatactggcactactcctgttacaagaaaagctgctgcacagcaacttggagaagtggtgaagcttcatccccatgaactaaataatctcctgtctaaagtaagaacttttttttttcttttagcataatacaattgtagagacttattcatggataggaacacaaaaataaaggtaaacatcatcttaatttttaaacatttttgctatttcttttttttttctggtcacaagacttaaactttttttttttttaatcaagtttagtagcttaagggatttgagtatagatcgttttgcctgtggcacaaatttgaatctgtcccagtttggtaataaactaagttgtttatctggtttgttagtagtctaacttgttcttaatgactaataattatatcatagttggtagtcttcaaatggatgagtactcatgggcaatgattgaaatacatgagaagctggagtcttgttacattctaagttatcagctgtttgaaaatggaggctttctgctttggtgtatcagtgttttcataatcctagtccattttcttcccttaagcaactgctgtatttttactaaactctgtatgcgtattgaagtgtacctgtatggtaataagtggcaaattctacacatttaatttcctgatgtgcagagtaaagcaggag

SEQ ID NO: 6480 - DNA, 1080 bp, Homo sapiens
gagtttgagaccagcctggggcaagatggtgagacccttgtctctacaaaaataaataaaaaacacttagctaggcatggttgtgtgcacctgtagtcctagctactctggaggctgaggcagaagaagtccttgatcccaggagtttgaggatacagtgagctgtgattatgccactacattgcagcctgggcaacagagcaagacctcacttcttaaaaaaaaaagtttgtgtgtgtgtgtgtgtgtgtgtgtgtgtgtgtaacccatgcaacccaagtaatgatatgctattttctttcattccacactttggctatatggtcaaattaatatttttaaacctcatgtagaacctacttccgaaagttctatggaagattcacctactacagagcgattgaattttgacagatttgatatatgtagattgttacaacatggtgcatcactcctgggatctgctggtgccgaatttgaagtccaagatgaaaaatcaggtctgtagtggttctgagaagaaagtctaaaatttgttttttcagactaatttgtcactgtggtatgctgttcattagtcacacgtaaactaacatgtcatgaaatgtaaattaactgaagtttgcaggtggcgggggatgctatgaatgggaggtaacccagcagtatttggtttaaagctacaatatgagtattttttctcctttaagtgaatatgtgcatcattagttgatacatattaatatttcagcaacaattttattatgtagtatggaaattataaagtgttccccaagagccccagtttaatatattataaaatcaggattagtatagatcgtggtagtgttttcacaattctggaaatttgagagattgattgttttgtttttatcacatatttctgatattattgggtttactcatgctggtgtccaacgcaaaaactaagagtgaaaaataagacttggataggtattcacacctgtaatcccagcactttgagaggccaaggtgggtggatcacctgaggtcaggagttcgagagcagcctaaccaacatggcgaaaccctgtctct

SEQ ID NO: 6481 - DNA, 2036 bp, Homo sapiens
taatatattcacttttttatcataaaaaatgtcaaatactcatttcatcttgtttagtatggtttctattaaaagatctagttatttttgcagagaattaagaggataatttgcttaagttttggaaaagcatagtttttctaataatggaggtaaaactcttcaaaatcttttcatttatatcactaaatagtaagtttactaactttactagtgtattcatggacattatcagagatcaaaattatatatattttggttttgccatattcttatttcatagatctatgaagaagtctaggtaattgtatttcaaagaaaagcctggctcagcgtggtgggtcacacctgtaatcccagcactttgggaggacgagacgggcagttcacctgagatcgggaggtcgagaccagcctggccaacatggtgaaaccctgtctgtactaaaaatatgaaaattagctgggtgtggaggcgggtgcctgtaatcccagctactctggaggctgagacaggagaatggcttgaacccgggaggcggaggttgcagtgagctgcgatcgtggccattgcactccagcctgggtgacaagagtgaaactctgtctccaaataaaaaaaaaaaagaaaagtcctataggtgattctgatatgtaaccaggattgggaactgcagtttcttgggaactcagttttttagtgctagtaagtcacagcttgctgaacagtgcttgtttaaaaccctgtagttaggttttctttaaatgttgatctgtgtttgtcccctcatatatattaatgacaccatatatgattagtatacatactggtctgggtttcctttgcagctggttgtgtagattatttcccccaatagggcttcgcctggaatgagaggaccaattttaggctctgtgtaagtgtattggggttgtgatcaagcagtcttttggatgcctagtgtttttccctcctgggtagaccaatctttaaaaaaattttcaagcagctttattgagatataatttatacattatacaattcatcatttaaagtatacaattcagtggtttttagtatactcacaggtatgtgtaactatcaccacaattttagaacattttcgtcactttaagaagaaaccccatatccttagctatcacccttttatcctcttacttccttccctcctcttcccagcaaccatgagtctacttttggtctctttagatttgcttattctcaacattttatatttggtcacataccacataacagcatttaagtcagcaacagactaggactgcatatacagttgtggtcccataaaattatattactgtatttttactgtaccttttctatgtttagatatatgaatacttaccattgcgttacagttgcctacagtatttagtaacatgctatacaggtttgtagcctaggagcaacaggctataccatacagtgtagctgtgttgtaggctttatgatctaggtttctgtaagcacactgtgatgttgacaacaaccacaaaatcactgaatgacacatttctcggaatgtactcatcattaaatggcatgtggctggtaaattgaatcatacaatatgtggtcttttgtggtggttttttttttacctaagagaatattttcaaggttcatctatatgacagcgtatatcagtacttttttttcttttctaaattttattactgttaagggatgtatcaggttttttaaattgtggtaaaatatatataacaaaaaatttaccatccttaaccgtttttaaaacttaagtttagtaatgttaagtacagtcacattgttgtgcagccagtctccagaagtcttcatcatgcaaaactgaaactacctattaaacgtcaaatccccatttccccctttccccagcccctggcaaccaccattctttctgtctccatgaatttgactactctagatgcctcatgtaagtgaatcctacagtgtttgtcttcttgtgatgggcttatttcacttaacttga

SEQ ID NO: 6482 - DNA, 1017 bp, Homo sapiens
catatgagctaagttggactatagcatgctggaccaatcacttaaggctataatttatttatttatttttttcagcagatggtgatgatcagtttcttctattgacatttattctcataactttttggtgatattatttttattttgaagtcttacctcttcaaggccttctctatgggttaggatcatacatttgtgcctcataatgtagcataaaaaaagttaagaagcatatgtgtatctgttgggagttggaataacagagaaaagggaggaaaagactgaaattatggtacagtcatacaacaaaagagtgtgaacctgtcaaaaaagaatgtgatcgatgtatatatactgaaatttatagacttggtcttcttctgaggctgagactataggtacttattttaatttcaaaagttccaactcagcattcttttattcttttagactcttcaggcagctgaattgattgactcagagtttcgagcaggaatgagcaatagacaaaagaacaaagctaaaagaatggccaagttatttgcaaaacagagatccagggatgcagtggaaactaatgagaagaggtagtaatctttttttgcctattcacttaaaacaagagggctctgtggctttaatctgtgtctgcttgatttatagaaacattctgctgacatatttagctggggagtactgtttggattctcttactcaattgtcagagagtattcattgtactaggaactgagaccacttccccagaaaaatccacatgtacagacttttttcctactaattatcagttttgaatgagggctgaggatctccaaaggggagagcattccaggcagaagaaacaagtttaaatgccttaaacatggaataatcaagaaacaaatagaagggcagtatggccttctatactgggatgagtgcacaggagagtgatagagaatgaaatcagagaggtgtctaaggaccacaagttaagaatactcccttagtaaagtggga

SEQ ID NO: 6483 - DNA, 1046 bp, Homo sapiens
taaacttcaattccacagacagtgtcctgttttccactccctacctcactttgtttgccaagatgtccctataatccctgattggcctgttctttaaaaaccaagcataagtgttatcctcctctgacaagtctcccactaatctcttcttctaagaaggaataaggagtgctctgtattcccacagcaacttgcacttacctcagttatatgttacattttcttaattatttatatctctcccacattagtctctgcattttttgagcatattaagacattatatcttatttatcttttaataaatattggttgaatgattgaattaatttgggggtaactgaggcttttcctcagttgtctacagtcattgaaaagtgacatgagcatagtggatttaggacaatgtttttaaacttttagcattgtaaccctgtttcaaataaatcttatacattgtacatttcaaatgggtagtttttatggtatgcaaattatatctgaataaagttgttaaaaaaaagactgactgaacagtctttcaatggggcttgcaaagtagtctggtacaacagtcctgtagccttagatagctcttggtaattaagtgaatgataactgcaccattttgttctgttctgttttgttttgttttgtttcttttccttcttccattgcctgggcatttccaccagaagggaggttaaagaaagaaagagaatgattcagttagcaacacttagccacttagtaaacagccactcttaagttttcacgagttttagagttgaaaagaatatttttcccaaaaagaagtttgtgagttttggaattccttcatgaacagttagtttatatttgcctgtagctttcttgtttcaccagagtattctgcgggtgttaaatgtgattttcctcaaagtcatttagacatatttaaaggttagataattttattcttctcaagagaatgtctttcttaaagaatataatgctaatgttaaattttagtcagattaaaataaaatttagttgggaagttttag

SEQ ID NO: 6484 - DNA, 1031 bp, Homo sapiens
tgtaatcccagcactttgggaggccgaggtgggtggatcacgaggtcaggagttcaagaccagcctgaccaactggtgaaaccccatctctactgaaaatacaaaagttagctgggcatggtggcacgcacctgtaatcccagctactcaggaggctaggcaggagaatcgcttgaacctgggaggcggaggttgcagtgagttgagatggggccactgcactccagcttgggcgacagagtgagactccgtctcaaaaaaaaaaaaaaagttacggcgtccaacatgatgttttgaaacgtatcagaccaattaatataccttagttcatacagtcatcatttttttggtgaaaacccatttaattaagttttaatcttttagcagctttcaagtgtatttatcattaactgtagtcaccatgctgtacagatctacagaatgtattcattctatgtaaactttgtaccctttaaccagcatctatccatttcccctcagtcctctcccttccacgcactaagcacctagtaaccactattctactctgcttccatgagtttgacattttagatttccacatataagtgagatcacatatttgtctttctgtgcctggctggtttcctttagcataatgtcatccaggtttattcatgttgtcacaaatgacaaaattaccttcttagaggctgaatagtatccagttatatatagatacactacagtttctttatccattcatcacatagacgaacacttgggttgattccaaatctcagctattgtgaataatgctgcaatgaacacagaaatacagatatctcttcaatgtactgatttcatttcctttggatatataaccaaaagtgggattgctagattatatggtagttttatttttaattttttgagtaacatccatactgttttccataatgctgtactaatttacattcccaccaacaatacgcaagggttcctgtttctccacatcttcctccacacgttttgtctttttaataatagct

SEQ ID NO: 6485 - DNA, 1068 bp, Homo sapiens
taattttaagaatataagaataatgactatgatattggtcagtcttagaacatgaaaatgtcagacaatgaatttaatcgggcccttggtggaaacatttatatatttaatgcagatgcatagtgtttttcaaatctttaacatcattttttcaacttttaagatataatatcaactattctaaatacaggtaatggtatatttaaggctaccataacatcctatttagagggtggttttttttaatttatctaatggctacgatatagccagattcaaataacatatgtactcaataggtttcaatcatatatataatatattttttgtaactatgaacatacacagttttccagaaatagattttacactgtttagaattccaacacctacagtggaaagactgtttattgtagtaatgcatggctgaagcataaaagggagagagaatttctttatatacacaaacatacatgaatatgcatatctatatgcatagatgtacctatcctgcacccaaaaaggtgcctggtattggcactaaaatcatgtagttatactgggcagcaataataattgggcatgaggctgattactcaatggtgagggtaggtatatgtagatagatgtgcatgtatgtgtttgtatatataattttataagtttcacgcataaattaatacatgcctgtgtgcatacatatgtatgggatatatttgtatatatatgtacaggtaataaacatccccaaggtttgtggctggccatacacataggcatcagtttaacaaccatcagacctcagctgtacaataacaggtgttttgtttaattaaaattatactgttctgcagcatttagacatttgtcacatttcattagctttgacaaccatactgtaacattaaacctagcattccacaagagaataaatataagattgaaactgtaaaatatatgcaactgtgtgttatttgtaggaaatggtcactagaaagagcaaaagattattcaggtatacaggttttttttcattgtttaggattttaactcaaaactttatgtaga

SEQ ID NO: 6486 - DNA, 1029 bp, Homo sapiens
gtggggagagaataaaactgggagcaaggaaattgaagttggggtgattgggaaaacaggccagcctgggtgggcatctggtggcaatgacaagccagaaaggaaatctggttttcaggagtataaaaagtgaattatatgaaggttgcttggaagaaaattccattttgtccaatatctgcttttaactttcacagggctcctgttttgtttggttttagtgctccattgaaacttacagacaagtacacagatcatagtgtacaactcaatgaatattcacaaagtgaacacactttgtatatccaacacccaaatcaagaaattcaccagcactctagatgctgctttcaagccccctcgcagttactcctttgcacatttatataaatggaatcatacactgtgtactctttttgtgtctggcttattttgaccaacattaaatgtgtgagatctttctgtaatgtggcatgttgtagatcttcattctccctgttgggtaggattccatatgtggatatgctataatgtatccattctaatactgtaggccatttggatggcgttcagtttggggctgtacaaatactgctgctgtgattattctcgtacatgtcttttgaacatactacatatttttggtgggcatacaccaatgagtgaaaaagtgggtcacaggatatagacaaattcagtttttataaatgttttccaaaatggctgtaccatgctgtggtttgaatgtgtgcccacagaagttcatgtgttggaaacttaatccccaatgcaacagtgttgggagatgggacctaagaggtgatgaggttgtgagggcagagccctcataaagggattagtgttgttatctagagagtggcttagttatcatgatagtgggttgttacaaagcaagtctggccgctggtacctctccctgtctcgagtgctcagttgcccttctgccacgttatgacacagaaagaaggccatgctcttggattttttgacctccagaacggcgagaaa

SEQ ID NO: 6487 - DNA, 1049 bp, Homo sapiens
acttaaaaaaaaaaagaaagaaagaaaaaatagctgggtgtggtggcccacacctgtaattgcagctgctggggaggctgagatgggaggatcacctgagcccaggttatggaggttgcagtgagctgagattgcaccatgccactgcactccagcctgggccacagagcaagaccctgtctcaaaaaaaaaaaagagatcatattctttagcctgtccttcaggacactcaccattattcacagaccatttattatgctccctattatgtttaagatatgccgtacatagctggcaccaactgcctttttaaagcctttcttctctttatgaataagtgtataagtacccaagtcttttgcccaagccaaactggcttgcgcactttcttccaaacataaggtggtttttgtttttgggttttgtttggcatcttttctttcaaagctctacccatttttcaagacctagttaggttctgccttgtttataatgctcttctgaccatgtctgcagaaatatttttctcttcttctccagactcatgtagcagttcatcttcagtgcctcctaattcttttttttttttttttttgaggcagagccttcactctgttgcccaagctggaatgcagtagtgcaaccttggctcactgcagcctccgggttcaagcgattctcatgcttcagcctcccaagtagctgggattacaggtgtgtgccatcatgctcagctaattttttgtatttttagtagaaacagggtttcactgttttggccaggctggccttgaactcctggtctcaagcagtcctccccactcagcctcccaaagtgctgggattacaggcatgagccaccacgcctgacctgcctcctaattctttacatgccgtagttcacatagatgacaatatttatatggcccattggagtaaactgaaagggatttgcctctctggaggaagcacattatggctgctttaaagtaccttagtaaaatgaaacacgtattttttgtactgctgtaattttctaagaaatggga

SEQ ID NO: 6488 - DNA, 1090 bp, Homo sapiens
ttgtcttcatataatgacagtgatttgttctttgttccctgaaccaatcatgatacttcccagatctccttttgctttgtaaatgaatatgccccaacttggtgaataggatggtgtaggagtaacatcagcaagtaggtggcatttagaaaagctaccagaagggtaataagggtgaaagaaaatgaattgaaagggtttaaatgaatcttaagatcttaagtagtggcgtggcctgttgaaaaattggggaaatgactaggaatccagaacattttccactgaatgccagggtgccaagtagaattgctttatgtgctaatggtaagaaaactgcatccataaattttaggaacttgaatggaaagctgacaccatcactgtcatcattgtcaatgttgttattgctagtggtcatatggaggttatatatgtgctaggcaatttttaagcagtttcttaatcacatgtttaatcttttacaataggggaccttaacataaaacattttttatgctaaaactcctttggtggtctggttaagcctatgggttccttctcagaatgtttttgaaagaataaaacaaaatatataggattagaaatgaaaccaattatattgaagtacagctatcaaaatattaaaagcctaaaatagtaatatgaactttaacacattaaaatacaagatttatcagttggcctgataacatttagctcattgtaatttgaaattagttatttcgggatctctacagctgtaaagtaatatgaaaatttctggttgctatactcatttctaattgctgtgctgctaatattactgtggtttgcttgcactcattattgaagaaaagctacattttatttagagcttagcaaaaataaacgtgatggtttttctcccctcattcagatttaccgatccccaccccctaagtttttcatggaccccagattaagaacccctgctttgcaacaactctgtgaaagagattctatcattaaacctatgtagttagcaggggtttgaacccagacaatctggctccaaagtccaggttctttaaccagctagaatatcctgaat

SEQ ID NO: 6489 - DNA, 1121 bp, Homo sapiens
ttttgaaaatgtggcaacataaatgcagataatgaagtgcttttctaatatgagaagattaataataagggcaaacaaaatgtccttggttctctgtttttctctaacatgcacaggaagaaatgatagcttcctttgaaggggaagtagtgtagtagagaaagtagtgttttcaaacatttggaatttgtggaccatgtgatgggtcttcagtgcataccactgattttagataaacacaaaagaataattcaaaatgtttttattgtaagatcaaagaagtatttttaaatcagtatcaggaaaagcaatgattgttcacattattgtaccaccacatgaatggtgaaagactcactaaagtccaagttaaggtttcatatttaactgatttcttttcttgctcttagttgtactaaattagatagccccacctttgaattatagagttgggaagagcaacaattaaatatttctattagatgttttagatattcaaatggacacaaaaattattacaagaattctcactgaaaactacatcaagttgacaagtgtatggcactcgaaagcaaagttgagtattttaattttggagatggcaatgtgtagatctgtccttttggttgaattcagttctaggaaatatgttttcaggtttagtgcagtaattgaatatggttttaagtctacctagttgttagaaaagagtaaatcttggctgggcgtggcggctcacgcctgtaatcccagcactttgggaggcagaggcgggcagatcacgaggtcaggagttcgagaccaacccggccaatatggtgaaactatgtctttactaaaaatacaaaagttagctggacatggtggcgtgtgcctgtagtcccagctactcaggaggctgaggcagaagagttgcttgaacccaggaggcaaaggttgcagtgagccaagatcgtgccactgcacacaagcctgggcgacagagccgagactccatctcaaagaaaaaagaaaagagtaaaactctttggttaagccatttgtatcattatttagtctgcatattttgttactaagaattgtggccgggccgggcgcggtggctcacacctgtaatccca

SEQ ID NO: 6490 - DNA, 1031 bp, Homo sapiens
attttttgagacggatctcgcactgtcatctaggctagagtgcagtggtgcgaagttggctcactgcaacctctgcctcctgggttcaagcagtttctcctgcctcggcctccctgggattacagacatgcgccagcacgcctgactaatttttgtattttttgtagagacagggtttcaccacgttgcccaggctggtctcaaattcctgacctcaggtgatccacccaccttggcctcccaaaatcctgggattgcaggtgtgagccaccacgcccaggcaagatttattttctttaacttctctcaacattgttttatagtttttagattttttttttagtttttaaatttgtttctaaatattttgttctttttgatacattgtgtaaatggaattgttttcttaactttgtttttagattgtttaagtatgtagaatacaatttttgttttctgtcttggaacacaatcagcaacaattgatttttgtaaattgaccttgtatcctgtgaccttgctgaacttgcttaataatttggatacttcttgatggattccttaggattttctaatataagatcatgtcattgttgaacagaaatagttttactttttgtttcccaatctgaatgcttttttttttttttttgaggcacagtctcgctctgttgcccaggctggagtacagcgccatgatctcagctcactgcaacctctgcctcctgggttctgtcagttctcctgtctcaccctctccagtagctgggattacaggcacacgccaccatgcccagctaagttttgtagttttagtagagacagtgtttcaccatgttggccaggctggtctagaactcctgacctcaggtgatccacccgcctaagcctcccaaagtgctgggattacaggtgtgagccaccatgcctggcccaatgtgaatcatttatttcattttcttggctaattgccctggttataacctttagtgcagtattaaatagaagtgatgaaagcagatatccttggc

SEQ ID NO: 6491 - DNA, 1503 bp, Homo sapiens
ggctagagtgcagtggcacagtcttggctcactgcaagctctgcctcctgggttcatgccattctcctgcctcagccccccgaatagctgggactacaggcgcctgctaccacgcccggctaatttttttgtatttttagtagagacagggtttcactgtgttagctaggatggtcttgatctcctgacctcatgccgcacccggcctctcattttctaatgtcatttacaactagaagttttcctctaagcactgctttagctgtatatcataatttttgttgggttttcatttatctcaaaatattttctaatttttcttgtgatttcttctttgactcactgattatttaggaatgtagtgtttaattttcacatatttgtaaatttcccagatgtccttctgttactgattttttttttatttcattgtgatcagagagcatactctgtctgattttttaactatattaaaactttttttaatggcctaacgtaggtttatcctggagaatgttccatgtgcacttgagaaaaacatgtattctgctgctgttggagtagtctataaatgtctagttgattctggtattttcaagttttccatttccttgttatcttttacctgtttattatttaaaatagagtggtgagtggtggcttgtgcctataatcccagcactttggaaggtcgaggcggggggatcatttgcgcctagaagttaaagaccagcctgagcaacatagtgagaccctgtctctacaaaaaaaaagaaaaagaaaaactttagccaggcatggtggcacatgcctgtggtctctgctagctcaggaggctgaagcaggaggattgcctgagcccaagagttccagactgcaacgagctgttattgcactgctgcactccagcctgggcaacagagtaaaaccttatgtcttaaataaaaagagagagagtggggcatagaagtctccaattactgttaaattgcctgttcctctggttccatacgtctttgcttaatttattttggcgctctgttaagtgcacatatttataattgttaggtcaagtgcacatatttataattgttacgtcgtcctgatggattgtccctttaccattataaaatatccttttttgtttctaatagcaattttgtcataaaaatcccttgaccaatatttgtatagctatttcagctctcttatatctcattaagagtaaattcttagttttcaagttaaatttttgtcatctttattttattatttatgtattatttatttgagatggagtcttgctgtgtcgcacaggctggagtgcagctgcacgatcttggctctctgcaacctctgcctcccaggttcaagcaattctcctgcctcagcctcccgagtagctgggattacaggtgtgcaccaccacacctggctaattttttgtattttgaatagagatgaggtttcaccatgttggccaggctggtctcaaactcctga

SEQ ID NO: 6492 - DNA, 1044 bp, Homo sapiens
atgactaggataccttcagaataagagttccttttgtttactgctggatcatgtttggtcttgctccctaagtcttaaaagtagattagttttaagaagtatctttcaacagtgtgagactttctgggtacacactgtatatgaataaaagtagctgaattacaggtccaaaacataactatacaatctttttttaaaaggaggggaggataactgctctttatcaagagaatctaaattctcttgatgtcttcattttccctttacattgccagatttcttggctcctttgactccttcctttgctccttgtcctggatctttaaggaaaagggcacctattctttatttctcacctgaggatttcctgaaattgtcttatttgtattccagagctatataccacaagttttttctcagacacctgctgtctttgattatgccttctactccactgtcctataatgtttaacatcgtttgcccttttggggtgaccatatagtttagaactggaagaaataatagctgacacaagatcgttactacgtaacattaagtactaagagcttcatatgaattattttaatttttacaaaaactctgatatacataacaccttcattgtacagatgcagaaattcaggcccagagatggcactttgtcccaattcacacagcagacccaacctaatccttacccaccttgttttgttacagcctaatgagcctaatacacaaccttctcatatacagggaagaagaaaattcagtggtaatgtcaggttaccttcctcagggtaatggttacctgaagtttataactcattgttcttttctaaaatacagtttttcttattaataagaacaattatattatcatcatggaaaatgtgaaaaatatacacatatgtttaaagaaaaaaagactgtgttatacagttaactggcatatatgtagtatgtgcataattagtgctgccagctgtttttatgtgttaataaaggatgattggtggtggtgacttttttcagcaaagtttttc

SEQ ID NO: 6493 - DNA, 1052 bp, Homo sapiens
atttgaaattatgagaaaagtcttgagctaacccttaaaggaaataatttgaattggtagaatgaaataagcaaggaagcaaaaactatagtacacatatgtgttaccatttagaaataaccttcacatgtaatgtctcacttgaaaagattttttttttttagcccagaaatgagactagctatgacagtaggtggatagtgttgtgtgatttaagagtattgggaagatgacttttaccttcctgagcacatatgatagagaatgtgcccctctacaccatcagtagtatttagggtttgccttctaacacttgattgtttttctctgattccttaacaaccctgcagtacaagtaaaccaaatcaaggaatcagatcactgttattttcccatttattttctttccttctccatggacctgtcatagaatcaatactttttagttgtggggaacttgaataggaccttcctcttgcatttttattgaaaagacaacacaataatttttttttctcggcactgtattgaacacctagcactgatgcatttaacccttgcaacaattttatgacatagattattgttataaattattcctagtttactggtttagagagtttacaggtccagtgccacacagcagagaagcattaggactcctgtcccttggctccttaagtgaagcctggtcccagaggcagctggaacattttatcctggaacagtggaaccttaatatgtttagcctagttcccatttttgcctctagtgcaaagacagcccccattagcattgcccattcttaattacagtacttacttatccttgattctgagttaaaaaaaaaaaaaccctgttatttcatcactgtttcatcctcttgttaggattctggccaggtgctgtagctcatgcctgtaatcccagcacgttgggaagctgaggcaggcagaacccttgaggccaggagttggagaccagcctggtcaacatgatgaaaccccatctctaccaaaaatacaaagaaaaaattaggcatagtggctgta

SEQ ID NO: 6494 - DNA, 1049 bp, Homo sapiens
ctactattcctgtcatgctgatattaggcaagatgattcgctgggaggactatgtgcttagactgtggcgcaaatactcgaataaactacaaattttaaatagtatatttccaggtaaggcactgaactgtggttgtaaagtgcataccaaattgatcttgaagaacaataacatgcttttttagccatgtttgaaggtagtctaactcttctgatttattagcactaacgcactgcatttttttcctctagggataggttgtcctgttcctcgaattccagctgaggccaatcctttagcagatcatgtctctgctactcgaatcttgtgtggagcccttgtctttcctactattgctacaatagttggtaaattgatgttcagtagtgttaactctaatttacaaaggacaatcttggtaagacggctttaacattacttatattaccttgcaaaagagaatgaagtgtatttgtttttaaaaggtggggaactgtataaatattcggtctgtggctcctatgcattaagcctctatttgagcctcactatcattcaatagcttgagtggaaataaaaagaggagaaaccactgcagcagttctggccttttggaactatgttgtaggtgctttctctcctggcatatgcatgaatcatcacacctgtccctcttgccagtgggattacagtactttacgatcagaccacctggttcaaatcccatcacagaaattgtcttgctgtgaaatctaaatcaaatgtctggactttttgttcctgtagtatggtgatggtaataatcaggattattgtgaggattgtataagtactagcacatagtaagcactcatgttgtttgctattattgttactcccacttctcccctctggtggcatgtaacctgcacggaccttggaggactgaacaaagggggcaaacgtgggaataaaagacaaagacaagagagtatatttggaagaaggggtcagggggcaccttgcctctagtggacaagggccctgagctttacacagccctctgtat

SEQ ID NO: 6495 - DNA, 1050 bp, Homo sapiens
atggaattctgaaaaataagtttggcatttttacaagttaaaacctgttagtggctgggcacagtgtctcacttctgtaatactagcaccttgggaagctgaggtgggataatcacttgagcccggaagtttgagaccagcctgtgcaacacagcaagaccccatctctaccatcaaaacaaaacaaatctattcgtatctgctctaagaagctgccagaattgtaatgtcttaacatatctttgaacatttaaaaaattatatttgtgaaacttgagacacttataattttactgtctgctttagcaatatcacttagtcctgatttaatctccatcaccaacaatgtggtcaaaatttcgcatttttcttgacaaatgtagttagtgaaaatgtcattgataacctgagaactaagagctcttgaatgactttgtgtatttctttttatagaccatttaatttggcagagcggaaagctagcgcccattcaatagtagaatgtgatcctgtacgaaaagaagttagtgtacgaactggaggattggctgacaagagctcaaggaaaacatacacttttgatatggtaacatatggtgcaatttctttattatccactaatgtaaaataattttaatatacatattttacctggaaaatggtgtatacttagaaatttcagttgtctctgaattgtcagatggcttctagtgggctgaattatgaattagttaacatacgaaaaacaaaattattaaaatgagtaattttgaggttgatttttttttttttaatttttttcgttaggtgtttggagcatctactaaacagattgatgtttaccgaagtgttgtttgtccaattctggatgaagttattatgggctataattgcactatctttgcgtaagtaaaagggtgttttttctgatttatgaaaaagcttaaatgcttgtgttttttgttgttgtttgtttgttttttgagacggagtttcactcttgttgcccaggctggagtgcaatggcgcgatctcggctcactgcagcct

SEQ ID NO: 6496 - DNA, 1034 bp, Homo sapiens
gtcagcagttcgagaccagcctggccaacatggtgaaacccggtctctactaaaaatacaaaaattagctgggtgtggtggtgcatacgtgtaatcccagctacctgagaacgagactctgtctcaaaaaaaaacaaaaaaacaaaaaaccaaaaaactagttaatttaaaaaaaaaaagaattttttttaatttttttttttttttttaaattttaaagtgatggggtcccactgtgttccccaggccagtcttgaactcttgggcttcaggagtcctcccacttcagcctcctgagtagctgggattagaggcacatactaccttgcccagctaattttccaaattattgacagttgggtagaacctttcttctagtggttacataattgagtcattaacttactttacatatatagataataaagttatgaaattgttaccataggagatatggaataggcttaaagcatagtttcgctgggcagaattattgaacttggcgttttttttttgagacggagtctcgctctgtcgcccaggctggagtacagtggctcgatcttggctcactgcaacctccacctcccgggttcaagtgattctcctgcctcagcctcctgagtagctgggactacaggtacataccaccaagtccggctaatttttgtatttttagtagagatggggtttcaccgtgttggccgggatggtcttgatctcctgaccttgtgatccacctgccttgacctcccaaagtgctgggattataggcgtgagccaccgtgcctggccgaacttggctttttaagtagataggttccattggtttctatgtaatgctcagggatgaagatggctaagaagtgtgacaggtttatggagggtgtgaagactactgtagaacagactgttgtaaatgacttctctaacattaggttagttgtttctttttttgttttgttttaacttgctttgccatacttatgtttaaatatattataaaggaggcccatgtattttaactgccacag

SEQ ID NO: 6497 - DNA, 1031 bp, Homo sapiens
taagctgagatcatgcaactacactccagcctgggtggcagagggagaccccatctcaaaaaaaaaaaagtatgtgtataaaaaaaaagaaaagtatgtgtatacacacacacacacacacacacacacacacacacacacacacacatatagtagggaaaaaaagttcatttagtagcttcatttttttttttttgagacaaatcccactcttgtcccccagactggagtgcgatgacgcgatctcggctcactgcaacctccacctcccaggttcaagcgattctcctgcctcagcctcccaagtagctgggattacaggcacctgccaccacgcccacctaatttttgtatttttagtagagacgtggtttcaccttgttggccaggctggtctcaaacccctgacctcaggtgagccgcccgcctttgtctcccaaagttctaggattacacgcgtgtgccactactcagcctagcttcgttcattctatgctataatgtaaaagaatctggacattgcatatgaatatatacaggaggacactcctgaagaagttatctttttccttcctggcagagtttttaaccttaaaaagccagtttcttaatggctttttccacacagtcttcaaagaaaattgctgtggtcattagcagtgggtggtgtatggagatttaattgaggacttagaagcaggccaagtgaatgctcgctagtgtggtagaggctgcttagagaacactgaagatggcgttggatgtgtgagaacagagaggaaaaccaagaaaagtaacaaagatggtaaaatgtacgcttattttattgctatcatctgccttaagtggaaattttatttatttattaatttttttacttttagaggtagagtctcatactgttgccaaggccgcagtacagtagcatgatcatggctcactgcaacttaaattcctggactcaagtgattcccccaaccacagcctcctcctgagtagctagtactacaagtgtgagccaccaggcctgg

SEQ ID NO: 6498 - DNA, 1035 bp, Homo sapiens
ttttttttgagacaaggtccctctctgttggctggagtgcagtggcacattcactgtaacctcaacctcctggccttaagtgatcctcccaccttagactcccaagtaggtgggactataggcacatactactatgcccagctaatatttatttatttattgtagaaacaggatctccctatgttgccaaggctggtctcgaattcctgggctcaagtgaccctcatgccttggcctccaaagtgctggaattacaaatgtgagccatcattgagtttaagaatagtctaaaggaaattatcctaagggtcgagactctgaaaattgaagagaagggaaaaaaggattgaacaacttcctttttaaaggttgggcatagtggtcttaatgactagattttaaaattagatataactataaaatattacttgtaagttattatataacatattttagataacagaactacattattctcacaatatcttcagtaattgacctttcctttccatgacaggaaactctgagtacattggaatatgctcatagagcaaagaacatattgaataagcctgaagtgaatcagaaactcaccaaaaaagctcttattaaggtaactgtgaatttttgtagagtaatgtaatcttgtttgacaaatgtgaaaataagaaactgaagtgggagataatagttaaacaagatttgttaaattgcccatggaaggctttttatatagtgatttaaactaaatgtcttacatgttaacatatttttttctaatgctagtatgttgactttaccaactttatcaactgagttggtactcttagcaaaattttcatttatttacatttacaaaatttatttatttgcatttttgaggtataatttacatgccataacatccacctaatgtaagcatacaattcaatgatttatagtgcatttacagagttgtggagtataaccacgatctagttttagaaaatttgttatcactatccagtttccctttgctcctttacaatcatgtgg

SEQ ID NO: 6499 - DNA, 1079 bp, Homo sapiens
ttcgacctcagtctcccgagtagctgggactacaggtgtgcaccaccacgtctagctaatttttgtacttttagtagagatggggtttcaccatgttggccaggctggtcttgaactcctgacctcgtaatctgcccgcctcagcctcccaaaatgctgggatcacaggcgtgagccaatacgcctggccccaatatggttttaattagcatttccctaatgactaatgatgttgaacatcttttcttgtgcttattatctatttgtttatcttttttggtgaaatgtctattcaaatgctttgcccaattttaattggtttgtcttattaagttgtaaggagttcatgtagtctagatacaagcccttaatgagatatgatttgcaaatatttcctcccagtctggctttactttttcctttccttgatgttttttttttttttaaataaagtttttagtattgagatgattatagattcacatgcagttataagaaataatacagagaaaacaggccaggcacggtggctcatgcctgtaatcccagcactttgggaggccgaggtaggcggattgctttagatcaggagttcgagaccagcctggctaacatagtgaaaccctcatctctactaaaaatacaaaaattagctgagcgtagtggcacgtgcctgtaatcccagttactcaggaggctgagacaggagaattgcttgaactcgggagacaggttgcagtgagctgagatcgagccactgtactacagcctgggagacagagtgaggctctgtctcaaaaaaaaaaaaaagaaaaaaagtaataatacagagaaatcctttgtacattttgttgaactatagaatattaccacggggatattgatattaataacaatccactaatctttcccaattttccttacatgtgtatgtgtatttaattctagacagttttgtcacatgtataggttcatgtatttaccaccacaatcaagatactgaacagttccatcaccacgaggacccttcatattgctcttttgtaaccacttttcttcccaccatatccttcctttcc

SEQ ID NO: 6500 - DNA, 1075 bp, Homo sapiens
cccgcctcggcctcccaaagtgctgggattacaggcgtgagccaccgcgtccggccagaggtatagttcttataggaaaggcaggacacatgcttgattaatttcctttatttgccaattttgagaataatgagttggtttcctaggtttcttagtgtcattataaactcctagatttaaactatttgtgttaacccattgtagttgttctcctcaccgatgctcagattggctcatcttaggccaggggtatgttagtctgttttcatgctgctgataaagacatacccgagactgggcaatttacaaaagaaagaggtttattggacttatagttccacatgtctggggaggcctcataatcatggcggaaggcaaggacgagcaagtcacatcttacgtgggtggcagcaggcaaagagagagagcttgtgtggagaaactcctgtttgtaaaaccatcagatctcgtgagacccattccctgtaatgagaacagcatggaaaagatccgcccctacgattcagtcatctcccaccaggtccctcccgcaacgcgtgggaattatgggagctacaagatgagatttaggtggggacacagagccaaaccatattaaggggttacatcttcaagtggcttactgagtccttttgattaacctagtaggctttgcttagcttatttccttgtcttatttgacaagatgttccgtattcatcttgaatattttctgcctcagtcctggaatcagatgcttttataaggaatcctggttcattttagtgtgaattactcctaccaacctgggtactggaggttgtggtttttcttgggaagtccatatttctagaatgagtgtatttaaaaaggagctttgaaagactttatttctaaacaaattaatattgattaaaaagtatggttataactttttatcatacttctttaagttttaaaagacataaaaaggctaactttacattttatttgttgcatgtccttcccaaactgaatgaaaaaagtactaaactgacacctacaacattcctcttgtgtaggagtatacggagga

SEQ ID NO: 6501 - DNA, 1052 bp, Homo sapiens
acatactttaagtctcagtttttaacccctaatcttaccccttccttctaagatacctgatgccttcaagtcccacatttttccagcattctgtggggcatatttatattctgtatccctgattatagacacttaggttgcattccctcctctctctactttgagttatagtccgtcctctgttagctttctagcttctcaaatctggaacacacatgcttttcccctcataggtagggattcttagtttcagaattgagggcaagggaaaaatatttcatttataaaacaaagacaaggaatataatttgttctttgtaatttgtatttattgcttattgacacaggtatcaagtgacacttgggtatcaagtgatggtgataaatgttggaaatgagtttgtgtagctgtcacaattgtgttagaatacattttataggagttagaaaaaaatattaactgttaaactcatattaaactttattttagagtcatgagtggaaaattaactgttcaagaagagcagattgtagaattgattgaaaaaattggtgctgttgaggaggagctgaatagggtaagcacttaaaatgatatttactgttatgtgaaaagcaaatattgaaagaaaattttagaatgaaagatctaatattttttccttcaagattttttttttttagacggagtctcgctctgtcacccaggctggagtgcaatagcgtgatctcggctcactgtaacctctgcctcccagggtcaagcgattctcctgcctcagcctcccgagtagctgggattacaggtgtgcaccaccatgcctggctaattttttttgtatttttagtagagacagggtttcaccatgctggccaggctggtcttgaactcctgacctcatgatctgcccatctcagcctcccaaaatgctgggatgacaggcgtgagccactgcacccagctccttcagatttttttggaaaaaaaaaaaagattttattttgctgacccttatactgaaagtaagttatatcatgattttttactatca

SEQ ID NO: 6502 - DNA, 1032 bp, Homo sapiens
cctgggtgacagaatgagactccgtctcaaaaaaaaaaaaaaaaaaaaagaatggagaatggaaatgtaaattttaatgtgaatgtttagctaccaaagtatttaagatatcatttagaaaggtttacagaagtggaaatattctttttaaagacctatttgtttatttctgaaaccagaatgtactcaagactgatcttctaagttcactggaaatgattttatccccaactgtggtgtctatactgaaaatcaatagtcaactaaagcatattttcaagacttcattgacagtggccgataaggtaacaaatgctatgttcttaatatctcaaaattgatgtgttgtttaagaaggaaactcatttttgtttcttcaaagatagaagatcaaaaaaaggaactagatggctttctcagtatactgtgtaacaatctacatgaactacaagaaaataccatttgttccttggttgagtcacaaaagcaatgtggaaacctaactgaagacctgaagacaataaagcagacccattcccaggtatgttgtttagcggacttggggagtacagaaagagagttttaggatgatttgatatgacttgataattaatctatgttacacaatctgaatactgtaaaagctgaaacctgaaaataccatagccactgttgcttataacagtaattattgtagaacaattgagaatacttctcttaatatttgaagttttgctacatctagaaccccatgcagaaccacaatatgacaaaacagtccttttctcacatcaagatgaaagatgaatctggaaaaacatacctttagagaagaatggttataacatttaaagtgaaaatgtatctacattaaaacctgctaagttgtttctaggatggcatggatagttgtctttcataaaccaagtcctactttctcttatttctgtctcactgatagacatttaaaacatagtaaatcgatacaacttttaattcttattgattataaatgtaattcatgatttatct

SEQ ID NO: 6503 - DNA, 1193 bp, Homo sapiens
ttattagaaagctttatagctaatttaaacataacatttgtaatgttcatgatttgttttacatactaggcaagggaaactgcttaataacagaataaatgactgattgtccaatttagggactagacaagaggctgtagtagatgccctgaagtaacattgcctagtaagaggaataaaacaagtagacagattttgaaagcatcataactggaggagggttgtgaaaggtttcatgagcaaagatgatcctttcaaaggtcatttaatggcaatgctgtgaaaagacagtggccaaggcatccattctcaatgcagaagatttactaagatcacgggccctggagccagactgtccacgttcagatctgccacttaagagctgagtgatcttgggaagttatatatcctttgagtcttaattccccatttcaacagtgtcattctcttttcctataggaaatctaaggatatagtcaacaaaatgacttttcacagtcaaaaattttgtgctgattctgatggcttctcacaggaactcagaaattttaaccaagaaggtacaaaattggttgaagaatctgtgaaacactctgataaactcaatggcaacctggaaaaaatatctcaagagactgaacagagatgtgaatctctgaacacaagaacagtttatttttctgaacagtgggtatcttccttaaatgaaagggaacaggaacttcacaacttattggaggtaataactttgtaagtggaacttactttggggagaataataatcagaaagttaaatattcttggctaagaatagatttcaaaacaaatgatattttaagctataatgacttaaacttttaagtataatatttggtatgcttacagatgatctcgttttgtgctttgttatatgtcttctcaatcttggaattaatttaacatttgtacagtttctttcctgtatttatccttggtttctgacttagtagtttcttcaaagaagggcaccctgtcttttgatatgtaataccttccacttatatatgctttttttttttttttttttgagatggagtctcactctgttgcccaggctggagtgcaatggcacgatctcagctcactgcaacctccgcctcccaagttcaagcgattctcctgcctcagcctctcgagtagttgggattataggc

SEQ ID NO: 6504 - DNA, 1050 bp, Homo sapiens
tgcctggctaattttgtttttttttttttttttttttttttttttttttttttttttagtagagggggtttctctgtgttggtcaggctggtctcgaactcccaacttcaggtgatctgcctgcctcggcctcccgtagtgctgggattacaggtgtgagccaccggcccggcccctcctacccactttttaacactgttgagaacatagttggtttatgattcatctcagcattgatgactgagtacacaatcaatgtcaccagtcccttaatgttctctatgggtaagtaggaggattccaatgaaatacaacttccaagtgaggctctataaagtgctggtatcttttcctctaatttgagggtacaagcctagacagagtgtgtgaaggaaaaatttccttacgtaggacattggtatctacatttacagttgaagttctacttctgagatgcatatgcttgtaccttttttttttttttttttttttaaatatatatagagagagggtcttgctatgttggccagactggtcttgaactcttggcctcaagcagccctcctacctcagcctcccaaaatgctaggattacaggcatgaaccactgcgcctggctgcttgtaccttttttgtgtgtatgtcttgttttgtttttttgtttttgagacggagttttgctcttgttgcccaggccagagtgcaattgcctgatcttggctcaccacaatctccgcctcccgggttctagcgattctcttgcctcatcctcccgagtagctgggattacaggcatgcaccaccacacctggctaatattgtatttttagtagagaaggggtttctccatgttggtcaggctaatcttgaactcccgacctcaggtgatccgcccgcctcggcctcccaaagtgctgggattacaagcgtgagccaccgcgctcggcctgtaactgttttttaatagatctacagctccttcccttaaggtctaaagattctccatccctgctttcaacagttaacaaagttccaactcagattctcata

SEQ ID NO: 6505 - DNA, 1057 bp, Homo sapiens
cctttcttattttcagtagtcagaattttatctagaaatcttttaacacctttttagtggttatttctaaaatcactgtcaacaataaatctaaccctagttgtatccctcctttcagtatttttcacttgttgccccaaatgtgaaagcatttcattcctttaagaggcctaactcattcaccctgacagagttcacaaaaagcccacttaagagtatacattgctattatgggagaccacccagacatctgactaatggctctgtgcccacactccaagacctgtgccttttagagaagctcacaatgatttaaggactgtttgaaacttccaattatgtctataatttatattcttttgtttacatgatgaaactttttgttgttgcttgtttgtatataatacaatgtgtacatgtatctttttctcgattcaaatcttaacccttaggactctggtatttttgatctggcaaccatatttctggaagttgagatgtttcagcttgaagaaccaaaacagaaggaatatgtacaaagaataaattttctgctcacgatgagtttagtgtgtaaagtttagagacatctgactttgatagctaaattaaaccaaaccctattgaagaattgaatatatgctacttcaagaaactaaattgatctcgtagaattatcttaataaaataatggctataatttctctgcaaaatcagatgtcagcataagcgatggataatacctaataaactgccctcagtaaatccatggttaataaatgtggtttctacattaacctgcttgctccataatttcttatctggcaatgggtatatttagagggttaggcaagctgcattcacattcccaaaataaactatgcaggtaccaccaaagaagaaggagcctagtaaacttgcaggcttttagttgcactccaaggggctatcctaggtgcaaggttagtgagaagtaggccctcacacagcctgaagtccagctttaagtcatctcattccatgactgtttaagttatctgagaatgctgatgcaact

SEQ ID NO: 6506 - DNA, 1041 bp, Homo sapiens
aagaaagaaagacataactagaaaaggaaactaaatcagtattcctcatacacacagattttacaaaaaattttagagaattaaatccatatatgtggatttaaaagtataaaatacatctatataaaaagtatattctgtatatgtatatatgtgtgtgtatatatatgtgaagaatacatcatgatcaagtgaggtttatttcaagaaagatgctggcttaacatttgaaaaatcaatgtaacattgttcaccatattaaacaaagaaaagttgtatgatcatatatgtggagaaagcattgacaaaatcgaatattaattcctgattttaaaaaccctcagaaactagtaatggaaattcctcagcttaaaacagggcatctatgaaaatctagagctaaattgtgcttagtggtaagagtctgaatgcttttcctctaaaatcaggaatgaggtaaggatattcattctcaccacttctattcaacactgtactagaatgttgaatataaggccggtataataagaccatttaaaaaaaaagcatctagtttggaaaaccgtctttatttgcacactgtgtgatcaactattatagaaaatcctgtggaatgtacagaaaagctactagaactgataagtgagtttagcaaggttgtaggaatcaggtggatatgcaaaagccaattgtgtttctctgtactagcaacaatcagaaattgaaatttaaaatttgatggtatcaaaaatatgaaatactcagggataaatctgactaaagatgtggaagacttgtatgtgaaaaatacaaaacattgctgatataaattaaattaacattgctgatactaaactaagtaagtggacacatactgttttcatggattggaagacagtattgttaagatgtcagttttctccaacttagtctagatattcaagataatctgaataaatcccagcagaatgaaaatttatagaaattgacaagctgattctaaatttcatgtagaaatgtaaaggacctagattagccaaa

SEQ ID NO: 6507 - DNA, 1048 bp, Homo sapiens
tggtggtgctggttatctatttagttaacatgaaaatgaatcatttaaaaataaacatagataacttgattgtgaagaacctcagctctttcataagtgagaagaaaccttttttgcttgcttaaataataaaaagtataataaagtccctatgaaacacagaaaattattctggcaaacagactcactgttatataggcggattacacagaaggtaaagagtaacctttcgtattgtaggcagaggcattaacaaataaccaaggaaacaagcccaacaagattaagcaaatgttgctaagtttgtaacatatttcataactggttttcagactcaggtattataaaccaaggcagatatacatcattttccaagttttgtccttcactgtgctctttcatattctgaaacaaacacttgactctagagcactggttctttgtttggggtctgtgaggtcaaaattatttttaaataatcctaaaaggttatgatgatgaaattttatgtgtcgacttaactaggttaagggctgcccagatagctggtgaaacattatttctgggtgttccagtgagggtgtttctggaagagactagcatttgcatcagtagactgagtaaagaaggtctgccatcgccaatgtgggtggacattcaatccactgaggcctcaaatggaataaaaaggtgaaggaagggtgaattctttctctcttcttaagctgagacatctgtcttctctggcccatggacatcggaacacctggtctcaggtcttcagactgtggggcttacacgagcagcccccctggtttgcaggccttttgacttggtctgaattataccactggctttcctggttctccagcttgcagacggcatgttatggtacaacttggctttcataatggtgtgagcccattcctgtaataaatcttttatatgtctttatatatcctattagttttgttcctttggagaaccctgactaattcagaaattatttatgttaacatgcattgcattcatcattgctgttttcaca

SEQ ID NO: 6508 - DNA, 1026 bp, Homo sapiens
tttattctattctttcaaattaattgaggttttattagtggcttaatatatggttagttttcatgagtattctatgtggtcttcaaagtgtatggttttttattaggcttcacagttttatacacatacatgccttattaattaagttcattatatcttctaaagcctcatgttatttttcacctgatcattcttggattgagagagatatgttaaagtccccttttattaacttgtttctcttttttgttgcatctcctttagtttctgttcgatgagattggttttgaatttttgggtatataaatattaatgttacatctttattttgaaaaataaagatatttatagactttatagtctttagcattgtaaatcataagtgaattataaatgcacaaataataagtgtaaagctcaattaattttatgttttgttttctatgattgagtagtattctttttgttttgctgtgaagtcagcccttcagtgaatttcttcttaactgtagattaagattcctgtaaaagacttgggttgagtatatagttcatctcttaagctattacgcaaagtgcacattagatctgctgtagtcagtctgatatttttgtttaattttctgaagttttctgggaaagcagtctatatttgcattcattaatctacttgtttaaactttttgaattaaaatttattttcgcaattcattttatcctagaggacaaatacaattaaatatagtgggtgttttcatctctcattttttgcattttaccaaatgcccaaaagtcaacaggaagagatacctctttggtcaggaatgtaaaaacaggaaggaggaagtctattgcaaatctgtgctggctgattatgaattcaggtttcaccatggaggatgttcattaatgatcatcagtgtgctgtgctgttattcaaaattacagtgagtattaatgtcagtaatacagaatgtcaacactagttataggaggcaatgttaactaacacacgacactagactt

SEQ ID NO: 6509 - DNA, 1677 bp, Homo sapiens
cctatctttccccatccttccctgctgtgaacccgtaccaattactgaactttgtactgtttctatagttttatcttttccagaatgtcagatagttgaaataatacagtatatatataatatgttcagactggcttatttcgcttggcaatatgcatttaaggttcctctgtgtccttttgtgacttgataacttatttcttttttatcactgaataatactacactgtatggatgaaccatagtttatccattcacctttgaaggacatcttgttgcttccaagttttggcaattgtgaataaagctgccataaacatttgtgtgcaggttttatgcatgtaaattttcaattaatgtgggtaaatacctggggatgtgattgctggatcatatggtaagactatgtttagttttgtaagaatctgccaaactgtcttcagaagtggctgtactattttgcactccctccagaatgaatgagagttactgttgctccacatcctccacaggatttagtgttgtcattttttcggattttgcctattctaataggtgtgtaatgatatctcattgttattttaatttgtaattcactaatgacacatgatgttgagcatcttctcacatgtatgtcttctttagcgaggtgtccaagtcttttgatcactttttaatttggtggcttatttttggattgttgagttttaagtgtgctttttatattttggattcaagtccttgattcaatttgtgtttcgaacatattttctcccagtctgtggcttgttttttcattttcttaacagtgtttttaaagagtaggaagttttagttttaatgaaattaaattggaaaagtccagtttacctttttttctttccctcatgcattgtgctttggtgtttctaaaaactaattgccaaacccaaggtcatctaaattttcccttgtgttatcttctagagtcttagagttttgtgttttacatttaggtctatgatctattttgaattaatttttataaaaagtgaaggtcactgtttacatttatttattcacttttttgcatgtgaatgtccagttgttccagcagcatttatttaaagaacgactctttttccattgaatttcctcagttaactgtatttgtgtatttctgtgctttctgtttcattttaacctacttgttaatcttttcacctttaccatacagtctttaatattataactttatacagtattaagtcttgaagttgggtagtgtcagtctatccttcaactttgttcttcaatattgtgtggctattctgggtcttttgcctgtctatatgaacttcagaatcacattgttgatattcacaaaataagttgctggggttttgattgggattgcattgaatctgtagatcaagttggggagaactgatatcatcagttgatgatattgagtcttcgtattcattaatatggaatatctttccatttatatagattttctttaattatttctatcagagttggtattagttccagaaaattttttgttgaaggtttttatatagatacatttcatgttacctgcaaagacttctgtttcttttttcccagtcttaatacctttttttcttgttttatttcattagctactgcttccatgtagtatgatgttgacta

SEQ ID NO: 6510 - DNA, 1056 bp, Homo sapiens
caaaaccccattttacaaaaaaatacaaaaacaaaaaaaacaaaaaaacaaagaaacattagctgggtgtggtggtgcattcctgtagtcccagctactctggaggctgaggtaggaggatcactgcagcctggggaggttgaagctgcagtgagctgtgatggtgccactgtactccagcctggatgacagagtgagaccctgattttttttttttttttttttttaaaaaaaggaaatgagaaggcaaaaatcatgaataagaaaggagacatcactacaaattctatacctacagacattaaaaagataaaaaaaaactatgaacaaattttttgaaccaattttgaccataatcagttttgaaataatctgaatttctctctcttcaaaataggcacagcatcagaaaaccttcagtgtttctctgcagaaacaaaataaaatgaaatttgggaaaaatatgtatataaatcgtgatagaattccagaggaaaggaatgaaactgtattgaaacattcacttgaagaagaggatgagaatgaagaagaggtgataggtgtctttctttcttttctattattagataattttttttcttttggattgtaatgtacatctgtgtgatttagtcttcctgtatgcaaaataaatttatgttgtaaaagttgtcagagtcaaaatggagtcagtgtgtcaaactttgacaaaatggaggctgagaaggccgtgaagggagggctgtcatggacgattagcctggtatcaggagctatcacaataaattttttgaaaccatagcttactgcatcagccctacaaggacagctagccgcttacatgtgaacacttgtctgtttcaaaacaggccaggcacagtggctcacacaggtaatcccagcactttgcaaggttgaggtgggtggatcacttgaggcaggagtttaagaccagcctggccaacatggtgaaaccctgtctctactaaaaatataaaaattagctgggcatggtggtgggcacctctagtcccagctacttgggaagctgagaca

SEQ ID NO: 6511 - DNA, 1032 bp, Homo sapiens
gtgggtgataacctaacaattaatggttattctgatcacttaaaaacatacaaaatataggctatactcatttatgttattgtagattagtggcagtaaattagtagtaataaatgtttacctacatattgatattctgctattacccaggactattcataccacttccttttcaattatgaagcttagacagaactcagggatgctaccatcttttaaaatattgatcattcagttagaataaagtatttttatagttgaaaaaaagaatacagagtataatggaaggaaccgtgaactagaaattagaagatataaattctgccttagggcagtgagaagtgggttctagaatcacatagacccagagtttctgttctgcctgtgctgttgactaattgtatgcctgcaggttctttaagctttagatccttatttgtgaaaatgggtttattactaatttcagaattgtttttagttttaaatatgatactttgtatgaaaacacatgatttgaaaactgtatgttcattttcttcctggtttctggttttccatgtgttctatgagcaaatcactttacttttttgagttgtttttctctttttaaaaataaggaggattgtttgaacccaggaggtggaggttgcagtgagccgagatcgcgccactgcgctcccctgggcaacagagcgagactccatctcaaaacaaacaaaaaacacgaaacaaacaaaaaaataagatttttctttttattgggagtaatattatcctctccccttcggatattaaaagcaatatcaccggcaagttgtacacctgctgcgttattgggagtcatatcatcctctcccacctggatattagaaacaatattacggggtggggtgtgtacaccctctgtgatattaacagtaatattattctctccctcctcgatattaggaaaaatatcacagcggggggtttataacctctgcgatattgggagtaatattatcctctcccatcctggatatttggaacaat

SEQ ID NO: 6512 - DNA, 1129 bp, Homo sapiens
ttttagtaaactgtgttaaattatttaggatgttaactaaccacattcattatttattaagtttaataatatcaatctttgtttttagctcaacagaaatagacgatatgcttagaaaatcaacaaatctgctgctgaccagaactttgagtagctgtttactgaaccttattagaaaacctcatataggtttgacagaggtaggttaaaaagacacatatagtgaaatgtttcattgtatgaaacaattattttaaattattgctgaacgtcattctgtaaaactagcttcctgttttaaatgtattaatataagcagatttgttttcaaaataaaaacaccagtgtaaattccagaaatgtgaggatcccaggcacagtggctcatacctctaatccgagagctttgggaggccaaggcaggaggattgtttgaggtcaggagtttgagaccagcctgggcaatatagtgagaccctgtttctacaaaaaatgaagactattagccaggcgtggtagtgtgcaactatattcctagctactctggacttgagcccaggaggttgaggctgcagtgagttacaatcataccactgcactacacagcctgggtgacagcaagaccctgtctctggaagaaaaaataaaaaaatgagggaaaagggttcatatggggaatagtagataaagatgttagaatatctatttagatttctgattgccagactacaggaaaagtcacaatcctaattttttacttgctaaatgtttaagatttgaaacatactatgaaaagttattttaaaataactggtatttagactcttggtgtgtgtgtgtgtgtgtgtatatatatatatatataaattcatacgcagtatttgcaacaggcttttaaaatcagatagttgtatcctataatgctgcaattatgtagaaatggtacagttgctggaagtaataatcccatttttaaaaattaggtgattttacatacatgtaacctgtattttactagatatatcttgtgttttctagctggtacaaatcatcataaacacaacacacctggagcaagcttgtaaatatcttgaggactttataactaacattacaaatatttcccaag

SEQ ID NO: 6513 - DNA, 1034 bp, Homo sapiens
cactgtgagtgaatctggtgtacactgtggactttggaatttgtggggtatgtagtaaatctctgtactttctgttcagttttgctgttaacctaaaactactctaaaaaatagtctatttaaattgcaaaaaaaaaaaaaaaaggcgaacacacttgtaactatgaggtcaagaaataaagcattactagcaccgtagaagccttcctcattcctctcctttgtcactatcttttttcctctcagtactgacttttaacggcacagagtagttttgcctttttctgggttctatttaaatgaaatcatacagagtgcatctttttgtgtgtctgacttcttttactcagcaggagttggggtatttcatttgtgttgttgtatgtagctgtagtttatttattttgaattcaatatggtattccatgatagaatttactacaccttatttattagtgtgaactgtatcacttttggctatttagaaacttttcttttgctttcatcctggttattgactggatacgtgacctttgacagatgttatggtatgggtaaaatataatttatttaatttttagtagtaaagatagaaattcaggaactggcataaacatttagaactaatgaggtattattggcagtttaaaattttttcattttaattataatgttttgttgttttatctatgtaaagctgatgtattgctttgtgaaggtacttgcaaaattacgccttgactgattaattgcatgtcagcttctgattacttatatgcttttttattgatggagtgttcctttgtaaaattcattttattgtgtatgcaatttgattgccattttaaaaaggcaatgtatatgacatttatttcttttgtcatcctttaccaccaacttcttttctggtcttcccccattagagaggactgtataaagcagttttatgcttacagctgatttaatacatttgaatgacataaaatcctaaaaggtaagttagaaaacaaccaaaagcaaaagcagattgggta

SEQ ID NO: 6514 - DNA, 1030 bp, Homo sapiens
gttgttattttgtcccatgtcaggatgctcgacatgcagcagaaggagaaatatataccaaactgaatcaaaaaattgatgaatttgttcagcttgctgattatgactggacaatgtctgagccagatggaagagctagtggttatttaatggaccttataaattttttgagaagcatctttcaagtgtttactcatttgcctgtaagtataaaaattttcaaaaattgttttatgtttgcttactaaagtatattttagaatttagtttgaggtttccttgcttaaaccaacttcttggagtgcatgtttctttctccattattataaatccatttgtaaggaattataacttagccaaattgtttgaaattttaatttattttatttttaaccaaaataactgtaactctctttccaccaaagccaaggcaaaaccctgaaactgacaatatagacttaaatagaaataatctctaatagaaataatttacatagagttaacacaattgctcgtctccctctcccgtctccctctccccacggtctccctctccctctctttccacgtctccctctgatgccgagccgaagctgcactgtactgctgccatctcggctcactgcaacctccctgcctgattctcctgcctcagcctgccgagtgcctgcgattgcaggcgcacgccaccacgcctgactggttttcgtatttttttggtggagacggggtttcgctgtgttggccgggctggtctccagctcctaaccgcgagtgatccgccagcctcggcctcccgaggtgccgggattgcagatggagtctggttcactcagtgctcaatggtgcccaggctggagtgcagtggcgtgctctcggctcgctacaacctccacctcccagccacctgccttggcctcccaaagtgccgagattgcagcctctgcccggccgccaccccgtctgggaagtgaggagcgtctctgcctggtcgcccattgtctgggacgtgaggagcccctctgcctgg

SEQ ID NO: 6515 - DNA, 1047 bp, Homo sapiens
tattaggtcatttgactatttaaaaaactgtcttctctttatcaaagaataaaaaaaattttattttttgaaatctttaaattatcactggctaagtaaatgactattattttacagtcacctgtgatcctatatttatttgtttatttatttatgagacagagtctcactctgttgcccaggctggaatgcagtgtcatggtctcagctcactgcagctctgcctccagggttcaagcaattctcctgctttagcctcctgagtagctgggactacagacacgcaccaccatgcctggctcattttttttttttgtatttttagtagagacggggttttcccatgttcaccaggctggtctcgaactcccggcatcaagtgatccgcctgccttggcctcccagagtgctgggattacaggtataagccacagcgcccaaccacctgtgatcctattttaatcaagtgttttaaacctttgatatttgacatacttccccaaatttcagattctaaaattgtctttttgaactcaaacttttggatattccggaaagggcccctggaagctcaagagagacatattagggcttattcgatataagaaaatcatgtgagaaacattgtcaaataagaaatggtatttaacttgctttgaattatatttatacaaatattcatgtgttccaaaattatattggattcctgaaattctgatgtcttgatatatgttatcagtcataattattatgttattatatgtcacaaaaataacaaaattcccttgtcaattggtgtcttttaccatggctattttctttttttttttttgagatggcgtctcgctcttgtcaccaaagctggagtgcagtggcgcgatcttggctcactgcaaactccgcctcctgggttcaagcaattctcctgcctcagcctcccaagtagctgggactacaggcgtgtgccaccaagcccagctaattttttttgtatttttagtagaggtggggtttcgccgggttggccaggctggtctcaaactcctg

SEQ ID NO: 6516 - DNA, 1024 bp, Homo sapiens
ctatttcatagcatattgctttaacacttttatatgaagtagtataccaccaaatataaaggggttgctaacacctttatttacatttcagttggggttcttcacttttccttcttttttttttttttttcagtctgtgatccatttctgtcttaatagggtggttgacagttcttttcaagcatacttagaaaggcaaaagagcccttttcatagtacttataaggggtcatgcttctgtttttttttagtttgaatttgatactgcttcatgagttgctatgaaagattaggaagtaggtccagtggtcagattttacctgcccacccggactttgccctgaggtcaaactcctgatatttgctgttctgaatagaggagttgatgacaagtatgagctgatacaagaggaaagttagaaccatatcaaagctgaaggcaagagaattgggactctatgagagactagctaaaagatagatcatcgggattgccctcttctaaggaaaaggaaatagctgacctgtgattgaaaagactttatcatcctgccaatcacatacttgctaatggaagccagttatctcaacaacatcttaagtcctactgctctagtagacaatgtggaggattagcggtactggtgccacattatgtgaatatgctgcctccatcaatttaaatgtgctttgtgaatatgatttgttcgtgtaaattttttttacaagtaaagcctatcatcctgttaccccctattctgaaattaagttgctaaatgatggacttgatatacttatttgtgtctgttttcatttacaaagaccatatgttttgttaaatataatatttcaagtggatttcagatgcatatgtgaaattcttttggcaatatatgaaaacttaaaaaaatttaaactatattaagattctttgtataatatgcagtattcagtgataattttttataacttatttttttaataactcattcttaatacatagagatatttcactaaatatcac

SEQ ID NO: 6517 - DNA, 2054 bp, Homo sapiens
tagttgaatttaccctgagcaactggtttgtttttatttcaagagaactgtgagttgtacaattaatggtagtttattctgtattttggagacagaaaaactcaggaatatagcatagcatcacatgtattttgtgtactaacctcctcatctttcctactctcattttctcgtggccctggcttttctcagttaactaagttaaatttgtcttgcatatgtttttgtaaattgccttaaaacccgtttggaacaatgcaatatgtaaataaattaagcgtttgttagtggactcctaaaactgttcgcagtaaaaagcattaggtgtgggtagattttgatttatttgcttgtttatttgtcatttatttcttcaataaaaatgattgagtgccaggcactggggaaaaagaagtgagtggtagaaattaaataagagccagactattggagagataagttagttggcagtaatgagataaagttgaagacaaagactattggattctgaaagacagctaaaggataaaaagttaggagtgtaaaaagaaagccaccaaagtatctgaatgacttgttgacaagaacactattgtgtaggaaatcagagacaggatggagtcctgcacttcttaataactactgcatgactttggaaactgtttcctgaactatttcaactatatatattaacaatggtttaatgaaatctgtgagggaaaatgttgtagagtttacttctgggagagagcttttacctggcatgcttaatcttgattgctaaagttaggaattatgtgaagcttgcagtaaagaggttatcagttgattgagtcagcagctaccatctattggtttttaacacttcaacagggcagtggcatcgctatgccaggttcatatcataggtgaactattaaaagctgacagtttcttccaccagtcttgcttgaaaagggaagtaccctgggcacccacctccttgttcttagcccctcacccattttcttttatccttttatacatggcctgataatctctctctaccatacccccaaatgattataaggtttaggaaagaagttcccatgtacatcaccatagaaagataggaaaaccctgataaacatacacttgtatttgactcaaaatgaacaactttgagttctgtctaaagggacatgaacaagctttgaatcttatgaaggaattgtttggccagaattcttgccatagagactggacgtctgccaggactttactttgaaatttctgtcttctgtttctaatcttaaggcatcacaacatacaattcttttgccactggtccagtttattcttttatgatgaggaagaaggcacttttaaataacaattatttccactataattaaacaaatcttcttttgtttgcattattttgttactatattgtatacacaccctgcctgcttaaacttgcccctgtgactacttcacaggaactttctttagaagttttaaagtcgttgacttcttaaagtattaatgggatttgccaaagttgtagtatctgaatgcttgactagatatagtagcaggacaacaagcttgttcacacagctcctccagcaagcattttttcctcagacaatcctaaattcatttgaagtgccaaagaattaaaggaagatacatttgggtttacttctgaatataacaagaccagacatctcacaaagtttaccttaaggtccagatattagaaaagtatgctgcccttttgggaaagcttagattttaaaggattagtctgaacctaaatgacttttgcgtttttcttctttttgctccagtgtcataattccggaagtttatagtttatgtgcttaaatatgtaggtgataggtgcttatgccttcagctatcgatatgaactttgaactcaaatttttatgattattttaagagtaaacgttagagctgttttgtagtttggaaaattaccctgtaaaatgatttttcaaaaaccaaaaacaaacactgtgataattacaaaaattgtttatgctcac

SEQ ID NO: 6518 - DNA, 1032 bp, Homo sapiens
gttggccaggctggtcttgaactgctgatctcaagtgatccacacccctcagcctgtcaaagtgctggtattacaggcctgggccactgcgcccggccagcttccttgtttagaacctttcaatggctacccaaagttcctgaacaaggcatatatatccttttatgattcagctcctgaccccttctccagcctgtcttatactacccccttactcatatttcagtttagcagcactaaagtacatggcatttccccataagcataactgtttcttgtccttgtgtctttcctcacactgttccatctgcttgaaataccacgagccctcctttgattaactccttaagactcagtttgggtgtcatctaagacagctgcttaggtctacttcccaccccctaagcaataattgatgctctgataatagcctatacatatgtccatctgtgtaatcagcatgttagtttgtaattatgtttgtgtgaatatctttccctttatacttgtgaacttcttaaatccaaagactgggccattaccgtcttttcatcactagtgtcaaatatagtgcttgtcacatgtgaacacaatctcttttacggaagagaaagttgggactcagagtttgtaactcccttaaatgattcagtcaaaatgaaagtagcttgatttttaaaaacctgggttgggaggaaatttagtagggcacagactaaacactactggtacctgctatagtatgctaccagaactgtgagaaatacatttgtattgtttataagtcactcgatctgtggtactttgttatggtaacccaaacagactaagacagcgtcataagaagtattaactctgaagtattttcttatttaagtgaagtataattggatagccaaataatatccagagtattgattaagtgatacaaaggaagagcttgatttttttccagccagatggtgccgatttctaacattctgaagcaccataatcaaatatcagatattttactattattattattattat

SEQ ID NO: 6519 - DNA, 1045 bp, Homo sapiens
atcatatgcctgactttatcctttaataagtaattgtaaaattgcttttgggtaatctggggagatttttgtttttgttcatgtttgatctacatctttgaacttcaggtgtatgtgttaaccaataaatacacctgttgagaccatgtcctactgtttatttacaagactgaaagagattttgtgtgattaataacaaacatattatttgtgcattgccatctgaaggaagcaaaacttaagtagagaagtgagatttttcataatgtagatcttaatattaagaacatagtgcatcctgtgaagcctaaccaattgtgagaggcagtccgcaaggcagtgactgttggggtagagtgaaggcaagtattagtgtttgtacctggcaacaccccagtttccccttttctacccatcacactctgactccaaagcaatcatgttcttttaaagtcatcccaatcaaagaccagggtcatcttggtcggaacaggcatggatagctgcctgtggaaatgggttcagtccataaaatctggcctggcataatgttaggtgggacccaggaataaagtcctggttttttgttttatccttcacttcaatagaactgaattataaaaagtgaaaaatgaccttataattgttatgcgtgaaggagactgatagacaattcagaaatattaacgctactttctccaggaagatcatttgacttacttaacgttagacccaatgctgtatcatgatggagtctctcctctttatcaataccccagtgaaaagctgggagagatacagggatgtcacttcactatattcacttgccatagtttgcctgcaagccaacattggcctttttcagagagctatcagcataagctaaagtagcctgtacttataaagcctaagaaaaaagctcccaaggaaacttggaataatggtctggcatcatcatttaatcagttatttcctgaatatctactgagtggttagactgtgctagacacactttatgagcttgcctgcccagttttgaagtttg

SEQ ID NO: 6520 - DNA, 1031 bp, Homo sapiens
aaatacagggaaaggtggccgggcgcggtggttcacgcctgtaatcccagcactttgggaggccgaggcgggcagatcacttgaggtcaggagttcgagactagcctgaccaatatggtgaaacctcatctctactaatagataaaaaaaaattagccaggcgtggtgacgcgcacctgtagtcccagctactcaggaggctgaggcaggagaatcccttgaacccgggaggcggaggttgcagtgatctgagatagtgccactgcactccagcctgggcgacagagcgagactctgccgcccctaacgccccgcccccgccaaaaaaaaaaagaaagaaacagaaacagaaaaaagaaaatacagggaaaggaggttggtgggactaggtggtgggggagatccaaaccgtctgggccagaggctagaaactagtagtcattcattcactgccagagtttctgtgcaaaggttaggaagcagatgtttgggggttctttcacgttctgcagatctatatttccatcattttgtgtctcaatgacttggtagtagttttctgtcctacgacccacgatatcaagtcaacagtgtgttatcaacagaaacacataggaaagaacttcctgtggcagcaggtgactgagagacgccataaccttgcatttctttaactgatggatgagctactgcaatctttcaccttataatggcaaaaatccaggactaaccttttgatagatgatttcttctactcaatctccacagttctaatatgtttagacgttctgatttcacacaggacaatcttaaaagtcacttcactaccattctaaggaggtctctcctgtttttactgatatcatttatccctgtacttctcttgtgtaatatttattacagtttgaggattcatgaacccttgtttgtttccttgttattgcctgcctttactacactgaaagccccataacattagggaacatgtcttttttttttttttaaaccagtttacacccagcatgtattag

SEQ ID NO: 6521 - DNA, 1035 bp, Homo sapiens
tttaacctccttaattagagttacttttatatactatttatatgcatcgtatgcttcactagatttttgcctgctaaagtttatattatatacttgtttctaaactgtcatccagtactgttagcagatactgagtttctccttacttaatttggccccttattcttaattcctttcatgcctgactcccctgaatgttatacctcttttccagtaaatgtcttattttaggttctcttcactttttcccactgtgctctctcaaatgattattaagatggatctgaactaggctaccttctaaaacagaggacctatgttaagtaatgacatttcgtgcctatatactcagaattacattatttaccaacagctttttattttgggccaagatatgtccttgattgtgacctacttctttcaggctttatttaatggttggagaccccttcattgttttttaaaccaaacttttccacaaaagaattacacatataattacacatatagaacactacacaaaacataaatgtacaagttgactttttttttttttttttttttgagacggagtcttgctgtgtcacccaggctggagtacattggtgcgatcttggctcacagcaacctccacctcccgggctcaagcgattctcctgcctcagcctccccagcatctgggattacaggcacctgccaccacgcctggctaagttttgtagttttagtagagatggagtttcaccatgttggccagactggtctcgaactcctgacctcatgatccacccatcttgacctcccaaagtgctggggctacaggcgtgagccaccgtacccagcccaagttgacatattttagaaggtgaatactcccatttatctaccactgagattaaaaaaaaaagttacaataccccagaagcctccatccatctttctccataccctgctggtttggatatatcatttctatttagagcagataggttattagacctgtttcaaacttgagatttaaatttttaaactcag

SEQ ID NO: 6522 - DNA, 1057 bp, Homo sapiens
aatctcggctcactgcagcctccacctcccgggttcaagtgattctcctgcctcagcctcccgtgtagctgggattataggcacaggccaccaggctcagctaatttttctttttgtatttttagtagagatgggttttcgccatgttggccaggctggtctcaaactcctgacctcaaatgatccaccctccttaacctcccagagtgctgggattataggcgtgagccaccgtgcccagcctagatctggatttcgggatgcccccgtgagttatactgtattattatggtgaatgtaatgaggcaacttctattgtggaatgtctgatgttaactaatgttggattatttacagactgtggctccaaactgcttcaactcatcaataaataatattcatgaaatggaaatacagctgaaagatgtaagttcatttccttttaagttatgggtaaagagggctaattcatttattcttaagttttacagaaattggcaacattagtgctgtgacagaaaaactgaatggtttgagagcttcatttaagtctctttctatacattcgagaatcatttcttctaagcatagtcccttttttttttttttttcctgaggcaaagtctcggtctgttgcccaggctggagtgcagtggcatcttggttcactgcaacctctgtctcctgggttcaagcagttctacctcagcctcctgagtagctgggattacaggcacgagccaccacactccgctaagtttttgtatttttagtagagatggggtttcaccatgttggccaggctggtctcaaactcctgacctcaagtgatctgcccacctcagcctttcaaagtgctgggattacagctgtgagctaccatgcccggcatcatggtctctgtagggtagacagccctagaaattatcactgccaccaaatacctcaataacatcccttttctatctaaatctaatttccctaatttgcccaatcattttattgtttcttgttttttcagtatttttctctttttgagatggagtcttgctctgtt

SEQ ID NO: 6523 - DNA, 1098 bp, Homo sapiens
atgtagtatttttttctgaaccatttgagaatgaattgtacatatccacagccgtttaaacccatatacttcaatgtgtgtttgttctcccatccaagtactaaacagactcaacgctgcttagcttccaagatcagccaagatcaggcgcgttcagggtggtatggccgtagacttcaatgtgtatttcttaagaacgaggatactcttgcccacaactatagcacagatagcaactttaataaatttaacatggatacaatacttctataatctaccattcctactgcagttttgtcaattgacccacattttttattcctccagtataggctaacattttaatctacgttggttggaatttttgtctacagaatatttagtggattcttgtcaaacctgggcgaagacctttatagcattccacaggactttttttttttttttttttgagacagagtctcactctgtcgccgaggctgtagtgcagtggcacggtctcagctcactgcaacctctgcctccctggttcaagcgattcttctgcctcagcctccagagtagctgggattacaggcacctgccattgcgcctggctaatttttttttatttttagtagagacggggtttcaccatgttggccaggctggtcttgaactcctgacctcgtgatctgcctgcctcagcctcccaaagtgctgggattacaggcgtgagccaccatgcccggactccacaggacatgttattttgcccacttttgttctacatttttattggtaacttggaggaaattgttaaatgcatgcctaacaaacgtatagatgacacaaagctggaaggcatatctaatgcaatgatgtttgactctaaaaactcaaaactaatacaatcaatatttatgatagctatcaactccgtgtattgatactgatagaaagccgatgcacacagtgagaagaggtggcataaggaaatgtttattgagggaacatcgccatcatgtggccttttagaatactaccccttgaatcttcaactaacatgtatttttgtttctcatacttaagtgatgtatggttcctttttttttaatt

SEQ ID NO: 6524 - DNA, 1061 bp, Homo sapiens
accagaacagggattctttggtctcaccttatcccaacccccattcaaatttaggaaaattaaaggcagtctcccagaacccactcagacccactcgctttcacagccacatcttttcagctccgccacctcccggtgaggggggtgttatcctcgttttacagaggggaaactgaggtgccagtgatgtgactcattcagaatcccacagcacccccttgtggtgtggagctatggtcaagacttgctgtggaaaccagtggcttgcgtttcttgatttttttttctttttttgagacaggttctcactctgtcacccaggctggagtggaggggcttgatctcagctcactgcagtgtcaacttcccaagctcaggtgatcctcccatctcggcttcccgagtagttaggaccacaggagcatgacaccagcccagctaatttttgtattttttgtagagatagggtctcaccatgttggccaggttggtctcgaactcctgggctcaagcgatccatctgcctcatcttcccaaaatgctggaattacaggcgtgagccaccatgcctggagaaatatttttgttttaaaaaatactgtatttatctttcaaaggtgatactttaaaaattcaacaagcgagaaagtaaagaaaagggaatccttctacactgttggtggaaacgtaaattggtgtagccacagtggaaaacagtttggaagtttcttgaaaaattaaaaatataatatgattaaaaaatcccacttctgggcatatatccaaaggaatcaaaatcagtatactgaagagatatcttcactcctgtgttcactgcggcattattcacaatagccaagacgtgcaagcaacctaaatttccaaaggacaaatggataaagaaaatgtggtgtatatatacatacagtggaatattatttagacttaaaagagaaagaatcttgccatttgcgacaacatgaatgaacctggagcacattatgctaagtgaaataagcctaacacagaaggacaaatactacatgataccaattatatga

SEQ ID NO: 6525 - DNA, 1464 bp, Homo sapiens
cagagcaaacttagggggaaaaaactattaattcaataaaccaatcatgtgtacattaaaattccacttgtgggaagaagtctggaataacaactttcagggaagtaaaaaaattccagaactgccactagcctgtgccttagtcaagtgacttccttttggcttcagttcctcccctttaaaatatcagggtagaactagtattcctggctccttccaactccatgttccttagtggtaacataaaaatgaataagtgacttgatttgctcacacaggtatttatttttcattcattcattcatcccaaaaatattaagtgccttcatgagccagacactcttcaggtgactcactgtgcatatcaatatttatagtcaatttggataataattataccattgctgatttaaatttcttttttaaatttcatcaaatatagctgggttgggctctttaaaaatgaaaactatctcttaattattttaagttttaaagacatgggcataaactggaactaaaaaaaaattagtatcaacacaatgtaagtttattattgtttcttgcttcagtatgttccagtttcatgcagatacaaaatgcatccatgtgcagaaatggagaggggataagtggggtgagggataaaacgtctaggtcagactcagtggctgtggcttttgctctatgggactacagtctacattccgagcactcaccattcacagctgctacctcttcttgtgtttctcatagtcttcatatactgaaggtttgtctgaaatgaggtgagcttctctattatttctttatccatggagtttattcctcaatttggcataattcctcaagtgttgaggggcagggggagtaagagagctgaagagtttttttcttctattgacaccatgccaatgggtaagctgtacactctgtctccctcgtaccttcgtttcctccttaggaagacagtggatttagaatttagataccactgtctactaggttgagcatgaccatctgcagaagttagagcaaaccaaagcagagaggccaaaggcatgagaggttcttttgtacaacggccttgtttttgctggagagttatgcttgccaaattgctggctatgttcctggaccaaatattccaaaatgtactttgtcaggagaattttctatgattaagtcccaaggacagttttacataatcttcccactacatgattttaagaaagcattttgggagagcaaaacgaacctgggaagtaatacacaaatgcctcattcaacaaacatttgtttacctgtgatgtgccaggctctgagcaggtggtggttaatgttttctcatctaacctgccctgattctccatgagatgaggatcactggcttgctttgttttacaaatgaggaaactgaggctcagagatgttaaacaattacctcagctaggattataaagg

SEQ ID NO: 6526 - DNA, 1048 bp, Homo sapiens
tgagtatgtgtgtgtgtgtatgtgtgtgtttagctatttataaaataatgacttcacactgatacctccaattcccttcaattcaatataatgtcacaaggttcttccttaccttcccgtactccacatttgtatttcccttttactacagtgagagtcctggatctctaaaatatcaatatatttactctctcatacagtatacatgaaatagtttcatagttactatgtcaataatacaccaaaataaaacctagtaagtaaaattcgagattttcctaaagctttttttgtctgtagaatatatcctccaatcccacctgaaatgagaaaaaataaataaaaattaaaaaattaaaaagataaaataggatatatcctacaaagggtatactattggattgttatgttcaaaagtttcttggattatttctttttgtgtgcgggtatatgatcaatttgatatctatttgtatttatttgtatctgtttgtattcatttttatggtttgctctttccaccactgtaattttattttttgaaaatgtagaccacgtatgtggttcaaaggtgaaaaactatatataaagtatgatacactgttataatggtggctgtcaatgagccatgccttctggtattcacgccttgtgtagtctcctctcccactgacactggaatggccacgggacttgctttggtcaatgagacacgagtaaatataatcgagtagaggcttgattagctcttgcattgaggcttgtcttctgggaattctccctcttggagcccagctgtcagctgtagagaatccaggctattctccaggagacagaggctgggtagagagatctgggagaatgagacagcatgtggacagagagaggccaaggggaggagaactgagttaccccagctgaagttccagctgcagacagcccatgagtgattccagctgacaccacatggaggacaagcaccaccccagaatggtgagaaattatagtcattaaggcactaaatttgggatagtttgctgcactgtaa

SEQ ID NO: 6527 - DNA, 1033 bp, Homo sapiens
gattttagctgctgctattgtcattatgatctctgtgactactaatcgtaagaatgaattgtgaagatctttagtacaggaatgtgctctttatgtctgagcaaatattttgcacattgccacagtctttatttgttagcacgcatgacatttttactttgctatgtggtcatttatagtcggttgcccctcctagattgtaagcctgctggccggagggagcagctcttctagattagcctttgcatgcaccagtagactcagaaggccttgcacttagcaggtcctcaagaaaggcttattgaatgcactgggaagttataggtggagggctgggatccagcttgctccagagtgaggtctctgcctcagaaatatcctcgcagcagttgaataagggccaggactagggtttgggatttcgcatttcaaccaggaattggagctgccaagatgctagtcacaatagtgagagccagccttccagtcgctgaatgaagttgaaaagtagaacagatttggaaaacagaagttatttcatttttcagggtgaccagattagtttttctttattttttttatattgcatattttgaattattaaaaagtaaatggttcagaacatgagattcagatttgtaaactgccagaatccaggttgaagaaacaggcagtaagagtgtcagtagaaattatccaatcatcaagggaaaaatgcaagtctgagagtctcctgacataattaaggaagtgagtcttccttatggtctagtggggccttccttctgtcacggcaattaaagacacatccctaggcacaaaaacacatcacatggaaagttggagagcccctcatttctctagtcttttaatacagcagaaaagaaaaggtacataatgcggtggtctgcttggtgaaggagactggttagctatttaaccaaacctattttctcttcctcttcagtgcccagctagaccatatttccagactcccttgcagttagatgcatccatgtgcctgaattttggc

SEQ ID NO: 6528 - DNA, 1032 bp, Homo sapiens
gttatgtctaaagttatatggtgctcagtgaggactggaaattgtcaggaatggcttcatggaaagtggggcttgagttagacctagaggggtctgtagaaggaggtcagacagggaaatattccaggtggaagggtgaagatacggaagcagaattgagagaagacagttaaaaccagtatggagaagacagcattttatgattcaataaatagaagccaatcgatcaatttagttcatttcctcttcccttccactttagggttttaagtcaggaatggcaatactgggcacatgtgctacctccagcccactgcacccatggcagatgctactaatcatgacacttgtttttcatgaatttgttaccaaaacaccagaggtttggtttaggtcctactgctccccacacagaatgccaatcaccaagtcagcaagcattgccagggaagaaggctttaatcggtgctgcaaccaaggagatgggagatgaggtttcaaatccagctcctggactgacaaaaattagggtgtttatatagcacagaaggcgggaaaacaggaattagggaattaatcatgatcaatgagggatttgatatctcactgtctggttgtggtgatctattgagtttcagtcccttgtctgagggtcagttcctgaggaaggcactcagttaagacaaatacaagtttcaagtgttaagatggagggccaatttttatgtttattcagtgacccataaatatcatttctatgggaaaactgggtcagtttcaagttcagacagggcctaaaatttttttcataatgtatcataccaagcagttcttttttttttttttttttttcttgtagacagagtctccctctgtagccaggctggagtgcagtggctcaaacatggatcactgcagcttcgaactcctgagctcaagtgatactcccaacatcagcctcctgagtagctgggaccacagatgtacaccaccacacctggctaatttctatttttcatttttattttttgt

SEQ ID NO: 6529 - DNA, 1027 bp, Homo sapiens
gtaagcccagaaccttctgggagaggtgcttaaagaattgggctgggggccagattctctcctcattctgtgcttactattgaaataagcaaaataatctgctaccattaacacctttctgctctagtagcactccctatgcctaaaccatagtactttatatttatatgatttttttgtttttctgtgtgattgcacagaaattctttctggattggcaacacatcccattttccacttagtaaatgtgaccaccttttatgctttggtcaacattttgacatttgtcactgaatcttcatttcctttttgtgtcatttattattttataactagcggtggccctctcaccatttaatgcttataaaattatgaatacatcagaccataataagaattgtccgtgaggcttgtaaacagatgttggggtgtgtgtgcgtgtgtgtgtgtgtgtgtggtgtgtctgtgtgtgtgtttatgataacagtgcttacataatctcaacaaccagggccctggggactcacactcggcaatggaacagttggtttaaattaggtttccatgtgaaatatggtatcgctgtttttttcctagcattgtgggaaagtatatggaaaatgatttgactgataggaaataaatctggatgagtgatcaggattgtgacacaaaccaagtggtggtctccacctgccctgtgaagcagacctctccagggggaggtgagttaaccctttccagccactggactagtaagtcaatgcatggtatcagaacagcctgaaagaatgacaactttccagagaccctgatttgccatcaatttcaactagaaaggagctaaagccatagagacaatatagccagaggcctcaacaactaatgagttgggtggctttgagaaactgtttttttacttttcaggatctcatttttatttgtgagaagtgtttgaatttccaactcaaagagtcagtagggttatgatgctaagtgtttgctgatggtttcccattttaggata

SEQ ID NO: 6530 - DNA, 1083 bp, Homo sapiens
cagggtgctcttataattcttcccaaacctcacagctactcctgccagaaaaccactagaaacactcatagaaatctcaaaaagtgattataaaaagttcaagatttatttttgctgggcccggtggcttatgcctgtaatcccagccctttgggaggccaaggcaggtagatcacttgagtccaggaattcaagagcagcctgggcaacatggtgaaaccttgtctctacaacaacaacaaaaaacaaacttcaagatctcagcaggaagggaattgggttgaaaaaatcttgaaatgtcaatggggtcttcaagtaggcttgtctaacttctgtacagatgaagttgtgcctagcgagctgaagtcgcttgtctgactaataaacagtagagccgggtcatgagcctgaccatgtgttcagtcacaggggaggatcctttgtcctaaaatgcttaaggcatttcttttgattgtagagagactaacccttagcctctttttatgtctaactcctgaagattaggaacatctgaattctgaaagcattccaattacatttcatatgaattataatgctcattaataattacttttttatttaccagcataaagaataaataaactatgcgtttgtatgtttaaaaacatatagaggcatggagacctaagagtagcatgtggcaccattgttgggaaatagaaatgaggagtatgaaggtgtgtagagaagagtatagagtcatataggagctgcaagttcttattgtcatcattttcaatattgttgaccctctttggcatgctgcaccttaagaaggatttgtacatttggaaaaataagatataagtagatgatgccagaaacctacaatggaagctgcttcagctgattaagaactcaaaccttccagtcacattgcctgggactgaattttgacaccacctcttactatttctgtcacctaggtaggtagctgaatcttactaagcctcagttttgtcatctgtaaactggaaatgacaatactacttgatagggtttttgtgaggattataaattaagcaaattgcacggcatact

SEQ ID NO: 6531 - DNA, 1047 bp, Homo sapiens
cttacctgcaggtggggtgcaggctaatggggattaagtttgaagacagatgcatatatatacattgcaatttctgaacatttttttttttttttgagatggagtttccctcttttgcccaggctggagtgaagtggtgccatcttggctcactgcaacctctgcccccctgggttcaagtgattctcctgcctcagcctcccaagtagctgggattacaggcacccgccaccacgcctggctaatttttgtatttttggtagagaccaggtttcaccatgttggccaggctggtcttgaactcctgacctcaggtgatccacccgcctcagcctctcaaagtgctgggattacaggtgtgaaccactgccccagccaacaatgttatttataggaggctttcatattattaacagtaggcaggaattttattttttctttcatttcccatgtgttttaagtaggcaggaattttgatttaatttgtaaattttttttacttatagactaatagaacttaatatagctagatgacattcatatggccacattattcatatgtgtcagagcactggatttgaagtcagaaaacaggtgccctaaagttaatttctctaagcctcatttttcctgatagaggtctgaatgtcaagactctaggagtcagtgcttcctttatatgacattcttgggaaagaaagggcagagtcagagaggcacagtttttcttaaatgaattctgaacaccttaaaggcaggaactgtgacattcatctctgaatctataatacctagccactggtatgaagaacaccattcagattgggttgaataggtagctttcatggattcccttttactgtgctctagctaggtagtgtaattttgagcagaatctccatcctcagtgaaaataatcagaaattacccctgtctcacaacacaacccaagagatccaaccctacccctaaatgcatagttgctattctcaactctgaagctccaggtgagggctctctttggaagtggcttgtttgggatggaat

SEQ ID NO: 6532 - DNA, 1040 bp, Homo sapiens
acatagacacttatctgtgtttcctggtagtgctgattttttttcccaagtctttatatgaatttggtgaataaagggcattgctaaggtagggaaggaataattggagatttttttccctttatctgaaaagaaaattgactttatagattttgaaacatacagatccatgtggctttctctgtagttgttgacttctgaaacttcctaaatattgtggcaaaagctattttcacagagctctttttacaatggttgggttgagtaggaaaaactaaaggctcttttagtgatttctttttacatctagatagtctccattctccctaatatgaaaaccaatgaagtttttttgtttttattaaatatgacatggaaaaatctaaattcctataggtatagttttttcttaatttaaggttctcagaaacaacaaagtcagccacgtccttttttccacctagaatttgtgctagttgacaaaatcataattcatccatctgactgagccatcataaacatctctgtcctataagtctcccttacttgttccatagtgcctccaccagtcaactaaaataaaaaacgacagtttcaaagtgagtttctcaaaaaaaattcctttctcaaatcactaaagaaaaggcaaaatatgaaacttctgatgttttaaaagattttaaaagctccccaaagtgggcagctttttaatactctgatataattatttacaaggagaatgaaggaagaatctattgaattcaaacctgttttgttcaggatcaactgtgctactataattaatgtttaaaattttaggaaaactgaaaataatacgtaattaattgctctagaataaacacaaaagtctattaggattttagaatgttgtgaagctaccattatgttaaattggggagctagctcaagagccttttatatcttttccctgtgtgtcactccttcccctacctcagatcccgtattttcttttaaaaaccccccaaaaaacaacactctagggacctacactaaagcac

SEQ ID NO: 6533 - DNA, 1870 bp, Homo sapiens
ccatgagttatttcatgaaggttgccactgtagcactttgatgaactagtgcagttgtttgtagcttttggtatattcaaaatcacctgaaagcacccagatatagtggctcatgcctgcaatcccagcacgttgggaagctgaggcaggagatttgcttgaggccaggagttccagcctgggcagcatagcaagaccccatctcattttatttaaaaaaatttaaaaatcacctaaaaacacatttaaaaaattagattctctaattcacagcctccgcctagtcagattcaggagacctattatttggctggtgaatttgcatttttagaaagttgcgtggttgggcccagtggctcatgcctgcattcggagcccaaggtggggggactgcttcagccaaggagttcaaggctgcctaggcaacatagtgagaggctgtctcttcaaaaaataaaaaaactagctgggcatggttgtgtgcacctgtagccacagttactcgggaggctgaagtgggaggatcacttgagccagcgaggtcggggctgcagtgagctatggtcacaccactgccttcctgcctggatggcagagtgagactgtctccaaaaaaaaagagaaaattgctcacagttgattcagattgtcaactaggttttagtgaattgcttaatcctaggtggcatcttcaaattacaggatggtatggtgcttaaaaatgctggttctaaagttaggctgcttgggtttgaattagcttactagctctttaattctggacttctctggatcttaggcaactcatccataaaatggggataataataatgcctaattcatgggattgccatgagggttaaataatattttacattctttgttttaactatgtggcatatagtgaagattcaaatgttattattcagacagtagcaagactactataacaccttcctcagcttcaccactgaaatccactgatttgaagaaaggaagatactggatgaatttttgtgtcctgtctggggaaacgttacacaatttgtgcagaagaagatttttaaacataatttatacatgggattggatggatgttaaaatagattctgatgtagtgatatgacatttcccgaagtcttgaagctttgactaaaaagcaaatctgagaaggaaccgaaaggaatgctgagaaagattaaaatatttgtatcttttattgtcttaaggaacttttatagacaggcaaagccaattttttagtttaagtccatgaaatgtttaacttggcttactcatgcatttcatacttagtatgttgtggtaggaaggttttgggaaagagtggaaacatttggagattttgagacgatacatctgttatccatctctaaatgtatgcagaaaggcaaagtgtgtcctttttgagacagcttttttctccctaggaactctgttagctacactatgagttatcttcagatagttatggctgatagttgcttggaccctactacagtgattcttaaatttagtgtttaaaattacttggaagggggagggttgttaagaatgcagattccttgagacccaagtagatcctgggtggggtccaccaggaatccaactttttaaaaagacccccaggtgattctgatgcaggcgattccccgactataaccactgaaatactgggctggttaataggcaggtctcctcaggtagtgactgaaagtacaacacacctttatagctcacattgctttactgatttaaaattgggtcatattcaggtactatgtaattgatgagtataaacagaggtgtataatagagaacagattcaaaatacaaatctttaagtactttg

SEQ ID NO: 6534 - DNA, 1028 bp, Homo sapiens
tcagacatttaagattgctacagaaccctttttagttcttattaattagtttggaattttcttactatttattcattcagcaaattattgtgagtcctctatgtatactaggcacataggatattaggtaaacagaacattttatttaaaaagtttcagataagggagtcctataatatcaatgtttacaatattacctgataagtgttataaaagaggatatgaggatgcatcagtactgaggaaggggtgattaactttgagacaggaagttaggaactttacagtagatgaaacatgaaagcttagtattttactaaagaagagggtttgggttagaatgagtgtgatgacaggacaagtaaaaataacatatatatagaattatatataaaatagctcagcactttttgggactgcagattctcatctggatgattgcctctagggtgcatgaggtatgtgtcaaaaactgaggcaaaaaggttgggtctaaattatgggggagctaaatttgtctgacagaactaagtaatttgaactgattcagtgagaggtggcagtacagggaacatttgtgggttttttaaacaatggagacatacttagaactacatttcggaacggtgacttgcatagcggtgtggcagatgatttgcaacttgagaaactggagcatggagatagttatggtagtttatgggtgtttgtcagtctccttttcacaatgtgatatacagatagttgatgtaaataacattttttaaaccagtaatattggattagagaaaaaaagtaaataactagataaatctttcaatctctgcaagaaggggtggttaataagttgagtgagacataccagtagcctttttgtgaagctttaaggaaaataaactttgaactggatttttgtttttgaaggaattgagatgatatgaaaatagagtcatgtgaaaaattatgcttaccatattttgtaaggaatttaatgaggatgggaaaagagccagaatagctatttggct

SEQ ID NO: 6535 - DNA, 1045 bp, Homo sapiens
agcatttacattgcattaggtattataattaatctaagatgatttaaagtatacaagaagatgtgtataggttatatgcaaatagtgcaccagtttatataagggacttgaacatctgagaactttggtatctgagggaagtcctggaatcagtcccccacagataccaaaggacaactgtatatttttcctagttgtagaaagagagtagtaggaaataatattgtaaagataatttgtgtccccattgtggagagcttttaatgctagggtaaataattaaaactcttccataaatagtagggagttactgaggatttggggacaaggaagtgaaatattctgttattttctgcttatacttggtagtgttttctagttgtaatggcttatctgtcattttcttcctctctcctgtgtttgtctaaattctcccctcgttcattcagtaagcatatttgagcaccacctatattccaacgaaagaaggagctagaataaggcctttctgttgaaaccagtgatggaaacataaattgaaacactgtgctgtgatactagctcagggagcatgagatggagtgttttaaattctttgaaaataaagaatagcccttcagcaacagaaagagacacaaaatggaataaggatttcattacaggccctgggagtacctggcatgtctgaaggccacatggagatgggtcagtgctgggaaggatagaggggacccatgggccaaagcttttattggcatccagggcatatcgaagcagatttcctgtgggggaattctaattaatgggtttaaagtaaactggtaagagttctagaaggtcactgtggcatgtctgcacaattcacgcagggtttggcagtcaatggggccaggtaagtaggttgtattcagctgtcccatagggaggtgatcaacaggaggtccaccttgaggaaatgggaaaaggtgtagaactggaaactgtcaaggatgactgagccctgcttctagtatgagaaagttaaacttatatttaaaaactgatg

SEQ ID NO: 6536 - DNA, 1025 bp, Homo sapiens
ctatccccccaccccaatttctaaaaaaatagatggtgtcttgctatgttgtccagtctggcctcgaactccagggctcaagcagtcctccttcagccgcctgagtagccaagactacatgtgtgtgcccagtgttgaatccccttttaatatacaagtctattgaaatgattattagaatttatccaatgagtctaaaaggttaaaatagtcaaattgatgtaaatgttaagcaaaattaattactttttggagggctggagctcacattactgttggcagtaagaagattcaggattaggtagtcacaattttctatagtgtcaaattccacagtttgagaaactatgggatttacattcctttatctcagatacgtaagtgggtttgccaattcttaaagatccaagcactctacattctgttatttaaaaaagcattagtggagaatttgcatgatatcaataaattttgcccctttttagtgagctttagcctttgataaggtatggtaggcaaatggtctgactcttaggtcctatgtagctttttttgtgtgtgataaaagaaatgaagaaattttaggagaatacaagcacacagatatgtgaagcaaatgttaacatgtattaataagctagagtcatttacccaacctgtattataaaagccactaagggagaaggcagggaaatggttgtattagtaggccttttcccctcttttctcttctaatccccacattagccttttcttagtgtgcctcttttctttttcaactatatgttttcaacaatgaagaaaccattagactgctatttctcagttgatgctatttcctaactggggcaacttattgctcaactcctttttgctaaaaagattggacacaaattagtagagagaatggaagatggtgtgtttgtgtctgtgtgtgtatagatgggcgtgtacatgaacatggtatttatatagtgttgattggggtggaggatgaatttaaagggggaaagatggattaacac

SEQ ID NO: 6537 - DNA, 1034 bp, Homo sapiens
tttgaaggctgggtgtggcggctcactcctgtaatcccagcactttgggatgccgaggtggttggatctcttgaggtcaggagttcgagaccagcctggccaacatggagaaaccgtgtctctactaaaaatacaaaaattagctgagtgtggtggcacgcacctgtaatcccagctacttgggagactaaggcacgagaatcgcttgaacccaggaggtggagtttgcagtgagccaagattgcaccattgcactccagcctgggtgatagagcaagactcttaaaaaaaaaaaaaaagaaaagaaagaaaataatttgaaaacacatagttgttcttaatatttctaccatacctgaagcaataaggtacttttcaatttataaatacttggggtttgggaaggcctaataggtaacacctttagcaacccattcaagtttgggctcaatagagaaaagataggaaaacaaatggtacttcaaaatatgtcttaatacagatacattgtggatcaaaagatgtgggtttgttgtgtgactacagttggcctccttaatatttcacttgtgttaaatttactcagcaaaacattaacacagcaggtctttcctgtggggatggggagcagagaggtacagaggtaacttggcctcctaacaggagagcagaacagactatcttcagcagcagtgtctgctgccaaaatttggtccctcaggtggggatgaataagggggcagagagaagctaggaatgttcctttctgcttcccctcccttcaacacgaacaacatagcacaagagtgaccccttccccaaaagtgccctacagatgtcattcatatagtcagacactacctctggaatcctgaaagaattgttctatcttttgtgtgggtgtgcttgaacacatctggtttgttttgctaagaagcctttagtgttgatttatatttaagaaattttaatattttggggggtgggagaaagggaagagagagagagtgagtgtgtgtgtctgtctgtcggtc

SEQ ID NO: 6538 - DNA, 1052 bp, Homo sapiens
atgtagctagtcagtagttagaccatgtgcctcctcctctccctgtaaactaacttaatttcttttttcaagagacttggtattgctatgttgcccaggctgtcttcaaactcctgggcttaaatgatgatgctcctgcctcagcttcctgagaagctgggactacaggtatgtgccaccacacctggcttgtagttaattttctttacaagtgatgaaaatagtgaatagtttatctattggtacttaaaactgtgtgctgtgatccccaagccatgtgctcagacactctggtgtgctgcacttaacacactggggtactgtgggatatttaaattttttgaggcaaacagtgatattccacatcagttggatatggtggagactggtaattagaagcagtacacagttccaacattaagtgctactacatacttttctgtggcatcatatctttgtgaatctgttttttctgaggttgctgtgataaaaaccagatactgtaaaaaagtcagcgtgggactggaaatgagggttatgtctaatctgattttaaggtttgagaaattgtatacaatgcacaaagccacacatgcccaaattggtaattaattgcggttatttaagaatgaggccgagtatagtggctcacgcctgtaatcccagaactttggaaggcagaagcaggcaaatcacttgaggtcaggagttcaagagcagcttggccaacatggtgaaaccctgtctctaccaaaaatacaaaaaattagccaggcatggtggtgcatgcttatagtcccagctacttgggggatgagacaggagaatcgcttgaacctggaaggtggaggttgcagtgagccaagatcatgccactgcacttcagcctgggtgacagagcaagactccatctcaagaaaaaaaaaaaaaaagaatgaaagaaaacatatttcttttttcaatttatgtgtattttttttttttagcagttactaagtgttaggaaatatatccttattaaattgtttggacatagctacttattaaacaga

SEQ ID NO: 6539 - DNA, 1013 bp, Homo sapiens
ggcacataccaccatgtgtggctaattttaaaattttttttatagagacggggtccctttggattcttaattaataaagacctcaaagggtttttgtttatgggattatcagttattactatacccccagttaaaactgaagtgttcaagtattaatcatttaaatatcacaagaataaagctattatatgttaacaaaaacaacatatttgtgaaaaatgactattaaaaaacaagtagtggggagagtggcattgttttacatttttgcagatctctttaatgtatggcataaatgaaggctggattctcatatctactcttgcacttagttttttgctttatattgttttagtaaatttaagtacatgaagaaaatctcacagttatgtatgtagtaaagagaagaacgttttaatagtcttttcagataattgtgggcattcttctctgatgccactccaaaattcatcaagtggttgtttcttaaaggtaagttatagtgtggaatctgaaaccatataattctgttatagaaaaatgcattggtctttcttgcactttgcatggatatgtgtatttatgcatggttttataatatcatgcattggtcatttggaaagtactggtgcaccagatacgtagatcttccaaatgttacagcattgcattataaaatatcaaaaaacgacagtattatcaccactgatctcacaaaaatctaactctgggaagctgttaaatatatggtggcataggcccgggcgcagtggcccacgcctgtaatcctagcactttgggaggatgaggcaggtggatcacgaggtcaagagactgagctcatcctggctaacatggtgaaaagccatctctactaaaaatacaaaaattagctgagcatggtggcacgtgcctgtagtctcagctactcgggaggctgaggcaggagaatcgcttgaacctgggaggtggaggttacagtgagccaagatcatgccactgcactccagcct

SEQ ID NO: 6540 - DNA, 1027 bp, Homo sapiens
tcttttcaatataagtgctttttttctggctgcttttaaaatattcttcttaccattatattttagcaaataattatgatgtcttttggtgtggttttatctgtattctgcttagaatttattgaacttcttgggtctgtgggtgtagtttgacaacatttcagccattattgtcttaaatattgttctccctcgtaccaacactccaattacacataatttaggctgcttcatagtgttccctaaagctctgcttatatttcttcaatttttttccctttctttgcttaattttggatagtttctgttgctctgttctcaagttgattgataacagtgctacagttgttaatatgcaagatctgacgtgaatattttactgggtgacattaatcacagattaaacattgcagaagaaagtaagttcattgataatttcttagttatgggataaattagctccaaagaaaaaattacgttagatgtgaactaaaaaagtttataaataagccataaaggagtcaaactgatgcacaagaagcttaacttctggacagaacaaaatcaagtattattcagccctcagccgtctaaaattcacaatgtcttacatccaacaaagagaccttttgggtttttcctgaatgttttgtgtattcccagtgatgactttttattctggtggtgataatgtgaataattctcacccctgggtaagctctgggaagtgttttgcttgtagctcctcaggttattgttcttttcccaaaagttcttctttgcccagctttgtagggttttattgtacacgtgtagatcagtattcagctgaagactcaagaatactgctatgctagtttctggagttttttcctttttttttttttttttttgagatggagtctcattctgtcactcacgctggagtgcagtggggtgatctcggctcactgcaaccctctgcctcctgggttcaagtgattctcctgcctcaacctcccaagtacctgggactacaagcacatgc

SEQ ID NO: 6541 - DNA, 1049 bp, Homo sapiens
gagaattgcttgaaaccaactgggaggtggaggttacaatgagccaagattgcgcctttgcactccagcctaggtgacaagagtgaaactctgtttcaaaagaaaaaaaaaaagaaatattgcaagaattactgtaatgtgatacagagacacacaatgagcacattgttagaaaaatggcacccatagacttgcttgacattagggttgctacaaaccttcaatatgtaaaaaatgcaatatttgcaaaatgtaataaagcaaatcacagtatagtaaggtatgcctatagtatatttataacagctattttatcatccttgtgttataatcctattatctgtgacatttttatattgtgactgttgattaatttttcttctcattatgcattatatttttctgcttcacatctctgtttttattgaatgtcagacattgtggtttacataggtggatgctggacttttttgtgtgttcttttagatactttttggctttagtctggtttgcagttttttggaaatggtttgatctttttgacctaatctttgttggagtggttccagaatagcttttagtttaggagtaatttgtcctcactactgaggcattattcttctaagcactctacctagtactcttatctatcaggaggcctttccactctggctggtcttgtgtgaactttaagaatgtcctattttttttttctctggtggttctttctctggctgtagttaatcacacacatgcacagatcagtactcagccaaaaccttgagaggactctctgcagctcccttcttttctggttttctggtttgtaacttttagctgtcttggactctccaactctaaactttctcctcaccttaggattgatggaccactgagacctggaaatgtcaggtacttgtagggttaccttgcttatttcttttctcttaaagatcactttcttgtgctgcccagtgtctgttgtctggaaactatagtttaatatattttgtccattttctaatgatttaaggggaaagggtaaacct

SEQ ID NO: 6542 - DNA, 1033 bp, Homo sapiens
agaggaaagtaaaatagtttataggccaggcatggtggctcatgtctgtaatcccagcacttcaggaggctgaggcggataggtctcttgagcccaggagtttgggaccagcctgggcaacatagcgagaccccgtctctacaaaaaaaatctcaaaattagccaggcagcccgcatgtggtcacaccactcgagagggtgaggtgggaggatcgcttgagctcaggaggtgcaatgagctgtgattgtgccactgcactccagcctgggcgacagagtgagaccctgtctctaaataaataaatagttaataataaaatgtgctaaattggtctaaatgataatgttaatgctagacaatggcaccacataaagacttaaggactttaatactagaaataatatattgtcactgttacttctaaaatttttctttttatatttattggaaaaagttaaagtaatgagaaggtacaagtgtctgctcttccacctgaactgctattcttgatcctactgtaaacactgttagcaatttggtgtatattctttctggtcttttttctatgtacataaagtgtgcatctacatatgatcaattttaaagcttttcttttttattttttcacccacaatttatgccataaggttattctgtggctttctttcttcacactataatctatcttgaacatcttccatgttagtacatacaagtctgtctcatatgtactacagctacattgtattccacaatttggctgtactataatttatttaactgttttccttgagatagccaaatcaaagacatatattttttcctgccattctataaaaaagacatatatgttaacatccaagtactgtttttcatccctcaaaagagattaaaatgaatgagaattacccatacgaggatgactgaaaatcattcataaatatttaccaaaggtctcaaacaaataacctttgactgtttatttcagttctaagaatttactctgaggaaatagccaggattggatgcaaa

SEQ ID NO: 6543 - DNA, 1029 bp, Homo sapiens
ggatattaaagaaggagacaagaacagtagtcctgctttgaaaagctagtcttcaaaattgacagactaactgacatagaaaaagtggtttttggataaaggttttttgtttcctatgtaaaaggcgtggaagaaaatgttggagatacctaaaagaatcaagaggtggaaaactgctgattttacattttatggctgaagtaaatgaaataagtaacttattgacagtattaataaactattattttgtaggtagagtcatttttcaaaggaaaaagtttaagtggtgagtttatattccacaatttggagtaaacaaaatgcaataaatttttaaaatagctttgaagatacttcaaatttttacatcttttcttttgtaacagttaccacaaagatattctggaggctagagtaggattgttaaatactactgttaacctccaaagtactatagtacagacattgtttccagttctgaccttttgaagatattatagaccagtaatgaacagatttggttgtaaattatttaagtcactgaagatgtcatttatcttcattcacaagttggggcaaattcgagttacctaggaactggaaatgttggtgggagattgtttattgtttgtttagatgtttttccatagtatggtgtccatttgttttttaagggaaattttttgtcttccttaaggaattcctatcactcagagaattttagccattctggttctagtctaacaaattattcatctaataatttgacattaagaaaactataaataactggtagaaggaaagtgctttgcacttcagtggattgaagacttgactttgagagtaagtccaaaaacatatatgatgtttctcagtgataagagtaaaaagtaatgaatcctgagagttcttaaacagcatgctacttggcaagacttcatattttttagttacaattcttccactgtttaactccagtttgaaatttgaaatctaatatgtagctaaatctgtgacttgtaaaactct

SEQ ID NO: 6544 - DNA, 1040 bp, Homo sapiens
cgcgcgctgcgggtgcggcgaggctggccctataaaaatgtttctgtttctgacatcctcgtgcagatacgcagacgtctctacctacaggatcatgggctagcgggtgctcaatcacagcagccagcgttggaaggcgccttgcaaagtattaacagcactatcaaactttaattgcgtagttcggaaccagatatgtgaggaaactgggttctccacgatcggccacctcgcccaatctcacaggatagttacaggctgagttcggcagcgggacccagtttcctcctgagagaggtccaggtaaaggtttacggttgccacaggtcagtcctgacgaaaaccgcaagctgcgccaaatctcgcgcagcggggcgggagggcgggtggggaatgtaaggtatcgcgagatgacaggattttcccgcgaaggagaagcgcgcttttttccctggcgggggatttggctagaaggctgggccggcagcggttgtgaggagttagctcgcggcattgcaggctctgagaggaggggacccggttcccgggtgagtgtccaggcatgccagcggaacggcccgcgggcagcggcggtgagtgaggaaaaccttttgggcgcgggtggcagcctgcggggctgaggtgggcaagcatggaggctgcggcggagtttcggggagggagccgaccccgggcagggactgaggaggaaaggagggttgggaaactgcaacggtgagtggaggacaccccggaatcgcacgtattagcatgccggtgaagatttcacataggcaactgcattttcccgagcatcccgagttgtaaactgtggtccaggcgacttgtagacattgtgaagacttacggtgtcttctgagaggtgatgctggcgtcccctcggtcttcagcttttgctccagtgcatctcgggtgggagaaaggctgtttcttgttggagttgagtagttggtaatttttttaaaactgcaatttgaaagctttctcccccgtcaggctcggaggctccagcaatggtt

SEQ ID NO: 6545 - DNA, 1561 bp, Homo sapiens
gtcaccgcacccggccttcaattgttttttaaatggaccttccaactcagtagtgccagaaaccatgtgttcaatatttgaaattataatattttgatatacgaattgcatctatcagattgcctgttaaacccaaaaactattttttttttaacagttatttgttccagtttttggtttgaaagtgtttggtttaaaaaatgttattttagccatttttattaaactttatgccaaaaaaattaaggtatgtcagaaagtgttcataattatggaaattttctctttggataggctcgcatgtcttgggatagagagtcgacagaaattcggtaccgtagacttcaacatttgcttgaaaaaagcaatatatactccaaatttttattgacgaaaatggaacagcaacaattagaggtatgtatatgtaactgactacaagtgaaagcttaaaaaaatttaaaaatagctttattgaagtgtatattatatacagtaaaatggacagattttaagtgtacggtttgctgagttttgactagtaaatatatagatctgtgtaaccaccagcacaatcaagatacagtgcacttccatgaactccaaaaaattgtcttgtgctgacagtaatccccatggctggtgtccagcaactactgatttgctttctgtcactatagaccagtattgttttttcctagaaaattgtataaatgaaatcatggtattgtgctagtgagtaaatagttggtcttcatcaccatttcctggtatacaactcttgaaatccttggaatcttcaaagtaatagtgtttttttttttgtttttttttttttaatgctaatgatcaatggctagctgcccttaggtagcttcaggatgggagcctaagaaagacaaaacctggattagagggttgggatttagcctcaccctcaactttgaggaaaagagactgaaagttaacttgttcaccagtggtcacgattgaatcaatcacgtctatgttatgaggtcttcattaaaaacccaaaagggctgggtgtggctcacatctgtaatcccagcactttggggagcctaggtgggtggattgcttgagcccagaagtttgagaccaggctgggtaatatggcaaaaccctatctctaatagaaaaattagctaggtaaggtggcatgtgcctctagtcccagctacttgggaggctgaggcaggaggttggcttgagccaaggagattgaggctgcagtgaactgtgatggcaccactgcattctagcctgggtgacagagcaagaccctgtctcaaaaataaaacaggctgggcgcagtggctcacgcctgtaatcccagcactttgggaggccaaggcagacagatcacttgagcccaggagttcgacaccagcctgagtaacatagtgaaaacccgtctctaccaaaaatataaaaattagccggtcatggtggtgtgtgcctgtaagcccagctactcagaaggctgaggcaggaggatcgcttgaacccaggaggcggaggttgcagtgagccgagattg

SEQ ID NO: 6546 - DNA, 1186 bp, Homo sapiens
aacaaacaaacgaaatgccaactatgtttaattttgaaatttctcttctaaatggaaaaaaatggacagaagtagagcccttgggaaaaagcagagattatgaacaagttatagtagggaaatacagaaaaatattacatgtaggtaagtataatagtgaaaaattgtggatgtggctcaattgcaggaaacatattttttctcaagttaatcagtgccttttaacgtataatactatgaaggtccttaataaaatcaatattctgaatccttgttttgtagggtaaaaattcaattgatgcaagtgaagagaagccaggtaaatatccttattctagttttgaagaatatgcgtttatatttctattttaattgctatcaaaaataaaatttttttttatagttatgaggaaaaaaagaggaagagaagatgaatcatacaatatttcagaggtcatgtcaaaagaggtaaaaataaaagggagagggcacctaacatttgatgttgagtaaaatgtaggttttaaaccaccttaaatctgtaaagattgaatattcaatatcacatgaaatatgttttgaatttaatattatatatcatttataggtgaagctgccaaaatgtttgaagctatctaccaacctacagtagacttgagactaatctgaaactaatgtcatctgaccttcatagacttttttttttttttgagatggagctctgtggtccatgctgccttgcagtgtcactatatctgctcactgcaacctccacctcgcgggttcaagcgattctcctgtctcagcctcccaagtagctgggataacaggtgccaaccaccacgcctggccaatttttgtattttcagtagagatggggtttcaccatgttggccaggctggtcttgaactcctgacttaaggtgatccgcccgcctcggtctcctaaaatgccacattacaggcgtgagccattgcgcccatcctcacttaagtggcaaataggcttacacctttaggttgttctggttttcttttctttctttcgtttccttcctttctagcttccttcttttttttcttcttttctttttttgaggcagggtatcactctgtgactcaagctggagtgcagtggcacaatcatggctcactgcagcctcgacctcatgggctcaagtgatcc

SEQ ID NO: 6547 - DNA, 1051 bp, Homo sapiens
tagcaatgagatgtcatatgttgcctaggctgctcttgaactcctgggttcaaatgatctttttgcttcagcctcccaaactgctgagagtacaagtgtgagccagtgtgcccagctttttgttggttttcttttcttttttttttttttttgatgagacggagatttacccttgctgcccaggctggaatgcaatggtgcgatctaggcttaccgcatcctccgcttcccaggttcaagcaattctcctgcctcagcctcctgagtagctgggattacaggcatgtgccaccacacccggctaattttgtatttttagtggagatggggtttcagtgtgttgcccaggctgatcttgaactcctgacctcaggggatccacccgccttggcctccaaaagtgctgggattacaggcgtgagccactgcacccggcctttgctggttttcttatttgggttattacagataacagtaatagctttgactctacctattatcttgtgcttgttaagtacctagtggacttgtatagcattttgcaaggaactgtggaaacaacaggcatgggcatagagcttaaaattacatatatgttgcggagagttggggggaaagggtagggtagtaaagacactgtctgaccagagcagataagtatttcagggaaaaagatggtaccagctctttgttaaacgagtctgagcctggcctagtcagaaattgtcactataatttaactttttgtaacccctaaccttgtcttaagaactttattcttgttttttgttgaagacttttacgaaactgaaatcatatgctcttttctaaaaccagcttctttttttcatttctcactttttacttaaaaatatgaatgaattagagcatcttcagttctgacaaaccagttccttagcatgtttttaatgtgtcacattcttcctttttttttcttggagacagtcttgctctgtccctcaggctggagtgcagtggcgcgatctcggctcactgctacaagctccacctcccatattcaagcgattct

SEQ ID NO: 6548 - DNA, 2403 bp, Homo sapiens
gagactggcagtttcaaaaaacttgaagtaaattatatttgcctccaatttgtatataagtgaaaagagtgatgaaggaaggatgaagctgtcgatgtaagcatggtcaggagtttaaggctgccataagtaaagtaggaagctattgaaagattttaagcaaatttccattttggtaaatcacttggctagtttattcagagatctgtgggcatagtagtttttctttctttctttttcttttctttttttttttttaagacagagtttcactgtgtggcccaggctggagtgcagtggtgatctcggctcactgcaacctccgtctcccagttcaagcaattctttcacctcagctccctgagtagtccagcgcctgggactacaggcacgtgccaccacgcctggctgtttttgtattttttcatagagaggtggtttcaccatcttggccaggctggtctcaaactcctgacccgaagtgatctgcttgcctctgccttccaaagtgctgggattacaggtgtgagccaccatgcctggtcccataccagttattctttcatttactgttacttctttcttctgtatatttactgaatttcctgctctcttttcctcttcgcctaactaaattctttccattgtttcattctcaccttacttgctgaagaatctctaaatctgtgaatgcatttggaggggtataacccaattgagtgttctgccactgtggaccctgctcctccaagttatcccttctgtttcttcaccttttccttcctcactgggtctttgcctttcaattatagatacattgtgttttcctgtctgcagaacaaaaatttttgatccagtctttctagattgccctgttttttattctttatttccaaggttttttttgagacacagttttgctcttgttgcccaggctggagtgcaatggcgccatctcggctcattgcaacctccggctcccaggttcaagcgattctcctgcctcagccttccgagtagctaggattacaggcatgtgccaccacgcctggcaaattttgtatttttagtagagacggggtttctccatgttggtcaggctggtctcgaactcccgatctcaggtgatccacccaccttggcccccaaagtgctgagattacaggcatgagccactgcaccggcctatttccaagctttttaagagtaggctggactggacatgatgcctgacacctgttatcccagcactttgggaggccagggtgagaggatcacttaagcccaggagtttaagactagtttgggcaacatggcgaaatcctgtctctacaaaaagaaatacagaaatagccaggtgtggtggtgcatgactttggtcccagctacacaggaggctgaggtgagaggatcacctgagcctggggaggtgaaggctgcagtgaggtgagattgcgccactgcactgcagcatgggcaagagaatgaaaccctggttttttttttttttttttttttggagagagagtctcgctctgtcgccaggctggaatgcagtgctgcgatcttgactcactgcaacctccgcctcccgggttcaagtgattctcctgcctcagcatcctgagtagctgggactacaggcacacgtcaccacgcccagctaatttttgtatttttagtagagatggagtttcaccattttggcctggatggtctagatctcttgaccttgtgatccatctgccttggcctcccaaagggctgggattacaggcgtgagccaccgcgcctggcccttttttttttttttttaaagagtagcctgtgcatatttccttacacattatgcagttgagcagttttacgcctaccagttgaatttattggtatctttgaaattgatacctagcacaaagcaaacaatttatcttttcctctcttccgaatcttgctcttttgttttctctttttttggtgttaatatcagaaccagtatctactgtgtcatctaaaacaatttaggaggttatctgaatttccttatatatctagatttttatcgatttctgtgagtcatttcatttgctgctactctggtgtttatgcccttactgtgccctatttatagtagtttcttaattgatttttataatcctagtctagctctcattgtcaagagtaccagattggtttttctgaaactcaaatataattactcataacctccattactttttatggtttcacaaggaattgcattttcttgtagaaaaatttgagaataaacaaaatacaaggaaatcacctgaaaagctgtcacacagataatcactaacattttggtatatgtatgttctttttctttgtattacggaaaatctcaaaaattacaaatgttta

SEQ ID NO: 6549 - DNA, 1049 bp, Homo sapiens
tatattcccatgtatatatatgtgtgtgtgtcagccacttacatgtcctgttactcttctatgaatcttaaatttgatattgctgttttgaatctacttcatcccctatgccttctatattctctctgcttgaaatctaccctcactatcttgaatgatgaagcctggtgacaactttttagataattttatgtaagataattatttgctaagtcatccagtgacatactcgggtattgtttgtctccctaccagcagcatctagtaggtacttcaaaatcagagcactttattctgtatttttaattttttctgtctttgcctcttacccaggaatgcaaactcagatgtctatccacagaggcctaaagtgggctgtaacatggtttggcaaactttttctgtaaatagccagatagtaaatatttttagcttttgagtagttttgtgggcaactactcaaccctgtactctgctgttgttgcttgaaagcagccatagacaaaccgtaaacaagtgaggctgactttgttccaatttatcccatttctttgcttttaaaaaaatacctgtgtattcgcttagctggagttggtctacaggctgtagtttgctgaccccaggactagaggtttgttgccatgtgtgaatttgtacttaatctactcagattaaaagaaagaaaagctggaaaatcactgtatttgatgaaatatcccattgtataagtgttcccaaattagcctagaatgttatgaaatattatgagccagtaatgtctataggcttatttctgcctgaaggctactagttttatcttgagaatctcatcctcatttcctggcaaaatgagcacagaataaatgcttgttgaataaataaataaatgaacttcatacattattaatttgtttttgttttctcaaactactaggaaattttgtctgtggctaaaaaaaataaaaaggagaatgaggtaagaaatttataatgtaagattaagtttagaagtcatatttactcctcagttactagtcctttttctttaa

SEQ ID NO: 6550 - DNA, 1004 bp, Homo sapiens
ttcttcttattgactagtattctgttgaatgaatgttacaattttctcatccatccccttattgatgggcatttgggttgtttgcagtttgtgacttttatgagtaaggttgctatgataatttgcacacaagtccatgtgtagacatgttttcatactttctgcctgtgtacctgggaatggtattgttgtgttacgtggcaaatgtgtgttcataagaaagtacagattttcccccccaaagtaaacacatcattttattctctcgccagcaatgtttgaaaactccagcttacattattgtcagcatttgatagtctttttaatttcagccattttattagatgagaaatggtaacttgtgtggtttttaacttgcattttcctaattactactgaagtagagtatatttttatgttctttgataactatgttttctttctttttttttcttttttgagatggagtgtcactctgtcgcccaggctggagtgcaatggcacgatctcggctcactgtaaactctgcctcccaggttcaagcgattctcctgcctcagcctcccaagtagctgggacaacaggctcatgccaccatgttcagctaatttttgtatttttagtagagacagtgtgtcaccattttggccaggatggttttgatcacttgacctcatgatctgcctgccttggcctcccaaaatgctgggattacaggcgtgagccaccatgcccggcctgtatgttttcttttgtaaagtatctgttaatatcttttgcccgtcttatttatgcgtactgtattttctgtgtaacagtttaataaattattgagtatcacaatattagaagtttggaagagagatacaattctaatgatcttttcaaaagtatgtgcctgattttaatttgtaagggttattctcagatttttatattttattttattttattttattttattttttgagatggagtcttctgtcacccaggctggagtgcag

SEQ ID NO: 6551 - DNA, 1033 bp, Homo sapiens
tgtgttcatggctcactgcagccttgacttcctgggtttaagtgatcctcagcctcccgagtagctgggatacaggcagttgcgtgcaaccacacccagctaattttttgtatttttagtagacacagggtttcgccatgttgtccagggttgtcttggatacctggactcaggtgatcctcctgcctcagcttcccaaagtgctgtgattgtaggattagccactgtggcagcctgttatttttttttttagtagcttttcatttgtagagggatggcgatgtctccagttttttaatccaggtgtgatcttagtcttctatacttaatgattataggactcagtagattttgttagttgcattttctgataaatggtggcatacagcagcattttgtataacacatcttattaaactttttttctctacaggatgaaaactcctcctctactaatctctgtgtggaagatcttcagaaaaataaagattcgaatagtataattaaagatagattgtctgaaacggttaggcagaatactaaattcttttttgacccagtccggaagtgtaatggtcagccagtaccttttcaacaaccaaagcacttcactggaggagtgatgcgatggtaccaagtagaaggcatggaatggcttagggtaatgaattggaatttttaatacaagatactggttttatttctatagtagcctaatgatttgaggtaccacaacttgagtcatttctatcatgtttcactattatacatttgtatgtggatacttgctttctgatttctttaccctgaatttttagaagtagaaattaccttgttaatggcttccagcacttttatggctttgataaaggactttccagtgttgttataatttatggtgtgaatatatcagctttaacataattctcatctttgggtgtgattttttaaagagaagaaataaaatattgtaatcctgtagttgtttatatccaagtttaaatacagtatctattattttgtccagatgctt

SEQ ID NO: 6552 - DNA, 1699 bp, Homo sapiens
tcactgtggccttcacctcccaggctcatgtgagcctgctatctcacacgcctgagtagctcatgtgaacctcccatctcactccactgggtgagtagctggcactacgggtgcgtaccaccacaccagctaatttttgtattttttgtagagatgggatttctccatgttgctcaggttgatctcgaactactggactttagagatcggcttgccttggcttcccaaagtgttgagattataggtgtgagccattgtgctgggcctgactttgtttttttgtttgtttttttttcattttctcccataatagttcaatgatttgttagaattgcttggcttattttgctatagaaaaatagaaataaaattttttaaaattatattttttccctcagaatgatttatattttctaaatagtcaatatttacattttgttcttaagtctgataaaaatcaatataaaatttttcagatccctacaatgttatatcatggaacccaggaggaacgtcaaaaattggtaagaaatatttacaaacggaaagggactttgcagattcatcctgtggtaatcacgtcatttgaaatagccatgagagaccgaaatgcgttacaggtacaaatgatcttcattggtttctttgtaatacataaaacatgcttttcttcatttatatcactttctcaccatctgggagcatttgtctaatttttttttgttgtcgaaataatagattatattgtgcatatacctgtagaagctggaaacttttattaacagaatgattgggatgaaggccatcatttgtaacaatataattaaagcttatggcagtttaacctatggcttagaatcatccagaaatagacctaatctcggaatgtattacagatatatttgtgacaggtactttgaatatatggaatttacttatcgtattttaatcaaataagagtatttgaagacaagttatttttagagtatcttattggactatttggtagcattttcgtttctattttcttgatgttctagctacttatttaaataatttccagttagcataacagaattgaaagattgaccttttttctttcatgccttctgttttcatttattggtgttttgaacttcttcctcactgctctacctcattcatttataattcttgactgctttttttttcctttctctggccatgtgagaaccctcttagtgcagtccccttaggtttatcttgcttgcttggaaataggaaagtatttaatggtttcaacataaaatcaaaacacataagtcataaatagaataattatgacttgcataattatgaccagtattgtcaggttttatgtgtctgctggtaaaactttggaatatgatttgcagaaatctcagttcaggagtttagcaaagtttatgaatgtgtacagcattaaaaagtatttaaaccaggccgggcatgaaggcttatgccagtaattccagcacttgggagtctgaggtgggcagatcccttgaggccaggagttccagaccagcctggccaacatgacgaaaccctgtctccactaaaaatacaaaaattaggccggacgcggtggctcacgcctgtaatcccagcactttgggaggccgaggcgggtggatcatgaggtcaggatatcgagaccatcctggctaacaaggtgaaa

SEQ ID NO: 6553 - DNA, 1392 bp, Homo sapiens
tttttggtttaacatattgccaggaaaataaatcctttcttggttattttaataaagaagatacagtactataaacttttttcattcttttgggatgtataaagcaaaatgcaaaacgttctctatactctttcctcaatttgtcagtcccattttttaaggatagttatatttttcagattgttatttatatttccagaaatacttcatatttctgtatgttaatataaattagattaattataaattttcctgattaagatatatgagaaatcacagatattaaaatgagaaagttaaaacaatttccttgataactttatgaaagtgagtgggtgactttctgtgaaaatataaattgcttaaataagggaaaattctagtgctatttgatgtttcagcacatatggaactaataaaagctcaatttttagtagtctagtgtaacattaatatcaaaacttgggaaaatattagaaaagaaagctacaactgcgttgactaaggtgtgaatagggaaatcttaaattcaaaataggtggagttcaaactttattgcatattttagtaggtctcttccaggaacagaaatatctatcagttttaggaatccttgtaagtggatcaaatgaaaacatgatcatttcagtagttactgaaattacatttgataaaattcaacatccatccctcataatagaggttttatttttagaattcttgttagaaaaattgtgagatcattgtttaaaaatctttttcctcaattcgttttctagcattgctattggaaatacttaatagtagatgaaggacacaggattaagaatatgaagtgccgtctaatcagggagttaaaacgattcaatgctgataacaaacttcttttgactggtactcccttgcaaaacaatttatcagaactttggtcattgctaaactttttgttgccagatgtatttgatgacttgaaaaggtgggtaagccagttatttaatgatttaacctcaaaaatctgtgctgttagttaaaattactttcttttcagtgactgaattaaaatgccaaatatttggcaagttctttgtggtgtatattgtatgttctactcctgccacaaattatgtgagagcagattaagaaaagattatttaaaacttacttgcattgattaaaggaagactgctgaatgcaactttaagataatatttttataataaggttcttttatgtgttacctttgtaaaacattttaagatggatttttcttactatatcctcattaaacaaccagggacaatagagttgttaaattatttcctatctcacataaaagaaaacctaggtgtaaagttgttacaagataagactagttagttagcaccagagcca

SEQ ID NO: 6554 - DNA, 1023 bp, Homo sapiens
ttctgaaactgctgaagatattattgctaaagaaagagaacagaatgtattgcatatgctgcaccaggttttccatgttttcttattctgcttaaccataggctcgatagagtataaaaggaactctggagatcacctgtctaaccctttgtagtagagatttgaaaaatgaagatcctcctacatttaaatgactcctttgtcctttcttctcccagaggtcacatggttttatgacagaactcaagtgcttacctaagttttgtccttttcagatagtatactcattttacccctaatggttactgataagtttgtcaagcacaaaacagaagtatgtggtttttatggaatgcttgccaataatacttttataatttacatccttgcatggctgctgtctaatctatttttattgcttcctgtaattcctaccccatcctacctatctttaatttagagaaacattatctttcaagggtaatctagtcatatgggcctgaaaagcttctcagttgtggtttagcaattttattcaaagtctttatcgttttttctgatattaaagtttatacatgttcatgagaaaaacgtgaagcaggagagaagtgaaaagtaaaaatatcacttcctcttaaaattgtatttcctagcagtgcatgtggaatgattatgttgtgttatatgacaatccaaactcttttctgtctttgtgtaaacacgtgtgttttatctatattttatgaagaaaaggactttaaaaataaaattgttccttaagatagtcttttaaacagttatcagaaaattattttccttttactacatgtagatttaaatcagtttttaatagctgcttattatcccattgtcttgttctactataattaataatatctatctcttcctcttttcaaaattttcaacaatataaacaaggttgtagtatctgtatttaaaactacacctttgcccatttctggctatttccttaggaaagaattcctagaatgtatgtgtcag

SEQ ID NO: 6555 - DNA, 1049 bp, Homo sapiens
ttgactattggtagttccttgtggccatattccaacatgtgttggaatatttatttattaatggtttataataactatatgttaaaaataagttaatgttgcaaataatttctttcccctcactttttgggataaactttgtttatggtatctttgtgtgtgttcatgtgcacaagcgtgtgtgtttatatttaaaattttctttttttcccactgtgactctgggcaatgacagaaatttcaatgcaccaatagttatagaagcttttaaatgtcccagtctgaattattggagtaaatgacttatttaggaagagatgtgtttggatatcacatcctcatcagtagtgtatacatccatatagtgtagcaaaggattaagtttctgttcttaggaaatttaattagagtcaagacaatgaatatttatagaatttgtcacttacacgttacctcacagtgtatacaggtagatagatattccttagaaatgatcatctgccttttgattgaacatttgtagtaattgtcatagttgataattccataagagggctcactggaattgttttactatagataacttcagatttccattaatattaagatatgataatgaacttttattatatccaaattcaacagttttatcaaaaataggggcagttttgaatgttctagcaataagaatattctctgtaatactgtgcttaaatttgagtttatattacttttacgctttgtcctaattatgttttaatgcattactacaggaaaaagttttcattcaaaatgaattcagattaggtggagatagttttaaatcgctagtatattttcttaactattttctatatgaaagaattcctttcctttttttatgcaatgtttacataaaccttgcatagtaaaaaaaattttttttactttccgtttaaagttctctaagcttgctacttttctatttccaccccatattgaaggccaaaagcagtataacctttacaaattaattatttaaaattttttattttaaaattatgcgtaca

SEQ ID NO: 6556 - DNA, 1075 bp, Homo sapiens
tgtttactatctttggtaatagtctgtctatgattagctctatacctgttgggtatttaagtccagagtcctgaaaatgagctttattatatatgattactatatgtaaaccattgtcagtatttaatggcaggggtataaagagtatacaattatttgtttattattattagtagtagtagtagtattttttttgagtcaacgtctctgtcgcccaggctagggtgcagtggcaagatcttggctcactgcaacctctgtctcccaagttcaagccattctcctgcctcagccttccgagtagctgggattctgtaatcccgccaccacgcctgactaaatttttttgtttttttagtagagacgggatttcaccatgttggccaggctagtctcaaacttctgacctcaggtgatctgctcgcctcggcttcccaaactgctgggattacaggtgtgagctactgcgtccgacctagagtatacaatgattttaatctagtatttgtgctcttttagtgacccgaatattttaatgcataattattgtctgttgcttctgtgttctctttataaatgtgataatcatttgtaaccaccccagctaatgaaagagaataattttaagcctgaaactttagaacttatagaaggaaacttgtatgtctgcatccctaggtcagctggctttttactgagtcttaaaacctcattctattaaaaaatttttaatttttaaaaaaacttttagttttttgggtacatagtagatgtatatatttatgaggtatatgttttgatattgatacagaaatgcaatgcataataatcatatcatggagaatggggtatccatcccttcaagcatttgttaccctttgtgttacaaatgatccagttatacacttttgtgtgtgtgtgtgtgtggagacagagtcttgctctgtcacccaggctggagtgcagtggcacaatcctggttcactgcaacctctgccttccaggttcaaacaattctcctgcctcagcctcttgagtagctgggattacaggtacccgccagcacacccagcta

SEQ ID NO: 6557 - DNA, 1036 bp, Homo sapiens
cctatcactttgggaggctgaggcaggtggattgcctgagctcaggagttagagaccagcctgggcaacacggtgaaaccctgtctctactaaaatagaaaaaattagcggggcatggaggcatgtgcctataatcccagctactcagaaggctgaggcaggagaattgctagaacctggcaggtggaggttgcagtgaatggagattgtgccactgcactccagcctgggtgacagagcgagactctgtctcttaaaaaaaaaaaaaaaaatcccagaatgactttttgtaaaacagactgttgttaaaatttatatgagagagtaataaagggccagaaccaagacagttttgaagcacaagatattctataccaggtataaagtcttattaaaaatttaaaagtcataataatcaagatggtagaattagcacatggtgtgatatattggctagaagtacaatatggtgaatctagaaagacaactttcacgaaaagctaataaatgtgaaatggaacttcaaacaactgataggaaattcctattaatcaatagatgatctggggaaatagtaattaataggggaaaaattaacttagattctcctctcctcacactgcacttacaaacttcagataaattaacaatccacgtgttcaaaacctaaatattaaaggtagaattttaacctaaaaagacaagaaaatatatttatgattttagaattagaattctttataatacagaaatcacaaattatatgataggtttcatagattttaattacattaataggaaagactactataagacagatgacaccataaagagataagagacaaaccacaaataatatttgcaacatataacaggaagtgtttaggatatgcaagtaaataaaagttgataatgaaaacggataatataagagcaggctattaccaagagagaaagaaatgtctgatgaacagacaaggatgattagaaatcagtaatacaaatgaaaatcagatttcatttcacagctgtcatg

SEQ ID NO: 6558 - DNA, 1621 bp, Homo sapiens
tgtttctcaaggtaagctttttgtggtgtgttttcagctattaaacgaatcgtgattgggcctctttttaaaacgtttctgacaacatgattcaaattgatattatttattgctctttgacttgtttatcttaccttaaattcagcaaaagcgattttgactagcaaactgatgctttagattgtatgctcccaagagtctgattctagttgttgtattaagaatagtgtacctttttgctttcactgctattaaatcttggtgattaaggaagagagtgccctgtattactgtgagttttataattttggacagatgactcacttctcataacatcatattggatgtttcttttacgatttcttcttcttatacttctaaaatgtacctgttttaatgtttttcccttagatcaaatgaatgcttcaggaccaattaaagagaagatggggatattcaagatattagaaaattctgaagattccagtcctgaatgtttgttttaaagtggagctcaagaatagcttttaaaagttcttatttacatctagtgatttccctgtattgggtttgaaatactgattgtccacttcaccttttttattatatcagttgacatgtaactagtaccatgcgtacttaaatagatggtaattttctgagccttaccaagaacaaagaagtatccatattaagtttagattttcagttaatttttgagactgagtagtattcttggatacaggctgatgtgtacttaaccacttccagatttatacagtcttcctgtggaagtttagtaaatgtctttttccctcctttcttctagtaatgcagttcatgggctttaggtacttcagttatgaagtaggcttttcatggggagagattgggattatgctctctgttgtttaagaaactgtttgattttagagtctatttctatgagatagtttaccaaataaatgttccttataagatgatctcattaaattatttcttcaggaatagcttaggtgcaataatagcaaaagacttggctgtcggtaggatttggttattttgttttcttggtttcattcactagtactataggagtgtgtcatatagagatttcaagtggacattgtgttagcacaagagaagtttctgaatgaaactttagggtcttgagaaacgactagaaattggaaatggtagtgtatcatgcaaaacaagacagaccctgaaaatttatagtagtgggttaactagaaccaaatataagagaataggccttaggaatatgtaagtaatgcacaatctgtaatagaacagcataaaggccaaaagaggcacaatttagaccctgtgtgaaaggatatcagacaatgaggaagagaaatcctgaatgtaccctggagaggggacatactccataagccatacatttctgtgttagtgtttatttcatggaaaaatattgctgttgccatgtatattcaaatgcagatcagatgatctgttaaggataatggaaccgtcacttaagaaaaacttaattttttttccctgtgtcctattggcacaggtcttttcttttaaatttttattttaatcgttttgaggtacaggtgggttt

SEQ ID NO: 6559 - DNA, 3874 bp, Homo sapiens
aaagttgtcaccgttgcatctgtaaacctagcatctgtgcccatctgtccccatctgccctttattatatactgcggatatattgtttgtcgtagcttgagccaattgcaatgtctcatttcttttataacaaagctccttgaaaaagagttctattatagcaaaactccttgcctgtattcattgtttttagtttgttctgttttttctgaacccattccaatcagatattcatttccattggagctggtatttttaaggtctcgtgacgtcagtgacctcattttacttgatctattagcagcatttcatacagttgttgactcttctccattaaaacatttactttatttggcttctaggaaacatattttcctgctttttcttcctatttctctgactcttttctcagtttcctttgctgtttccttttctatcctctaaacattgaaatatcctaagcctagtttgggattcccttgatggtcttcatttctttaatgggaactgtgctggtgactcaaatttatatctccagccagaacctttctcctgaattccagattcacatatccgactgtttactaggtgcttgataactatatctgtacttttcatcttgtttaatccaaatttacttcttttgcattttccttagttcaataaatgacaactttattcttccagttatttaaaccaaaaatcttagagtcattcttctcttccttccctcatatttcatgtctgattctaaaggaaatcttgttgcctgtactttttctttctttcctttttttcccctttttttgagtctcgcactgtcgcccaggctggagtgcagtagtgcaatctcagctgactgcaatctctgtgtcccgggttcaagcgattctcctacctcagcctcctgagcagctggggttacaggtgcatgccaccatgcctggctaatttttatatttttagtagagactgggtttcaccatgttggtaaggctggtctccaactcctgaccttgtgatctgcccgccttggcctcccaaagtgctgggattgcaggcgtgagccaccacatctggctttttttttttttttttttataaacagtttcacttcgtcacctgggctgaagtacagtggtgtgatcttggctcactgcaacatctgccccccgggtttaagtgattctcattccttggcctcccgagtagctgggactagaagtgtgcgccaccacacctggctaattttcttatttttagtagaaacgtggtttcaccatgttggccaggctggtctcgaactcctcacctcaactgatcatctgcctcggactaagtgctgggattacaggcctgagccaatgcgcccagcctactttctataaaagtcgtcatgtctctgcccccaccccccgccaccccccacatagtctgtttcatttgattttccccttagtttagtgttttattttgatgtttcttcagatgccttgggatcatttactgttcctcatatttaagagcaaatgcttaaaaattcttagaaataccttcttgaaaagcctgcattcctaccacctctcaccacttcaacatgaaataatgatcccttacatctttttagtgtagttatataacttttgattggctcaataattacttttattatggctgtgtaagtattattaaagctttagataagccatggaatatgctgtgattttattttcattcttgtgcagctttttttttctccctgaagttaatacttaactgttttttacctaccagtaatttatatctaatcactctggaaatataagcccctcagtatattaaaacagatctcatgattcagtaataaacctccccctccaaatatatcccatcacctctactccctggaacattcttctagtttggactgtagaactgattccatctggaaccttcctttaccatactcctgggtattcctgttggctgtttcatgttttggaattactgtttactgtgtcttgtgtctccccccccccccctttttttttcctttaagacagagtttcactcttgttgcccaggctggagtgcaatggcttgatctcggctcactgcaacctctgtctcccaggtttaaactattctcctgcctcagcctcctgagtagctagaattacaagcgcccaccaccatgcccagctaatttttgtatttttagtagggacagggtttcaccatgttggccacgctggtctcgaactcctgacctcaggtgatccaccctcctcggcctcccaaagtgttggtactacaggtgtgagccactgcgcctggctggatctaactttttttcctccttggtttactcgctcactttgatggattatgttgtcttgtgttttcccaagaaaagaattcaagggaaatgaattttttgagaactcgcatatctggctgtatttttgttggattcttatatttgatggatagttctggtttgggattttagagtaggaattattatcttctcagaatttcgaaagttgttgtgttgtctcagaacttccagtgttgtgggagagaaaattaatggttccttttttttttttttttttttgagacagggtctcattctgtcacctaggcatgaatacagctcactgcagccttgacctcccgggctcaagtgatcctcctgcctcagccaccaatttagtttggaccacagccatgcaccaaatgccctgctaaatttttaattttttgtggagacagggtctcaccatgttgcccaggctggtcctgaactcctgggctccagcaattccccccggcttggcctcccaaagggctgggattacaggtgtgagctcctgcacctggcccgaatgctgctttgatttccagtctgttgaaggtggggggaaccagccttttgttaatgtgagcttccagtgtttctttgtcttttgtattctaaattaataacacagtgatgtgtcttggtatgggtcttttttttttttctttttttttttcatttttaaagagactcctgctatgttgcacagacttgtgaattcctggtttcaagttatctttccccctatgtcactcaagtaatgtggactacactcatgtgacaccatgcccatctttatgttgtgtatcttatttttgttttgttttactcttgaatcagctcagtctgaaaatctgtcttttaattcatggggattttttagaatgatttcttggagggttttgtcttttgaatgtgtggtcccttctctgcctagaatttttttgtttgaatgagacatggtcttgctgttgtccaggttggagagcagtggtgcaactatagctcactacattcttgaatttctgggctcaagccatcttcccatctcagctttcagaatatcttggctacaggcatgtgacactatgcccagataatttaaaaaaaaaaaaaaaatttcttgagacagggtcttgctatgttgcccaggctcgtcttgaattcctgttctcagagggtcctcctatgtttgcttcccaaagcattggtattatatgtatgagccaccaccactagcacttctgcctagaactcgtaacaaaatttctttcccccatctgcatagtcttgtttcattaaatgattcttccctttttaaagtttagtctgtcttttattttgatgcttcttcaaatgccttgggatcatttactgttcctcaaatttaagagctagaagaaatctctctaagctccatgcatgagggttctcaacaggtggattttactccagtgtgatttcactagaccatttatttgagggtcacccaattgtcagtatatgtat

SEQ ID NO: 6560 - DNA, 1031 bp, Homo sapiens
atatatctgagagaaattctctaatcacttgtcctgtgtgagtatatgtactttgccagttttcttttggggtgaggaggagggacagtgtattagagattttactgttcaaaatgtagacttcctcagttttcagtaaaatactctaccctgtctatatgtggattcccctattccagactgattcacccttttcagtgagttagtcgtgacatttcttacactgtgagggggagtggtaattactttacagggaggtatggggccatggtgtttgactcttctttcaaccacttctgggttttttagtgaaaacctctatctaacactgatactttcatttctgttgtctattgagtcagttaacactgatccatttatttttcagttcccaaaatcttgctttgccattgcttctattttattgtctgggggtgtttaacacctgtttcattttttacagtcatttagtttccagattttagtaagggacagaggggaatagatggactcatttcatgatgtagaaacaaatactccctgtcttgtcttacatgaaaaattattcttaaactaggccttatctttgagaacctgatcaaagtataaaaaatactttttggctttatttctttagtgagtcactattccatattttgaaggtgttaagaggtatggtaaaggtggtacttgaacatttccaagcaaacgtgtgatgaaatctttcatcaatgtcttagcaatggtatatgatttttttagtcttagcaattttagataagttttttttttgtcttgtttttttgagacggagtcttgctctgtcgcctaggctacagtgtagtggcgtgatctcggctcactgcagcctctgcctccgagcggggtccagcgattctcctgcatcagcctcctgggtagttgggattacaggtgcatgccaccacacccaactgatttttgtatttttagtagagacagggtttcaccatcttggcctgactggtcccgaactgatctcaggtgatctg

SEQ ID NO: 6561 - DNA, 1301 bp, Homo sapiens
cccaggctggagtgcagtggtgcgatcttggctcattgcaacttccacctcccaggttcaagcgattctcctgcctccatcttccgagtaggtggcattacaggcatgtgccaccacgcccggcgagttttgtatttttagtagagatgaggtttctccatgttggtcaggctagtctcgaactcctgacctcaggtgatccacccaccttggcctcccaaagtgctgggattacaggcatgagccactgcgcccagtatatatccaccactttaccatccacattagcatttcattagcttctctttgcccttttagttaataaccccatctcagggtgattcactttcataatccgtattaccatggattaattctgcatagcaaaaactatgataggtgtgttaagtaatgaagtttggggaatgttaataagatgatttctcttactgtagatgaaatacatcgtaagagaatccctcgtgagaccagatcagttacatgtatatcttgcctctcttaagtctctaccatttattactgtacttgagttaggatttggaagtgccactgaacactaaaattattctgtctgggtatttgaatggtgtgagacaaaaatccattttaatgttttatcaagttgagatgtctcacatgagtagttagtgctgagaatcagacacaggcacatttgggagcatggcgtggcaagaagctttgctttttcctgttcctattgtactcaaacttgtttctacatttttcattgatttctcttcgtactagcactagggcgcaagagaagccgtactggaatattacactactcagcacaagacaggtttaatctttttcttgggggacaagattggaaaattgaggtctgagcagacctgaagagaggcatccagcaactctgagattaaattcatcattgatcaattcgttattgtttggaattgacgtttagctgtgttcctcactcagatacgtgcatgatagctgcttgctaatttggtcttagctcacatttcacctagaatgtatggtctccctctcccctgcaaaatatcccactgttgctaatctgtctgcctcataatttccatgagattgagcatcttgtttgttttgtcaccactatataacagcatgttggaaacaaagcagtaataaagctagaaaaaccaagcgaatacactggattaaaaaaaatactgtttcctagaattaaagaaataaatgaggccgggcgcagtggtgcctgtaatcccagcagtttgggaggctgaggctag

SEQ ID NO: 6562 - DNA, 1585 bp, Homo sapiens
tcgaactcctgaactcaggtgatctgcctgcctcggcctcacaaagtgctgtgattacagggtgtgagccactgcacctggccgataacagatgttttaatagtaagataaaaagtaaaatttccagtgtgtcgaaggaagaaaattacagcctagaattttatcttcatgtacattatttaagtgtgagggaatagtttcagtgacattatgtcattgaagaccttagaagatttccctcgctaaaggagataaagcgactggcacaacatgtatttctctgagtaattagaagtgttcttttctggctgtactgaagggactttcatgatttcttcgtttttgtactcttagttttataatattgcatagtagctaaggcctggctgtagcagttataaactgttctgcaagtgcgggaagtaatagttattcctatctcaaggatgtggggtttaaatgggttagtgcacaaaaggacatttattaaatttagtcataatcatctcaaggacatggtaagtgaaagagtgtacataaagtacttaatgtaatgtttgctacttaatgttcaataactcaaagagaccaccaccactactacattttacttttattagtaattaataataattaataattagtaattcagtggtaattagtatactaccaaagaaagtacttgagcagaagagccaaaattcaaaccatagaatcattttactgtgcttttattctacctcaaacactaatctccaggccttggataaagggattatttctctgaaggggaaagttatcctctttttgcccaagtcacacttgtgtcatttcttatactgtaaacatgtggttccaattctgaggtattttcccggtttgtaggacccaaaaagaagttaggcttgagaaattttaagtgaagagaacaattctagttcagagtgattggctcttcctaaaagctgacatttgactgaaaattttgaggggagggaaagaaacaataccttttacggcatgtaataggaagaagacctggattttagttgctgctctgatgtcccaacttgggtaaggcaacataacataaatgtcagtttcttcagatttgtgatgaagctgataatccatgctcagcttcctttatgggtctcttgcctatcaaataaggtacagtatgtgaagatacattgcagattatcttatgcattgcttcaggggatgattaaaccatcctttattatagccagagtctagtctaagggaagaaggtcattctctataccagtgaaggctccatccaaaccagtgtttgggggcatagtcataattgaaaaatgattgttttccttatctgtaagacaggtaaatggtattaatcctcaggtggttgtgaggattaagtgatacatgtaaaaaaaagaaagctttggatagtacctattataagaaactcagtgttgctgcaatgtatgtattataatggatttgaaatttgccctaaccaagagtcacagacagaaaaaaggaagttaatgtatctcttgatcactatcaagatgtggtattgaaccttcaagat

SEQ ID NO: 6563 - DNA, 1036 bp, Homo sapiens
gggtttgtcaaagtttaaatgtgtcatgccagactcagaagcagccaaaaacactgctgatctttttttctcttctagagatcctctatgtggaccaagcctgcctgatctacacacacacacacatatgcacacgcacacgttcaaacttattcaaatcctttatatcatttcttatgtgaactgcttaattttgagggaggttttaaaaatattttatcatgattatggatttataaaatttttattttgtcagttttttgctttttgtatgttgaagtcatgctgtcagatgctttaaggcacataattgttatataatttaattgacaaaacaatctctagccatagttctctcaggccttgttaatgttattcattttaatttgcttaatagtagtattgttatcccattttcactttgttagtttttatcagaaatatattttttcatttcttaattttcagtactttagttacatctgttataaacagcattattttagttttaacaagaagatttatagatttctcatgacttatattttcagttttgtggctcaggttttccttttgttggagttctatgagatttttttcttcatctcctctattcattgctattatcaactaagatgattttgattgggagagcctcaactcaggctggtttaaaaaatagggaaatttcagcacttactctaggcagggataataaaataaaaacaatagggtcggtggctcatgcctgtaataccagcacttcgggaggccgagtcgggtgggtcacttgaggtcaggagttcaaaaccagcctggccaacatggtgaaaccccatccctactaaaaatacaaaaattagtccaggcacggtggcggtaatcccagcactttgggaggccgaagtgggtggatcatctgaggtcaggagttcaagatcaacctggccaacatggtgaaatcctgtctctactaaaaataaaaaaattaactgggcgtggtggtgggcacctatagtcccagctatttgggaag

SEQ ID NO: 6564 - DNA, 1058 bp, Homo sapiens
agggctccaccgaaagggcatgcagggaaaacttttaaacggtgcatgcggaagcaaggcaaagaaaacattgattgactagaatggagcagtagccttaaagttcctagttagagattagttggcagtttctgattggtaaaactaaagttacagtttccttggataggaccattcacactgaattgggtttggtttgcttacataggaactcagggccctagagctgcttcagtctaatagcctcccaattaattattttaacaatgttataggtgatatccaacttacagattttaatccaacttacagatttttaatttaatgtgtaatcaatatttgaaaattcaatgtgtaatcacatatttggaacttgaaatgacaaaacaactcatatttttaaagagttatattatttagaggacaagctaagtagctgtaacaaaaagattcaaagtaaagtgttttcattaagatagaagtttcctttttctctaatgtaacaaatcagcagtcggggctgataggagagttttgccatctccaatatgtggtttccatccgtaagtccaatggcaaagctgtagttttccatttgctagcaaaagggaagtggggaagaaagaaccaaaggattttaggttgatcttttaggggagaagaccaggaaactgcatatcatatcatttccaccaaatgaatgtggaagaagtgtctaggttctactattagagttgggagaaaagactgtaatgagcaactaatagtttctgccacaagcacctagagtatttaactgcaaattttaaaatgcaaggtttttttttttaaatttatctttggctcctcaacagagcacctcttagatgcttaataaaaattattttaattaaatgtaaaggtaaacgcagactaaaaagtgatgtttatgtgcatgttattcactcaacacatgaattaaaacatgcctaaattggatttaatttcactacgagtagtaaaaactataaagagttacaaagtttgtcaaggtcaatccattgagtatcaggaaaagg

SEQ ID NO: 6565 - DNA, 1076 bp, Homo sapiens
tgtttttctgaaaacacctggtagggaaaacaggattctcttattaaaaatctttgtaggatgtatccattctagaaagcaagaaacaagaacatctataattgttcacatcagaagtggttaagagtaaggagaaaaatttggttttaaatgtcattcattatccctccacttaactttttcatttttgtattccagtcaagaaaagtatgttttaggcacttgtaatactaatatattggaaaaacaatgttaagtcattgccttgtggggatacgcctacagataggtcagactaaatgttgttccttttgacttaggagctgaagttgccctcctataaaggccagtcccctcagttaagtctcagacggtattttgctgacttgattgccattgtgagcaatcgcttcacactctgcccttctgcccgccatcttgctgtctatttactggacctgtttatggaccgctatgacatctctatccagcagctgcatttagttgcgctttcctgcctgcttctagcaagtaagtatgaatctgatttacatgactggaaatttctgatgtttatataataaaataaatttatgtagaactcagtgaaatatcatcaaatcccattcattccagttcactagtatcaagaagcttatgttaaaagtgcttctcagtgtaataattcttaaccagacattgaaaaatggctttggagcctgttaaaaacatgtgcctaagccgtacattctcggccactccagatctactaagacaaaatctacataatgggtactgggtattttttaactttttgaaaaagttccaaaggtgattttgatttacctttccaattgagaaccattgtcttaaagcagtggttctaaaccaggagcagttttgtcccacagggaacacttggcaacgtgtacagacgttttggttgtcacatctggtgataaagtgggagatgcttttttagcatctagtacatagaggcctgggatgctgctaaacatccggtagtgtacaggacagtttcccataacaaaattctctgtcccaaaacatcaatg

SEQ ID NO: 6566 - DNA, 1189 bp, Homo sapiens
gccaacaaatctatggtattataaggaaagctttggaaatgtagtggaaaatattgtacccatgtaaaaaaacatgttttttctaccctcaaaacacagatgtctcctactctttgtgttggataggtcctgggatctttgaaatgctaagattcttggataccacagtatcataaaattcctctaaatgcagtaagtatacacataagtatgaccgtaaattaggaataagattatttatgtaactgctgaaatagctgacatagactataccaccttacagtattgctttaattatcataataaccgtgttcttccctgaacttcaccagcaaatggatttctgttcagggccatttttttacaaaggcatgaatttttattttgtcagaaaataatgtacattgagtagagagcagtagagctgagttgaggtaccacgttatcgtttatgtcattaagtaactttttcctatataatatttgtttgacttcctaccacgagattcacatgggtactgtgttattcctgaagagataaagtaattctgaatgctaagaattttcctaaaggttgagcatcccaaatctaaaagcctgaaatctaaaatactccaaaatctgaaactttttgagtgctgacatgaagctcaaaggcaatcatcactggaacattttggattttggatattcagccagtaagtaatgcaaatattccaaaatccacaaaaatctgaaatctgaaacacttctggttccaagcttttttgttttgttttgttttgtttttttgagacggagtctcactctgccacccaggctggagtgcagtggcgcgatctcggctcactacaacctctgcctcccaggtgcaagcaattcttctgcctcagcctcccgagtagctgggactataggcgcatgccaccatggctggctaattttttttttatttttagtggagacgaggcttcgccatgttggccaggctggtctagaactcctgaccttgagtgatctgtctgctttggcctcccaaagtgctgggattacaggggtgagccactgctcccggcctacttccaagcattttggttaaggaatattcagtttgtactatttgacccagactactcagaaaaagtaatgtaatgaagaatgaaagctgtagttgtagtgaagtaaatag

SEQ ID NO: 6567 - DNA, 1108 bp, Homo sapiens
ctttatcttaaaactccttgaaagagttgtctgcactgcatcactacttcctctcttcccattttgccttacatccaagcttgtcagcctttctcctctaaaactccactgaaactgttctaatccatggtaccagtgatcttcacattaagtctagttagtcatcttcttacttgacagagttgttcaatcccttatccagtaaacattttcttcattttgctttgaggataccacattcttgatttaccttaactcttattggtcatttcttttctgtctcacttgctggttctttttaatctctttctgttggatgtgttatagaatcttgaggctcaggccttggactgctctttttgtttattccccctggtgatttcatcctgctccaagtacttgaaagtacatatgtacatatacacacaccgataactccccaaatttcatcatccacctagccctctgtattctatatccagccacacagtccacatttcctcttggatgtcaaatagacatctcagatattacatgcctaaaatggaacttttgataaactttcctattactttaacaatcttttatatctcggtgaatagcaactcagttctttccaatgctgtcagaacttctagagttatccttgacatgtctctttctttcagagaaagcatatcaggatatcttgtaggtgctagcttcaaaatatattcaatctgaccatgcctcattgtctcagccaaaccaccatcaactcttacttggataattgtactgtgtagtctttgtctttactcttaatccctcctgaatactctgttcttagcatagcagcccaagtgatagaagtaattcgactcatggtaattctctgcccacaatgctccagtagcttcctctctgattcagaataaaaccaaagcctttacagtttctatcagggcctgtttctgtccccttgttacttctctgacctcatcttctagctttccctctaatgctttctgttgtggtcatactgattttcttgctgttccccaaatgtgttaggcacattgcacactcagggtcatgtcactaacttttgttttcttggattgttggc

SEQ ID NO: 6568 - DNA, 1613 bp, Homo sapiens
cctgccttcttttcttttttttcttttcttttctcttaacaaagcagtgagttaaaacctgactgttggattgtagagccttcaattagtgtctagttcattctcctagaaagacaagtgctctgcttggctagtcattctgaaatcatctgtaagccccatcttagtttaagaatagccatcagataattcttctcagccttttctcctggtttcctgacagttccagttactttttcagcttttcttcttttagggccctaaaaacccttcatgaggccttcatcttgtgttaccttttctttgtaatactaaagttttatgacaaacatcccattctggattcacattttactgtattagtcatggcatgtaaaacaattcaataattggtacccttctgattaatttattatagatctcttaatatgtaattcaacttttaatgattccctcagtaaaggatttctaaaacagtaaagtttgtaggtatttagattaattgaagtttaaagctgagacctttggatagacattatggatgaggagcttaatgtgatttatactatgttttgtttagcttatctgattttgtctattcatacatatatatatatataaagcacaaaattaaaaacatgtaatttttctaataatacagtttgatatattaatgactgaaccttcagtattcagattcctgtctcaacaatatattgttatgtcccatacgtggtaatcacatagagtaatagtggtagctgtgatttatatggcactttaaaggatatttttacatatattttctcattttatcttcacaacaaccttgtgaaagacataggggaagtactaatttttccccccattttacagatgaaggaactgagacacagaggttgagacttgtctaaagtaacatgaccagtaagtgcttgaattaatgcaggtaggtagtgatgggtatgttctaatctgccaagggcttttccttgctgtcatctggcttgagttctgaggatataaattcatatagccaaaatggtagggaaccagaaaggtaatgagtagatggactttaggactacactagggaaatggtgctgctgttctttttaatttcttcctttttgttctttttgtttggtttctaacttgttagtaatgataagcagataccgtctttggttgtttccgttagatgaatgaagcttttgttttaattgtagattatccctgaggaactaaggaaatagaaaatctggagagaagtctgttgggattctcacagggaatagctattagatcaactaagcaaatgaaaaagttaatagtatatggataaaccacatgtgtgtaattggaacttcttaggattctaagatttttaaaatcttgtttaaaaactgtattatcaccttaatataaaaatcttagcgcttgagcgtacttacccaactgtggttttctttagatgaggaaactgaggtccagagaagttgaagttttcccaaggtcacacagcagagctggaactagagcttgcatttcctgacttccagattagtgttatttttacttcaaactattacttcttggtaagctgttcttaa

SEQ ID NO: 6569 - DNA, 1028 bp, Homo sapiens
aaagtgtaagttctccacccaggatgttggcacatttgttcagcacattcatagacataatgaaattcattataagtgtggtaaatgtcatcatgtatgttttaccaaaggagagcttcagaagcaccttcatattcattctggtacttttcccttcacttgtcaatattgtagctatggtgccaccaggagagaacaccttgtaagacatgttataactttgcacaaagaacatttatatgcaaaagaaaaactggaaaaagacaaatatgaaaaaagaatggcaaagacttctgcaggacttaagctaatactgaaaagatataaaataggtgcatcaaggaagacgttctggaaacgtaagaaaattaacagtggaagtgacagaagtatagaaaagaacactcaagtgcttaagaaaatgaacaaaacacagactaaatctgaagaccagagccatgttgttcaagagcatttaagtgaagaaaaggatgaaagactacactgtgagaataatgataaagcccctgaatcagagtcagagaagccaactcctctgtccactgggcaaggtaatagagctgaagagggaccaaacgctagttcaggtttcatgaagactgctgtactaggacctacactgaaaaatgtaatgatgaaaaataataaactagcagtttcccctaactataatgctacgtttatgggcttcaagatgatggatggaaaacagcatattgtattaaaattggtgcctatcaaacaaaatgtatgttcaccaggctcacagtcaggtgctgcaaaggacggtactgctaatttgcagccccagactttggacactaatggatttttaacaggagtaacaactgagttaaatgacacagtttatatgaaagcagctactccattttcatgttcatcttctatactttcagggaaagcaagttcagaaaaagaaatgactttgatatctcaaaggaataatatgcttcaaacaatggattatgagaaaagtgtatcttctt

SEQ ID NO: 6570 - DNA, 3360 bp, Homo sapiens
ggaactctacaaaaatgacacagattcttttttttttttttttgagacggagtctcgctctgtcgcctaggctggagtgcagtggcaccatttcagctcactgcaagttccgcctcctgggttcaagccattctcctgcctcagcctccgagtagctgggactacaggtgcccgccaccacgctcggctaattttttgtctttttagtagagacggggtttcaccgtgttagccaggatggtcttgatctgctgacctcgtgatctgcccgccttggcctcccaaagtgctgggattacaggcatgagccactgcgtccctctatgtatgcccaggctggagtgcagtggcgtgatcttggctcactgcaacctccacctcccaggtttaagaaattctgtgcctcagcctcccaaatagctgggattacaggctcgtgccaccacgcccagctaatttttttgtatttttagtagagatgagggttcagcatcttggccaggctggtcttgaactcctgacctcgtgatccaccacctcggcctcccaaagtgctgggattacaggcgtgagccaccgtgcccggccgacagattcttttttaaaccacctttacagggacaatattatcatccacaagagtattatcttctaagcaagctcatttggaggttatgccttccattgctgttacagacctatttttggaatacctttaggattgacagattatcatccttggaagttggagttggtatttggaaagagtcaaaaagtatttgctgtgaaatgtggcaattaaaggtatatgttaaataatgggattggctttcttccctggcttgcagtctagctcggaaagctcagtagaggggcttgatttgtttcgatgtgcctctgaacctctctcttaattcatatttcccgtaagtctgtccatctgttgtgtggaatctcagtttgtgatattggatagatgcaaataagcaaagctgttacttttcatagtttcaaatgaaaaactcaacatcactactgtataaattattttctagtctatctgtgtttatttttaaattccttttactattctatacacttgcacattgctctgggggtaaaaatccaatataaaccattagctcattttattgaccattcttgtattcagcaagtatcccaagtacagtggtccataccttgaattttttttcactttttaagtgagatataatttacataccataacaacttagtgggtttcagttatttcaaatacaaggttgtacatatatcatcactgtctaattccagaacattttatttttattttttctcagcagtggggtcctgccatgttgcccaggctggtcttgaactcctgggctcaagtgatcctcctgcctcagtctcccaaagtcctgggattacaggtgtgcgccaccacacccaccctcaaaacatttttatttcctaaaaaagaaaccccacatccataggcagttccacattccgttcttcctatgatccagctcttggcagctactataatttgttttctgtttctgtggatttgtctattctggacatagcatgtaattggagtcatacaatatatggctttttgtgcctggcttctttcacttagcataatgtttttaagattcattcatgttgtagcattatcagcactttgtttcttttatggctaaataacactgcattgtgtggacataccacattttgtttatccgttaatcagttgatggatatttgggttgtttccacttcggggctattatggatgatgcttctctgaatatttgtgtacaagtttttgtgtggacatttgtttttagttcacttgagtatgtacctaggatggaattactgggtcatgtggtaactgttttaatttcgtaggaactgccaaattgtttcctaaagtggctacggtattttacattcccatcagtactgtatgacagttccgtttatccacatccactccaacacttgttgttatctgttttgattatataatagctattttagtgggtatgaagtcgtatttcaaaaaaacaagaaataaatacaaaaaaataagacaagttatatttcattgtggttttgatttgcattttcctaacagtgtgttaagcatcttttcatgtgcttgttggccatttgcatacctttggagatacatttattcagatcccttgcccatttttaaaattgggttattatttattgttgaattgtaagaattgtgtatatattctggatatacttacagtgtatgctttgcagatattttttctcatactccccatttaagaacaaatacagatcaatacatgaccagatacactgtaacaaaagctaaactgcaggataccttatgaagagaataaggagcgtagtaatagaacgaaatagaattctcaagaaaagccaggtgcggtgtctcacacctgtaatcccagtactatgggattacaactccatttgcaagagtttggatagagaaggacacctttgctctatattgccctgtcacaaatgttttgaatgaatctgttccatttctgagtttagtgagaatttgggtagtgagaggaatctcactagcagtatttttgaaatttaagattacattttttttgtttgcattttataaaaacccagacatctgacaagttatacaatatattttttcttgctttttttttttgagacgaagtctggctctgttgcccaggttggactgcagtggcgtgatcatggcttattgcaacctctgtcttccaggttcaagtaattctcctgcctcagcctccctagttgctggtattacaggcgggtggcaccatacccagctaatttttttgtagttttaggaaagacagggtttcacccttttggccaggctggtctcaaactcctgacgttccgcctctcttggcctcccagagtgctgggattacaggtgtgagccaccacccctggtttatattttgtttcctggtgctaagttaaatatactgtttttaaagtgtttgtttgaatttcgttgattcttggtttctctgatttttgaattggttaggtttggtctgttacaaagtgtcaggtataatgatgtcttaaggatgaaactaagtatcttatggggtagatggccgaatttaagaatcttttgcttaatggattgtgagggtcaagttaggaaagctgtgtagtaatgagtggcatcttctaatgatttttggtcttctttttattcctttgtttcatgttttaatctactttttgataaagagagttgtagattcttttagcatatcacttaatcat

SEQ ID NO: 6571 - DNA, 1145 bp, Homo sapiens
acagatgtactagaattggtgatgcgaatctaagattttctgacttcagagtgtaattgcattcatatgattgtaatcatttaaatggtgtctttaattttctccctaagttattcccccattattttggggaaaaattatatgtgtgttttatcatacctttcctactgaatatcttgttttagccctcccaggatcctttctctcctcctcttatggcagtagcatcttgattttcttttagggagtcaccttttctgccattcttgagttccatatgatttggatgaggctgacttacccctgggactgatgtctggccattggtcacagtgagtgagtggttcagggatccttctgagatttggttggtggagttcttgggaaagagatttcttttctctagggtagctaagctaatagcctaaagtgggaagcagctaccatggggggagagcttgcctgtgagtgatgctatatgcatttgtgtgagacatacagaatgatggatgagaattatttctgtgtacttggatccagctgtgcatgctctaaaaaaacttactcgagccgataattaccttttttgctcaagcccatttaagttgggtttttattacctggaaccaaaagttttgactgacgctgtttttttttgttttttgtttgtttgtttgtttgtttttgagatggagtttcgctcttgttgcccaggctggagtgcaatgacgcgatcttggctcattgcaacctctgcctcccagattcaagcaattctcctgcctcagcctccctagtaactgggattacaggcgcccaccaccatacttggctaatgttttatatttttagtagagacggggtttcaccatgttggccaggctggtctccgactcctgaatttaggtaatccacctgcctcggcctcccaaagtgctgggattacaggcatgagccacagtgcctggcctgtctaatgcttttgttttgttttgagacggagtctcactccattgcccaggctggagtgcaatggtgcgatcttgcctcaccgcaacctctgccttccgggttcaagcgattctcctgcctcagcctcccgagtagctgggattacaggcatgcaccaccatgcccggctaatt

SEQ ID NO: 6572 - DNA, 1069 bp, Homo sapiens
tttgggaggccaaggcgggaaggcgggaggatgacttgagcccaggagttcaagactagcctggataacatagcaaaacctcatctctattttatatgtatagatatatatttaatctacttaatatgtaaaaatcatacaatatgtttatgtataaatatatataaattttagaatattttgtctgttttttcaagatagcctactggaattttaacaacgatgatgttgaatatattaatttttttttctttttttgagttggagtctctctcttgttgctcaggctagagtacaatggcatgatcttggctcactgcaacctccgcctcccgggttcaggcggttctcctgcctcagcctcccgagtagctgggattacaggcatgcaccaccgtgcctggctaattttgtatttttagtagagacggagtttctccatgtttgtcaggctggtctcgaactcccgacctcaggtgatccacccgcctcggcctcccaaagtgctgggattacaggcgtgagccaccgcaccgggccgaatatatcaatttaatggggatggatgtcctaataatattgagttttccagtatgccataaggagtgattacttttttcttttcttttcttttcttttttttttttttgagatggagtcttgcactgttgttcaggctggagtgcagtggcatgatctcagctcattgcaacctccgccttccaggttcaagtgattctcctgcctcagcttcccgagtagctgggattacaggcgcatgccaccacccccggctaattttttgtatttttagtagagacggggtttcactgtgttagccaggctggtctcaaactcctgaactcgtgatgcacctgcctcggcctccgaaagtgctgggattacaggcgtgagccactcttcctggtcggagtggttactttttaaaagtcatcaaattcttaagataaaggactgaaattacagtgtagttttaggtcactgtcagaaaaacctagtctaacctttcgtatcagatcagattcccccagcagtattatactattct

SEQ ID NO: 6573 - DNA, 1052 bp, Homo sapiens
aagcttattccaagccatctccacacagagtttgtggctaatgagtacttccgtagctttaaaaatcatagttattttcacaatataaaaaacagtaagactgttagtgctggtagaagagtcgtagaaattatatctcatggtgctcttaggcaagattttatgagaccttctgaaatgtaatggttatctaagttggagactatatattaatactgcatctttttgttttgttttgtgttttttttgcgacagactctcacctcactctgtcgcccaggctggagtgcagtgcgcgacgttggcgcactgcaacctctgcttcctgggttcaagcttttctcatgcctcagcctcctgagtgtgctaggattacaggcgtgcgccaccatgcccagctaatctttgtgtatttagtagaggcggggtttcgccatattggccaggctggtgttgaactcctagcctcaagtaatctgcccacctcggcctcccaaagtgctgggattacaggtgtgagccaccgtgcccggccgatactgtatctttatgattctgtttgcatgtctggcatgttacaagaagtattggtttgggatttgtggattaagggtgtttcatatattcccctatttaatgttgcttcagttgcttcactgttgatactgaaaatccttaaggatctggctggtcttttgcattcaggtattggttttgctctatttggtttaaactgatattgccccaaaaggcagtgtagctttttagtacacactcctctttaataatgtcagtgacctttagagctgtcagtttgaaataatgtaactttgcaaagtgttttatatcattggttttccctggagggcatagtgagactacaaacgtgatgataatggtggccttctagcattgagaaaatatattttaaggccatcttgtttaggttatctatattccttgttttttgttttgttttgttttgttttgggaagagtctcactctgtcatccaggctggagtgcagtagtgcagtcttggctcactgcaac

SEQ ID NO: 6574 - DNA, 1033 bp, Homo sapiens
tcctcctctgttgatttctccatactacagtggtacatttattatagttgatgaacctacgatgacacgtcattatcatccaaagtccataatttatattaggtttcactattggtgttgtatattctatgggttttgacacgtgttgaccattgtagtgatgtacagaatagtttaactgcttaaaaatcctctgtgctctgcctgtttatccctcctcttgcctaactctggcaaccactggtctttctactgtctccatagttttgtcttttccagaattttccatagttggaatcctatagtatgtagccttttcagcttggcttctttcacttagtaatacacttctttaatgcgtattactccatgtctctttatggcttgatagttcatttctttttagcagtgtctagatgtatcgtttatccattcacttactaccaggcatcttagttgcttcaagttttgacagttataaataaagccactataaaatttgtgttcaggtttttcttttgttgttgttgttgagacagaatctcatgttgttgttcaggctggagtgcagtggcacgatcttggctcgctgcaaccctcacctcctgggttcaagcaattctgcctcagcctcctgagtagctgggattacaggcgcgtgccaccacccccagctaatttttgtatttttagtagagatggggtttcaccatgttggtcacactggtcttgaactccaacctcaggtgatctgcctgcctcggcctcccaaagtgctgggattacaggcatgagccactgccccagcctgtgtgcaggtttttatgtggacatgttttcattttatttgagtaattaccaagaagtgcaattgctgtatcatatgataagagtatgtttaattttgtaagaaactaacagtcttccaaagtggttgtacaatttcgcatttctgagagttctgttgccccatgttttcaccagcatttggtgttgtccgtgttctggattttggccatctgatagttgcatg

SEQ ID NO: 6575 - DNA, 1028 bp, Homo sapiens
tcacaaggtcaggagttctagaccagcctggccaatatggcgaaacccggtctctactaaaaatacaaaaactaactgggcatggtggtgggcatctgtagtcccagctactcgggaggctgaggcaggagaattgcttgaaccctggaggtggaggttgcagtaagccaagatcgcgccactacactccagcctgggtgacagagcaagactctgtttcaaaaaaaaaaaaaaaagaaattgtccaaggttatagagcttttaaaagagaatcagatatttgaacccaggtgacctggcttcgtaattcatattcttaaccactacatctcttacttcctagagttgtagtactccttctattacactacaacagtgaatgtaaaattcagttggatacataaaatgtgcattcatgttgaaaatgaaggaaaaataaagtgaaagatactgggaatcatttgggaggaaagataacagctggaagggacttttgaactatggccttgaagaccacgtaggatcaagactattgatatttgagagaattttatttatttattttttgtaatggagtctcgctctgtcacccaggctggagtgcggtggcatgatctcagctcactgcaacctccgcctcctgggtccacaccattctcctgtgtcagcctcccgagcagctgggactacaggcacatgccaccacgcccagctaaaatttgcatttttagtagaggtgggatttcaccatgtctcaatttcttgaccacgtgatccgaccaccttggcctcccaaagtgctgggattataggcatgagccaccgcatccggcctgagagtacattttagaaggagcaaggtgaagagagggatcaagacaaagaaaatcaaggcctacttgagaagcagattgttattgaaaggcattgaaaaggagtgttgaaaaggttcacttttggaagaatttgaaagccagactaagcagtttgaattttattatgcaggcagtagctaatcattgaacctt

SEQ ID NO: 6576 - DNA, 1025 bp, Homo sapiens
attgtcagtggaaagctatcaaatgtttttaaaacctagaaaggatgatgtttagcagcagcatgaagggtggattctggtggtagagatggtggtgtgggagaatactaagataaattaaaaattaagagatgttattaataggtggtgtgatgaaatgaaaagagcctgggctttagaatcacaggaatggttttaaatctagatattggcctttgcagtttggaacgaattagctgctttgattttcagggttgtttgttttgttttgttttacacattctgggtagtaatagtgcttgttttacagtattcctttgaatattttgttatgggcatgaagcacctgctatagtgcttgcctgataccaaataagggtgcagttaatgataactgtcattattatcaacatgagtgacatttattataattgttaagataagagatagtgaaaacctgaatttagggatggaaaagagagaacagattgggaggaatctttctgaagtaaaatgaataggactcaatgaccggaatacttggtgatttatggaaagaatagaattgtgactaaccgaggtctctatttaacctgaataacttggggggaaggtgttcgtgatgccattttcttagtaatgaatacagaatatagacgaaatctatgattgagatgaaggaaaggagtaaaatgattttgatttggtgggcatttttaggtatttaggagattttggtgataatatgaagtaggaaattagaaatttggtcttagggcaagagataaaggattggagagttataagtatctgcatagtagtgggaaagcatgttaattttgattccttgactagaattataaatatcttaacggcagggcatatttttaaacataacccctgtatccccacactgctgagctctatgtaaacacttgattaattcttattaaatgtgagatttaaaaaataatattcttgatggctttgtgaatagaaaaggtaatgcatagttattttgattt

SEQ ID NO: 6577 - DNA, 1081 bp, Homo sapiens
gtaaaagagaaagcctatatcatgtgaattgtcagatttacagtatttctttagttgtgttagacttaaagtgtttatattggaactctttgcagtcacttggagcatcttgtccgagaaggactagagtctggaaattaagtattttttttgttttgttttttggaaatgtattatatccgttggactgaggcttgcattttaaggctggcttaagattctaaaatagaaagaactatctggagaatatggtaatagccaataggtggcagcatagagcatggtactggatcttgagtttgagattggcatggtgagataatctaggtagtatttggaaaagcacttagaaatattgacctgatatttgggaagcagcagctatgcatacttttagctagttggattttcagtaaatactaactctgtagaatggataaagcaaatacattatttatatttacctttaaaaacacgtaggtgaaaaatacgaagtagcctctttgggaagtagaacagggattcacctagagattagtaaaaatttttgaactgcacttcaggatcgcgcagaagttagagaatgtaattgtaagggaaaggcaactaacatgttctgagcatctactatgtgccagttatttttacatgttcccttttttttttttttttttttttgagacagggtcttgctctgttgcccaggctggggtgcagtggtgtcatcttggctcactgcagcctctacctcctgggttcaagcgattctcatgccttagcctcctgagtagctggaactacaggcgtgcaccaacacgcccagctaagttttgtatttttagtagagacagggttttaccgtgttggccaggctggtcttgaacccctgacctcaagtgatccactcgcctcagcctcccagagtgctgggattacagcgtgagccaccacgccctgccactcctatttaatcttcaaaacaatcctataaagttgattaaaggcatcctagttttataaataaagaaaaggaaagggtcagagatgttcagttatgggcaaaattacatagctgggattt

SEQ ID NO: 6578 - DNA, 1947 bp, Homo sapiens
gcccagctaatttttttgtatttttagtagaggcggggtttcaccatgttggtcaggatggtctcaaactcctgacttcaggcaatccacccgcctcggcctcccaaagtgtgataacaggtgtgagccactgcacccggccttctttaacctttctttaagcttcaaatttttaaattaattttagccttataaagcaattgcaaaaattgtaaaaggaattcccgtatattctttaaccagattctccaaatgttagcatgttatgtaaccacagtacaattataagttcaggaaattaacaatgatacaatagtataatctgcaaacctttgcgaatttgccagttatcccactagtgtcctttatctggtccaagatccagtccaggattacagtctgactgatgttgtatcattcttcgtgcatcatgtcagaaagcacgtggtgatgtttactttgatcacttagttaaggtgctgtctgcctcttttctgtaagatcttcctttcttcctttcttccttccttccttccttccttccttccttccttcctttccttctttttcctttttgtagttaatggctacattgttgggggaggtactttgaggttttgtaaatatcttcttttttttaattatactagtttttcatgcactaattttagcatccattgatgaacattgcctgaaaaaaaattactgtggtgttgaccaaatgattttctatttccataatttcttctacatttatgagttggaattctactgtaaggaagaacttctcttttctccctatgttgttgttttaatatatcagtacgaattcatggattcttatttcattctgtggattataattcattacagtccttgtttacttagcagttcaaattatcctaggccatttagggccctttggagttggctgttgtgtcctttttgacatctttcttttttttaaagcactttttttttttcactttttggcattaaaagatgttccagtcttaacatgtactttccctgtcccggccctggatttctccaaaaaactctagttccttttaatcagagaactgtgtaagaattcaaggtgtcggtactaggtgtatgtactcttggtactagagtgtcattgctttgaaacatgtatgtttactaaaatacatgtgtagctatgttattttatatatcagtgaaaaaccatccactgagattttttgattacagatatgttgatagtatgaagagctaatccagtagtagtgagagggtcggggagagatgggaaggatgagaaattacttttagtagttaattcctaaaaacggactgcttcagtgatcagtctgttcttgtgtatggctgggatagagatggctgtttgtaaagtacagataacatggatgattcactaaggatgatgggagagtaggatgttataccaaaatataaaattagtttatgcacttaggtttaagactaaagtaagtttagtatttgattggcatattaggagagtgtttcaagaagttagaacttgaggttgggtgcagtggctcacacctgtaatcccagcactttggaaggcctcaggcaggcagatcacttggggccaggagtttgagaccagcctggccaacatggcaaaaccccatctctactgaaaatacaaaaattttagctgactgtggtggcccatgcctgtaattccagctacttgagaggcacgagaatcgtttgaacctaggagctggaggttgcagtgagccgagatcatgcctgggcgacacacacagactgtctggaaaaaaaaaaaaaagaagttagaacttgatctgtgtttttgaagaatatataagtctggatgagcagagatgaaagggcacatcctggttggaacagggcatttatttttggaagtaaccagtgatatggttg

SEQ ID NO: 6579 - DNA, 1054 bp, Homo sapiens
agacgtttggtatagattatttaggattaaaactgcttgatatgaatcagtgctcagtaagagattccatgaaatatcaaagagtttattttttgtctcccagttcgtagagttgtttgcaaaaaacacaggcaaggagaaatcattaattggtgactgctctgttcagttttatgtggtcagagtcaatgaatagactaatcatttggcaggtttattaaatgtgtggttctgtgtttggccagagaagataacagagaagtaaaagacctggtcccctcttggcttgtggaatattggggaaactatgagtggcaaaagcaattagacttgtaatctataaggagttttaaatcatccatgctgtgcatccagaaccagaattctcatatatgcagggaacattaaaagtaaaatcccatgctcattcccatatgtagtattttagagatagtagctaatacaagaaaatataagtactgtagcagtttgagaggtgcagtagatgacactggagttgcttaatctagaagttagaactcaaactgaactttaaaaggatctgtgtgtgttttagagtggttggtttggtaattgtttttaggatgtagtacagaaggatttacagcgagaaaattatgggagggtcttataataattcacaaaatgaaactgttctagagtcatggctgtgaagatgcataaggaagagatgtgcgtagagaatctggaataaagagttgtcgaagcttagtgattacgtaaatatataaataagggagaggaaagtgatactgacgttaggcttccatcccagatggcttggcatgaaattaaaagtcaattagaagtcaagaagagagaagggaaagttttggtgcagtggccagttttatgaggagagaatggagatagctcaaagcattttgaggtgagagtgaacatttaattggaagtgtccagtagacagggttgtgggaaatgagttgaaataaaaggtctggggtgaagatatattggagagggtttctgaaaacatgattggattatttga

SEQ ID NO: 6580 - DNA, 1029 bp, Homo sapiens
tagtgggtgtgtgtagtggtatctcattttggttttaatttttatttccctgatactggtgaggttgagcatcctgtccatctatatattttatgtgatgtgtttgtttgaatcttttaccaattttagaaaacattattataagttataataattctttatatattttgtataaaccctttggtcaggtatgttatacaaatattttctctgaggcttgtctttttctttgcgtcatttgaaaagcagttttttttttatctcaatgaagtttatcaatctttttctcttaaaatttatgttttttaatgtcctgttcaaaaaaatctttgcctataccaaatgcaaaagaaaatctcatgttttcttctaaaagtttagtagtaactgttatattttgatctctgatccatttctatttaatttttctatatggtgtgaggtaggagttgaggttttatattccaaaagaaaatccatttgttctagcaccatttgttgaaaagactgtcttttgccacattgaattaccttgacatctttgtttggtcatttgaccatatacatgttggtatatttctggaccctacagacatacctgagagataatgtggattgggttccagaccatcataataaagcgaatgtcacaataaagcaagtcacattatttttttggtttcccagtgcatataaaagttatgtttatattgtagtctgttaagtgtgcaatagcattatatataaagaaacaatgtatataacctaagaaatgctttgttgttgaaaattgctaacaattatgtgagccttcagtaaattggaatctttttgctggtgaaaggtcttgtcttgatgttgactgctgccaactgatcaagttggtggttgctgaaagttggggtggctgtggcaatttcttgaaagaagacaacaatgaagtttgctgcatggattaacttcttttcaggaaagatttctctgtagcatgtgaggctgtttgcattttacccgtagtagaacttcttt

SEQ ID NO: 6581 - DNA, 1771 bp, Homo sapiens
attcagtaaaccataatataaacacatgtgttgtcatccaggctttgttgttctgtttatagagtacaggcaatgtagagttagcataattcttaagggccctcgaatttggggaatcgtaaatgagcactggcttcaactttggtcaccactgcattagactctaacaatctcatcaacctgttcttgaagctttgaagccaggcattgacttgtcctctctcactatgaaagtccttgctgacatcttccagtatgaggcctttttgtctacattgaaaatctgttgttttgtgtagccaccttcatcagtgatcttagagtgatcttctgtataacttggtgcagcttctgtatcagcacttgccacttcaccttgcacttttgttgttacagagatgacttcttttccttaaacctcataagccaacctcggctagcttccagcttttcttctgcagcttcctcacctctcagccttcatagaattgaagagagttagagccttgctctggattaggctttggcttaagagaatgttgtggctggtttgatcttctatccagaccactcagactttctccatataagcaataaagctgttttactttgtcatttttgtgttcactggagtagcacatctaattttccttaagaactttttcctttacatccacaagttggctaactgacattagagacctatgttttgacctgtcagctttcagcatgccttcctcactaagctcaatcatttaaatcaaaagctcaagcttttgatttaaagtgagagacatgcaactcttcctttcacttgaacactagaggtcattgtaaagtatattaactggcctaatttctatattgtgtctcagggaataggaggtcgaaggagagggagaaagacaagggaacaggtgttcagtggatcagaacacacctaacatttatcaatttagttcaccatcttatacaggtgcagtgtgtgggacctcaaaataattcactacagtaacataaaaaatcactaattaggaatcaccactgtgaatagtaaccattaaaaagattgaaatattgcaaatattacaaaaatgtgacaccaagtggtgtcaccatatgctcttgggaaaatggcaccactagacttggtcgacacagggttgccccaaacctttaatttgtgaaagacacggtatctgccaagtgcaataaagtgaggtgtgcctgtgttgtatgccattgatctatatgtctgtccttacaccagtaccacagtgtctttattatatctttaaatgtagaaatctagtagtatgagtcttccagttttttagtttttcaaacttgttttgctaatctaggtctttgatctttctttataaagtttataaagattataatcaccttaccaattcttgaaaaaacctttgaggattttgattaggattgtattgaaacttcgattaatttggaaagaattgccacgtcagtagtggtatttcagtttacatagtttatctcacctgtattagtttttactttctctcagcagtgtttttatactgtcatttcccttcaacccgaataacttcctaaagcatttctagtggctttgagagagagctactttaaattgtggagaaaagcgtagagtaaactgctgtgctttgaatgggtcctctccaaaattcaggtgttgccaatgtgatagtattaagaggtggggccttttaagaggtgattaggccataaggactccttcctcctt

SEQ ID NO: 6582 - DNA, 1125 bp, Homo sapiens
acactgcaagtgggaatacaaattggtataacttttccttagaaaaaagtttgtgaatatgtttcaagaaaggaagaaattgtttattttggttgatggtttctcttatagtaatctatcccaaggaaataatgagaatgtggaacaaattcattaaaatgcacagttatagtaacaaaataaaaaactggtctaattgcaaattatggtacatttattaagataagtgtttttgaagaatatgtaacaatgtaagaaagaaaatcctaatattaattgaggataagtaaaatgatcttcagtgtgagtctcatttaatttttttaagttaatatgtctgcgtatgtgttttttaggggaatatatcaaatgattggcagttcatagctaagattgttgagaatactagttgtttttactttctctttatagctttgtgtacaaggtagcttttttcaggatcttccagagaatgagaagaacaagcattatttataaaagcataaaccttgtaggatttctgtgcaatatatttgctttaagaaaaatgaaactatagatgattgtggcttataaatttttattgataaatggtgaaacctttatttatatagaggaataaaagacaaaagaacacaagtccctggttaagttaatataaagttagtagcttaaatggaattggtttcaatttacagatggaaagactctttttgagatggagtctcgctctgttgcccaggctggagtggagtggcacgatctgggctcactcaacctccgtctcctgggtccaagcaattctcctgcctcagcctcctgagtagctgggattacaggtgcatgccaccacgcctgcctaatttttgtatttttagtagagatgggatttcaccgtgttgatcaggctggttttgaactcctgacctcgtgatacacccgcctcagtttcccaaagtgctaggattacaggcatgagtcaccgtgcctggccgaaagactcttaatagattaaaacacaaataaaaagatacacttggatttttcaatattgatttctcttatgtagttcatgaaataattcactttgaaaatacttctgactcaacaatttacagctgtcta

SEQ ID NO: 6583 - DNA, 1040 bp, Homo sapiens
gttaacatgagagtatttcctaagtgaagggttttgggatttctgtatcaggtaagtgattcttgcccataagatattctagttgttatccctttatttaatttcataatattcaattattatatgggggaagatgtttagaattattttaataaaaattttatttttaaaaatagacaactcaaaagcttagaaaacataagtcaaaggggagatactatttttaagataactgcattttaagaaaaataaaatgaaattttatgtttacttgaaagctgtcttttttagtacattgtcccactttaaaagtaaataaatctttatttacagacagtccctgggtctccgaccccaatattcccctagtggcccgtgagatcatgcagcgaatgatccaacaatttgctgctgaatatacctcaaaaaatagctctactcaggaccccagccagcccaatagcacaaagaaccaaagcctgccgaaagcatctccagtcaccacctctcccacggctgcaactactcagaaccctgtgctcagcaaacttctcatggctgaccaagactcacctctggaccttactgtcagaaagtctcagtcagaacctagcgaacaaggtatggtttgatgtcaaggtctcctctatcttatcagaatactttactttggggagaaaaaaaaaagcattggcaagtagagcatcagcagcaataatagcataaaaactaatgtgattcttaaattatttcttactatgcagtgatggagaagtacagctaaagttgttacagccttatctgtcagcagttcatagtcatgattgatgtaccactcaggaaagtcaggtggttaacagttgtcactaatctttcagttacttgatatttatataagcattttatattttccatagtatttttatgttttttaaaactcctatgaaaaagtaagttttcttattaactaaaaattttctaggactagcacctgtctgagaaatatgcctctacttgcaggtataagttatatactctgc

SEQ ID NO: 6584 - DNA, 1031 bp, Homo sapiens
tttcattaaagatctcctcactctaaatattgcatcagaagtttcaggtttatattaggagaatgacaacatagaataatatttaaagtattaatggaggttaacataaaatgataccacttaatctaatttaacttgttataactaatgttacacttaagagatcaatacattgtattgacagcatgctcttaaaaagaggaatttgaactacatgatagcattatagtgtgtagacttcaaatgaagtaaaaaaattttaaattatatttccttaatgaatgtgttttcagccaaaaaccacaatatttttagtggtagatttaaaatatgttgcctgtttgattagacaaattgtctatttgacttgcgtttaaataatagtgtctttggttggaaaagttgtaagcagtagtacatttgcttcttagatgtataattgggttagatgtctaataggataattggttctataagcttataattatatttttagaagtactagtgactgtaaaggacaaaactctttcttatgagtgtggggtttttttatttacaaactctgttgcctgtttatttctaacagccggaaataaaatgtcctcagatacaagttgtaagtagcttctactctggggtgatttttaacacaactagatagcacgacccctctactggccaactgaaaattaaagacattgtgtattatcttgttctgttaattttggacagagtggtagctttaaaagacttcttttccaggtatttcaacaaggagaaaaacgtctttgagggaaaagaaagtcttctaattttatatattaataacatgaatttgtgatttggtctagttgtagtaaaaaatggttgtacttccaggctctcatcagtatcaagacagtttcattcttctttctttaaactttcttcaccaatttttattgtcttcttaattgaaaaattcttgcattcataaaattcagcaattgaattttgaatctctgcaaaatttttttaaaggattgaatata

SEQ ID NO: 6585 - DNA, 1050 bp, Homo sapiens
agtgagatactggaggaagcaatctcagtggttatgagtggaaaaatgagtgtttccaaagctcagagtatttatgggattccccacagtacactggagtacaaagtaaaggagaggctgggcactttgaaaaaccctccaaagaaaaagatgaaattaatgaggtcggaggggccagatgtttctgtaaagattgaattagatccccagggagaggcagcacaaagtgcaaatgaatcaaaaaacgagtaggaatactgtagagtgccaattactgtacaaactgggtgagcactactgcatcattgttcagctatcattgcttgcacgtaatttcatttactgtgacacttgcttctttgcagattttgcattgacttgtgtgtacagagatgaaatgtgcattctgaatgttgcatattttaaatttttcatgtgcagtatggctcggaatatgtttggccttttgcatgtttctctacaaaagagaattgagttacctcacagagaacagatacatggaagtggactccttgcctgtagagcctgcatgcttttttgtttttttttgttgttgttgttttttcttaagttatatttgtttttactttttaaaaaagaagaggaaacaaagcccccttttagaaactacgtctgtcatactgggagctttatcactgcaaattggaaagccatcttatacaaaattattcacatttttcatctacgattcaactaatcgaaggattaaactaaagaaaaaactaagaagaacaatgaacctttgactttgagaaatttggttattcactgacataattattgggtcatttatagttacattttataattttcttctcactattaaatttatttaaattagcaagctattagtgctcacccagaggggaaggtggtggaaaatgtgcacacactaccttcagaaatgcttcagttaattactttgaacactacctttgctgtaatttcatttgagattttctaagggtagaatttggtctcaccaacaagtgaggatatagccttatc

SEQ ID NO: 6586 - DNA, 1032 bp, Homo sapiens
tttttgcaagaataagcaaagcccatggaatttaatttttcattgtgatcagattaaaattactatttgtgcaaaacaaattccacaccacatgtactgtatattctaatctgctgagaaaggtggtcaggcccttctaaatgcttaaccaaaaacaaacattattggagtttcagtgtaaaataaaattaaaattggagggttggttagattgatttcagatggatactaacagtttgaggggaggtccagatatttccaaggcataaattcttgcctggaaactttggagcaattaattaaattaggttaagttttccctcagcaacctgtgtgttcaaaggttaggcacaccattgctgttactaaaatacatgcactgctcattcttgacatagcttgggtgtgggttcctcttgttttggttattttgtgtagcagtttaatcagtggataactgagcctgtttcctcttagctttctagacttcttaacagaaaaaacagtttgggttcaatagcattttatgattctacaatattttgtcacctagctggaagttgcaataaaaattccttatgaaatatatggttttcatctgtaattgaaggaaatcatagaaagtttgctgaaagcaaagggctaagcttatgaaggaatgcctcctttgttacacactcaagaatttgtcagcacacaattaattgcagccatagtacctttttgcgtaatgtttgggatattcagtagcccaggattgctacaaaaaggtcctttgagaaaattaatttgtgcttgcttttatcccctctcagaaagacatcactaaaggcccattaaaaatctggccctaaaagttcaacttttgtagagtttattgttcagagaggtttaatcctatgtggtagtctatataagtgatgtatgagttgagttatgtaaattttgtcattgtagtgtacatggagtgatcattttactaacataaatattttctatgtgtgtttcagtggatgacaatcgagcagcaga

SEQ ID NO: 6587 - DNA, 1086 bp, Homo sapiens
gtagatattctagtttggggatgtcctcacaatgtgtaatagagattggtctattagcatgcttaatttctgctaatcagagttttgcatggcccaaacaacagttgaccatttttatggtatgggaaagtgtagttcacaactgtctttgtcacgaaagccgtttttcctcacattttccagtaggcagataacattacttaaattattaatatataacactcttggaactattgataggaaataatgtatttaaaataattttttgcattttcagagaccttgatgttatagggtagataagctatggcactataaaatcaaaaacactaattctgtggaaggatatctagttggtatttttatctttagctttctcatttctgagacagcatagtcatccagcttgatggtaatgtagtatattactttgttcagtgggcttataagtgactctgaattatgtttgtgatgagctatacactttttttctgttccccaaataccatgaaggacaaggtcactctttcaggaaaaataatttatatttgtgtataatactttttaatattaagtttgttgttctgaagtttagatgttgcttgataaacctttgctgcagcagatcatgaatatgagtaaggctttgtgtgataataggggtccttatgtgaagttaattactgttcagttctggtgagcaagctcaacaagtgtgaagtgtgtattagctttatttggtacacttttactttacaatatcgaagtgcttttagaactctggttatcttatataaaccattacctcaaccaattggcatttcttttccccaacatttaccttagctataatatgagctatgtgggatcagatggtaaaactataaaaggcacaatgagaagtttagttcccaagttttggagagaactctaaattagactaaaaacaactacctgttaacaccaatatcataactaccttctgtcgttaggcagtacatagcaacctttgagctgctagtgagctatctgttctccccctacccccaagtaagcacacagtgccaggcctggttctaagccttt

SEQ ID NO: 6588 - DNA, 1024 bp, Homo sapiens
tgtggaggaggctgtgaatgaggtagacaacgaaaacacccagcagaaagatgatgagagtgatgccccatgcagctctcttgggttgtcgagtagtggaagtggtgatgctgctagggcaccaaaatcggtgccaaggcctaaaagattgacctcttcaacctacaacctaagacacgctcattctctgggctccttggatgcttcaaaagtgacttcagaaaaggaagctgcacaagtaaaccccataatgccaaaggaaaatggagcttcagagagtggagaccccctagatgaggacgatgttgacaccgtggtagatgaacagccaaagtttatggaatggtgtgctgaggaggagaaccaagagctcatcgccaacttcaatgcccagtacatgaaagttcagaagggctggatccagttggagaaagaaggacagccaacaccaagagcaaggaacaaatcagataaactgaaagagatttggaaaagcaagaaaaggtcacggaaatgtaggagttcattggagagtcagaagtgttctcctgttcagatgctctttatgacaaactttaaattatctaatgtttgtaaatggttcttagagacaactgaaacccggtctctagtcattgtgaagaagctcaatactcgccttccaggagacgttccccctgtcaagcatcctcttcagaaatacgctccttccagcctatatcccagttcactacaggctgagcgcttgaaaaagcacttgaagaaatttcctggagctacccctgctaagaataattggaaaatgcagaagctctgggccaaatttcgagagaatcctgatcaagtggagccagaagatggcagtgatgtcagccccggccctaattctgaagacagcatagaggaagtcaaggaagatagaaacagtcatcctccagcaaacctgcccactccagccagtacccggattcttagaaaatattccaatattcgaggaaagctcagagcccagcaacgtttaatc

SEQ ID NO: 6589 - DNA, 1443 bp, Homo sapiens
tcctttgctccatccttcagaggggcagttgtgtagttatgctgccgggtgagcacagacacacatactttctcccctagctgggaccatcccacacggggtgctcaatatgcatgcctcatgaaagcatagactgtccatttaaaaaaaaatcaggtactcatggtattacaatatgccaggggttggacaaatggattttttacccttttttaaagggttatgtaaaaaaaaaaaaaaaaaaaaaaagcaactatatgtggcccgcatagcctgaaatatttacttcctgacccttttgtggaaaagctctactgatccttatagtagtcattaaagatcaaattgtgtagacaggcacaacttttttttttcatatgctccaacatttttttcatacagtccagcaattcttttagattttagagtgtcttgcctgttcatctcagtacacagctgctgttacagattattcctgaataatgcttttgcgttaagaaaaattatccccctttgccagttgtctacttgttaataagttgtgggccatgtgatcatatctattagggtatgtagtgaaaactaaaagtgcagtctttaaaagtacagtcttcatttttatgaatcagagtgaacttgactgtggtagacattccattaacagcagttcagcacaaacaaattactcatgaacttaaagccaagaatagtgcctctccctgaaagtatgcgatgtgttggttttacccctagaacccttcatttctcttttgtatcatatacttgaaggtttctcactcttcaagctctggtcgtgatatgagaacatagatgcctggtgtttgcctgtttgactttcgagtgcagaccacacattctcttaaaaataccagcatgtctgtggcatcttgtcaggacaccggcagctttagacagaacaagttcagggctctccagcccagcccgagtcactgctcgttctgaggagccatccttggcaccttgccctccctcctcctgcctctgcttatgccgccagcccccttccaggaggcatattctctgggacagtcccccacttccccagtgtggccctgaacacaaatttgtcacattggaagcatttttctctcaaaactcttttcctctagtatttagttgttgggtttaaatgctattcaatttatccacttttttttaaaccccagttttctgtgatctgcacctcatagttgtcttgtagctaaagctgaggtatttgggagctaatttttgggaaagagactataccaacaagatttgcataattttttatatttataccacaggtagggattatttttagagtcactatagcttaaggttattgatttcactagtgtggtttctgcattctaaatagttctcggagactgtgttagtaactggtttcaaatacatata

SEQ ID NO: 6590 - DNA, 1306 bp, Homo sapiens
tttctcccagcgtgtccagttcagcagatttctaaagctgttaagcagcctctctttttgaccgtcctaaactttgtgaaaataaataccccacacccagataaccattaatagaagtaatgtagttttttaggcttttggaatatgtcttctcttttgtatttatgatggtgtttggaatttttcactagtgtatttttagactgaagtgggtgcattaggataaaactttcccttgctgagcctgaaggcaagcaagagggaagaaattgacctgtattgtatcattggggaggcgactacttcttgtggtggtagggggtggggggaatggggcattgtagattatgtgggggtacaatagaattctggcctgaggctccccaagtcttattaccttgtatgaaaaatccccatattagcctcacttaatctcaatagaagcctgctgtttaccctcagggaacaagtagttttcaaaattgagctcctccaaggtcattggccaatgctgtgtgcaggcattggtcatctttgtaaactcatggcattatttcctcatatgcattatgatactaagaaattcaaccccaacctgtatgaaaagcacagcccagggccctaattgaggctagcatgaatgcctttgaggggccagggggccataggaggcccatgcaatttaactgaagctcaggtgccacgttggatttttattcttattaggccgcaacctttctgaatgagtttagggcaggggctgctgatccggctgtggattcagggagctctaaaatgaatctctaccgttcctttaaaggtctttctggttcctcccagtgttgtcattgctgaggtcgatctcgtagttgttcagttgtgctctttttgctgtcttgtgagtcttagccagtgatccagctgcccaaggacagggcctccagagggcctagcgccctcctggtaccaagcgtgtgctcctggcctgtgtgacagtgtctttcccgaagcagtgaaatgagaaattctgcaagtggccacccggaagatcagtctgtagctcttgggcctggatttctactatgttagtgagtgtaggaatatactgtgtctttaatggatgaaaattcaatgtatgctgtgaatttgttggtttgaaacattgaaatttttcattagacaatgtttacatacctcacctgaagaacctttgagagtgtatatataaaattttaaaatatattaagttgctttaaaacaatatgtatagctataaaagttggagttattttaactttgaatatgt

SEQ ID NO: 6591 - DNA, 1109 bp, Homo sapiens
gccactcaggaaggtacccgaggacttctcggtgagaaccagctccgcctcttcttccatgggcgtctccggggcttcgcttttgcccaagcgcaaggaccctgactgcagctcattatgtaacttcacagcatcgactgtcaggtcactccttcctgagagccagaggcacaagataaggtccaagcctccttttggtcaagagaacagaacaacccctgggaaacaaaccagcccaggccaaatctccaacccgagaggctgaattctgaacacagccagtctcataaaaccactgtatgcctaaaaacttgaaaaaccaaggagaaagggaatcctccatgtaaaagtttctgcttccctgtagcagcggcataaacgccactgggaatcggctgggagctacattcagagggcctgcaaaataaatgaaggtgaacgcgctctgtaaagagctacccaaggtccaagccatctgtctcaactctgacacccgcggtaccttacacaagacatttccctactgcggacctcagtttctgtatctgctaaattggaaggactgcccttcagagagggctccagatccgacatcctaagagacgaaaggtccaatgcctggccccgcactctcccagaggccccagactcatctggacccaggtctgcctggaaccccgcccccggctgcgctcgggtctcaacccagctacctgacggccggctgaagaagcggctgcgggcggcctgacggtggcggcagatggcggggttgctgtcgctgctgtggcctttcttccagcgcttcaacttagctgagacaccagaaggcaactttcccgagcgacccatgttgactaagccgtggcgaggaatgagcttaaatgaccggcttccagggacgtagaaacacgctcagaacccacgtggataccctgtagccttcacttcctcttcttctggcgtcacttccggattcgtgtgcattactatggtaaaacagtcaacatccggttttacacctcctcctggcttcggatggggaggagctccaaggagatccgttgctagggaggaagttaggttgctaagggttctatggggttctt

SEQ ID NO: 6592 - DNA, 1037 bp, Homo sapiens
ggtaatttttttttctggtgaaagtctttaatctgcagaactgatgaaactgtcatcgaaggaatctgttagcgcatctgtgtcttctgttctggtcattgcccaggcagccgatctcttcccatggctgttgcatgaggtagaaactgcatagaggagatggaggcactggcagaggtgccatagaagcagtgaactgggaagtctggttgggtatcttggggctaaggcagcagctgcagagaaggttcttaaatgtctaattagactggggcagtggagtccatcagagaggtcaggacccgaggccttcatgaatcaacatggaggtcccctcccattgactccttcctgtgttctgctcagaatacctggagttgtcttggctaccatttccttggggtggggctgggaatggaattggagacaaagcattttctgtcatgcaaggggtagctggctgtcctgacaggagacagggaatctcctgctaccaggttgagttggctagcctgtgacatcagcccagagggagtaggaagaagagtatcttttgccaagacttaaatagcaccaggaaatacctcggtacaggatccacattctgtgtactcattcttccattggctgttctttggtgaggaataatcatctgaaggtaggttgatgcactagggcagtcaggaagccctggcaatctctgctacagtggccatgcccagagacacagtggacagctttgtccatgttggccacactccacccaaaagtctgtctacacagacaactcctaagactgctttgatttggagtggcctttctcacccctttcctgtggcctgttgctttaggtgtgcatcaccttggatttgctatgcaaccatgtggtgtaatttaagtacaatttctgcaggctcagaaccatcagttttactcccttaatctggttggaacattggcactggtcagtccgtagaaaagtgaagtaaccttcctacttctcacagttggtgactggcctagctgggtcttagtct

SEQ ID NO: 6593 - DNA, 1049 bp, Homo sapiens
ctcggccgtctgggagtctataaaagatggggtgcggggtgagagtcacccttgggattgttgggatccttcccagctttgggagtgagatcgctcgctggtgatcctccaggcccgcgcaacgctttctcactttcatggtacaccccgcctgccctggcatttcgccccgggaagaggtctgtcggtcatttttctgggtcttacactcacttccttctttgagggtgttgcaaggacccgctgggaataatatcgtagacttgagagctcaaacttgtctggattccagatggacccatctcctactctgtgtcaaagcccagatcctgagaggttgaacaccttgtccaaagtcacacagctagttaggagctcacctggggctagaactcagcctcctctcccaccccattgccacatatccccttatgtaagaggagccacaggcagagttgttaatgaagtggaaactctagttggagtttcctgtctcccttgacaccgaaggtgtgttgcttgggttgcggaaactgggaaggaagatgggggaaccaggggaagcagggaaggatgtctgcatggtggacaggatgacttgtggaggcagaaatgtgtttttatgggaaggatgcagtaaaacttattgaaattctcttgtctgaaggtaactctggccattcttctggctgaggagagatgactctcaaaaccaagggctggcttgctttcattcattcatttgttcaacaaatatgtgttcaggccccataattgattttgcagcattttttgctgttgacaactctctcctacgagacattcccccccttcctttcttggcatcagactgtcttggttttcctttctgaacacccctttccaccatcaccttctagcttgggggcacgctggtgcttaagtttgacattctgttttttctctcattacactctctcccagagaaatcttgttcagtcccacaactctttgtccattgggaatacccctatgcttaaacttcagctcttctctcttgaaccccagaa

SEQ ID NO: 6594 - DNA, 1050 bp, Homo sapiens
ctttttctaaatcaagctgggagggccaccctcaggcaggcaggagcagcagcctccagactaaccagatcctggagctctgtgttctgggtccctgatctccctgaagccccagctacggagtttggtccagatttcccccagcagcagctgggcagcagtgtgtgcctggccccctttggagtgggtcacacacccacctggccaggctctggcatggaggctggcactagaatgggcttcagggatagcatgcacctgttttgtgctgctgttgtcaagtagctggccttgggcttcttggaactacagatgtttgcgtcattggactgattgtcctttgactttttctttgccatactgactttctgtggccatatggttagctttggatacagagaggtgtgaggtggtcccacagtgcctgccacaacatcaagtttctatagatgggagcccttccgtaaacctcagaaggtggcaagagcatgtctgacagtgattggaattgagctctgcaagacatagacaagatcacctcttcaactccagagtgttgtggcagggcaccagagctggaaaagcctgaaaggtcatgtccagctgcccacgcaatgtggggtcgttccacttagcacccttgccaggcattcagccagactttctttgggcgaggctagcttttgaacgcactgaatgcgttggcctgtctctctgtagagtgagtgcctgtgccctgtctcattgcccacaccatggccttgtgagagcagctccctccgatcagtgtgaacttggctgagcccaagtgtgcttcctttgtgtctctcactcactggttctgcctgagaagtttgtttcctttaggtaaagttttcctgttatagctcttggggtttgaattgggtgacttgtcttacagagtggtgaagatcggagacagggtgtgtaacttgcccaggtcatctcaaatttgtggccaggcaggaaacacaaccccagagatgcttgatcttgtcattttgctgctcagacacattctgcctcctt

SEQ ID NO: 6595 - DNA, 1083 bp, Homo sapiens
cagtacataggccacagagaaggacagaccataggtatgttacttggtgatttagggattccagtctctaaaatttcctggccactatcctttctcataggggaagtccaaacacagatgccctgacaaaactttttgacgtactcatactgcttccagtgaagaaaatgtgatttagaacaaagggcactttctaaatgcttgcggtgggttagactggcccacagacttactgtagttggaattgtcatctttggctctcctccaaatgtatttactttattaaacaaatacttacatagcatttactatattcctttaagtgctttacaaataataactcacttaatctttataaccacccttggaggtaggtactgttattatccccgcaggtgacaacacaagcccatggtataacaaatttttccaaggtctcacacctagtaagtggtagaggcaggattgggccaaggcgggttggctgtggagttcatgttctcaccactatcctttgctccctcagagtcagtcatcagaatttccatattctggacaggtgcggtggctcacgcctgtactctcagcactttgggaggccgaggcaggcgcatcactggaggtcaggagttcgagaccagcctggtcaacatggtgaaaccccatctctactaaaaatacaaaaattagccgagcactgtggcaggcacttgtaatcccagctactcgggaggctgaagcaggagaattgcttgagcctgggaggtggaggttgcagtgagccgagatcgtaccactgcactccagcctgggcgacagagtgagactccgtctcaaaaacaaaacaaaagaaaagaatttctaaattctcttctcagctactatattggttagtattgaatttgactatatgtgacagatattttaaaataatgatgacttgaaaaaaggttcatttacacctcatgtaaaagaagtctataggctagctgctcaggcatgctcagggctggcatgacatttcactttattggagacatagggttcttcctgccagctgatcagccatctttaggatatggc

SEQ ID NO: 6596 - DNA, 1031 bp, Homo sapiens
ttttttccttttttctttttttttttttactttttgagacggagttttgctctgtcatccaggctggaatgcagtggcatgatcatggctcactgcagcctcaacctcctggactcaagtgatccttctgcctcagcctcctgagtagctgggaccacaggcacatgcaccataccctgctaattaaaacaatttttttgtagagatagggtctcattgtcttgcccaggctggccttgaattcctgggctctagcaatcctcctgcttcagcctcccaaagtgctgggactacaggtgtgagccagtgtgggtgtcctaataaagttctttgtatcagtttccctgatctgggatccaattcaggattatacatcatgtttaatttttttatgtctctttagtcttctttaatctggagcagttcctcagtccttgtttcttgtgaccttgacatttttgaatagtacaagcttattattttgtagaatctccctaatttttggattgtttggttccttgtgatcagatttagagtgtgacaagtgatgtgtcatgttcagtacatccgtatcaggaggcacctgatgtcaggaaatactgactttgatcacttggttaaggcatccatactgtaaattatcattttactcttcattagtagtaatttgaggggagatactttgagactatgtaaatatcttgttcctcatcaaacatttatccactgctttaaaaatccattgatgggtcttgccttaatcagtttattactatgatggttgcaaagatgatcttctaattattctatcgacatttttttagctggctttctactataaggaagctctttcttactattatcagtatgaactcatagatttatattttatttgatgagttagaatctattactatcattatttattttgatctcaaattgtcctagatttggccagtaggagctcttttgagttggctcttgtttgcattggtccctgtcatttttgaatgcttcctttatggtacaac

SEQ ID NO: 6597 - DNA, 1025 bp, Homo sapiens
ctttaagcacatggtgagtgtgtttaaagagattgaccatccctagccaactgtacctgcaaggccccaggctccacttcccagggcttctgtcctgcccactcaccaaagcccctgtgtctgtagcttgatccagctggaggccttcctgagccgcctgtgctgcacatgtgaagccgcctaccgcgtgctgcactgggagaaccccgtcgtgtcctcacagtgagtgacccctcctctcccgccaccaccctataggaatttgcagcttgagcccgagcaaagccagctgccttgagaggacctctgcccctcttacctcaggggaagagctcgcctcctgggctcttgtgtgtatatctgcacatatgcttgcgggctctaatgtactgcttttgtttagatgcttgcttttatgtgtggtaaaaataataatagaaaaataactcaccatataatccaccatgcagccgaatctcttgtttgttttgcctgctagaatttgtcacatgcatctactttacggatgtatagtttcatagtgtatgttcaatttttcttttgttttccacttatcattatattaaagatgattttctttgttgctatatagcttttggaattatttataataccagattaatatagatggcaaatataatttgtgaaaccattctgttacagatttagtcaatttcccttttcattactaaccccatggtaaacatttttatggatttagctttaatgttttagaaaatttttcttggagtaaattcaaggatgaaactaccatatcaaacagaatgggtgtttttgaggctctttaatatgaataatagtgataactaatgtttgttgtgttcacctggtgccaggcactgctcaacactccctctgtattatctcactcttatagtaactctattaggtaggcgctacttcagtccccatcttacacgggaagggagctgtgcccagagaaccaagagacttctcagaatgagaagtggcagagctggatt

SEQ ID NO: 6598 - DNA, 2389 bp, Homo sapiens
ctacacacagagtcatagagacacatgcaataggcagagagagaggagggtcagtcagagacagagaagtcaaaaacagagagggacagtcacctaggcagagttagaaagcagggtaatcagagatgtagacagacgggcagagttagaaatgagggacagacagatacagggagggagacagaaagagtgaatgtcatgagtaagatggagagcttattggatttttgtctgttatttgagaagaacatgtaaatatttatagttggctaggaaagggaaaataaacagatattaatagtaaatcaagtaacatgaaatttttattacactaacatttttccttaaatactaagtttattttgcatattcagcatgcaaatatcaagtcaatttatgtattacctgttaactacttacgtgacctctcagtgtagtttaaacacatttttaaaaaaattaagattaatattaattttttcctcaaaaaatctaatatataacttactatagaaaacatggcaaatacaggaaatttaaaaggagaacagaaaacactcataatctcacaatctaaacataacataatgaggcccacatttttcatgttttttttttcccagtcttctttttctaggcatttactaaagcccatctactttcctgaaggacccaaaagctgtttataagtccaaaatgatgctgtaactatttgtggcagagttaactttataatcctattttggcacttaggtactttcataaactagtgtgtacccattttattctcttcctagattgtaaacttttaactacagactatatgttattcatctttgtgtcttaggaatctaggaaagtatcttacatatcataggtattcagggtatatatgagatgaattgttaagcctcctaagtagaaactgtcttatttaaacaggtctgccaaattgcacattggattggaccttccttaaagttgagaaaaacttgattttaggggtggtgtgtatgtgtgtaatgtaaagctaccaaactgggaaagggcactttttttctggttaccttttgttgtgtttgtagcaagccattccaaaacataatggtgtaaaacaaccattttattgtgctatggatctgttggaattcagacaggacagtttctgcacagatggcttgcttaagccttagctgggaagattcaaaagctggtggtgactttatggctggtacttagaacctggaggcttcttcactcacatggctggtgattgatgttgattgtccctcagaacacctacctacccagataggctaatttgagcttctttgcagcatggtggtggctgttttctaagagtgaacatctagagagaaccaggtggaaactgcattactttttgtgaccaagccttagaagttctgtagtatcacaagcttgccagattcaaggagagagtgacagttacatgggatctgcttctcacaggagtgtcagagtcactgtaagaaaaacattgtgggggtgggaggtagcaagttaaaaaatgagttaataaaacagtatcactttttaaatgtcaatgaataaatgttctattgaaagtaagggtttttccctactgctgatggtgttattttgttaaaaaatttgtactaaacttgtaaaaacttttaaacctaaagcaattttaaattattttcttggcttttaagctctgaacaagatcttattatttctttttaactgaatttgcaagttggtcaatttctatacttgggtcttgcctcaaccccatttactaaaacaagtcttgttttataaacgatatgcatgttcactgcagacagtttagaaaatcaggaaataaacaaaatcaactcatgatctcacctctgagatgtaatcagttccaggttcatttctttctttttttctctctctctttcttttctttttttgtacctgtaatcccaacactttgggaggctgaggcgagtggatcacttaaggccaggagttcgagaccagcccggccaatgtggggaaatcctgtctctactaaaaatacaaaaattagctgggcatggtggcatgtgtctgtagtcccagctactagagtggctgaggcatgagaatcacatgagcccaggaggtggaggttgcaatgagtggagattgcatcactgcactccagtctgggcgacagagtgagactctgtctcaaaaaaaaaaaagtaggccgggtacggtggctcatacctgtaatctcaacactttgggaggctgaggcgggcagataacttgaggtcaggaatttgagactagcctggccaacatggcaaaaccctgtctccactaaaaatacaaaaattagccaggtctg

SEQ ID NO: 6599 - DNA, 1100 bp, Homo sapiens
gagactggggttcaaattctggctttgtccttgccaaactgaaaactagggcaagttataggatacctctgggcttccatgtgtcagctgtcagatttccaaagtattgacacaacaatcttatgaaagttaaccctctgcttagaacattattcatacgcaaaagaagtcctagtctggtctatctttgagattcttctggttctgctactgaatgatctctaagttgaggagtgcaaaatacagcagtatttatgtcaggttatttaggcctaatggaggagaaggatcttgaatgaaatgaaagagtaacaaattgactggaggggacagaagaaaactctggagggaatggtgtgaagttgggagcaagaatgagtacagtatgtgaactgagtgagacaaacaagtgatcttaacagtactccacaaatagaatgatttttactgatgagtagtaaggagataggatttgttaagtttatatgtgtgtggggataatgaagaagaattaagggacaatattgaaggctaggctgaaaaacttaaatttgatccaataggtgacaggacttctgttgagagtcatataatgaaaacagtgtttgactaaggctgccttggcaactttgtatgtttgataagctcaagtagagggaattgctgaagagtacagtatttcaattgtactgtggaataatgtggaaacagaagtaggaataatgtaaaaatagaaaacatgatatctcttgtggaagaagaagagtaagatatggggttagaaatcggagtcagaataccgcaaaattttgagcctgacatatgaagtgtactgtgtcattgatagtggcattgggaaaggatctcagataggtcttggagaaaggtaacgagttcagtttctaatatattcagttttaggcattaggttatttaagtggtagttttaaaagtctggtgctttaaaaattgattaatctaaatgaatgctgccccttttaaagtaatgtttttggggacatgcatttattctagcaaataaatgttctttggaatttgtcttttgaaactgcttttagaacctgtagagccacataaga

SEQ ID NO: 6600 - DNA, 1061 bp, Homo sapiens
agattctattattttccaaagacactttagggtctaagagagctactagcttcagctttttcacatacattgcaatcatcagaaggagaaagagaaggacacatctcacttcctttaaggatacttcctggaagttatattacaggttgagtatcccttatcaatatgcttagatccagagaacggtttcacattgttttcacattttggaatgtttgcattactctgtggatatcatgcaggcctttttgatactttcaaccatatcgttatactacagagcagagaataagcaaaaaaaaaaaaaaaaaaaaaggaagaaagagcatagtgagtaatagtaaggcagtacatcttagccccatgtgaggcattgtggggagcctcccattggtgtatccagcgtgtacacgtgtcattttattaccctttgtgggcatgcttgtatggaggaatctggtgtgtgcagatatatattgcagctgatggcagctgggagggtctttctttccttggggacactgaataaactatgtgttgggtacctgcattgtgactgcaacctgtcacatgagatcaggtttggaattttttacttgtggcatcatgttgacactcagaacattttagattttgtagcattatagattttggattagggagttccgtgtatactacttttgctcatattccattggtcaaacttagccacatagccacaccttgctgctggagaggctgggaaatgtagactttattttgaatggtcagtgcctggccgttcaaataaagagcaggaacagtgagaataatcccagtgtagctagatgaagaatacagggtagataacagttaattgtctttaggacagtttaattcattattgattattcttgatagagtttttataattactgaactatgagtacaaattcactcttgtcaaattgcatcaacaggatgttgtttttaggatgtaatctcttcatgaatccttgcttaattaggattatcagtttctcataaagaaaaaaatatccgtatatatacgtatgtatgtg

SEQ ID NO: 6601 - DNA, 1083 bp, Homo sapiens
aaatctgtgctgtgtaataatagggtagctactagccacatgaatagagatgtgttacaagtgtaaaatgtacattggatttgaaaacttactacaaaataaatatgagatatctcactgatattttaataatagtttatgttgattatgtgttgaaatattttaagtgtattagataaaatatattaataaaattaatttcactttaatgtggctactagaaaatattaaattacatatgtggctccattatatttctattagaatgtgctgatataaaaaccgtgttcaaaagttacttggattaattttccttctctaacattctttcccttctccctggggttatgttactcatttgaaatacagtgtacttcatttatttctgtttgtattctgtctttttcacttgatcctaattgatcttatttattcttcagtatgtgaaacatcaacatgtttccaaaagtcagaactctacaaaaatgtttatactcagggcactgtcacccattccttctgtccttcacactctaacctgacctctgtaggttaccaatctcatgattccaccagttatccttcatgtgtttttcccccctcaggattgaggagatagatgcacattttctaatttgtctttcattcttacacaaaaggtagcatactatagatactcttttgtactcttatgctgtttctaatattttgaatttacaaaaagtgctgcaactttgtccatatgtattttggtatgttggaggtgtatttttgggtaaattttcaaaatggaatggttgggccaaaagttaaaagcatatgtagttttcttaaatattgctaaatccctttctgcagaggttgtacgaatttgaattcccatcagcagggtatgagagggttagtttccccacaacctcatcatcagagtgtgttggcatactttttaatttttgctaacttgataggtaagaaatagtatctcaatatagttttaatgtttgtttctcttgttattagtgaagttgaacatcttttcatatgtttaagggtcatttttatatctttttgtgtgaaatatat

SEQ ID NO: 6602 - DNA, 1019 bp, Homo sapiens
tttagacctttatgtagtccagttttagagttttttgttttatctgaattttggattaaatttagaggctttccttggacccatggtaaataactcacctgtgttttcttctaatacttctgtagttttagttgttaatttggatccttgatccatttggaggtacggtttctttaaaaatgaataaaaagacgaattttgccccagtgttctttgatatgctacctttatcatatatgaaatttccatttggtttacttctggactttctatttctgtgccattatcacacactttcaattatagaggcttaatagtatatcaagggctagcttttaaaatttttagtgttttcctgactattcttgcatgtctgtttttctgttgaactttagtatcagcttttctgtctcaatgaaaaagcttgcaggtgtttttattggggttatgttaaatttataaattaacatggaagactgactttttaatgctgttgttttgtgctgagatttctgtccaagaacaaagaatatctttccatttgttcagatctacttttgtgtctttcaggaatgttttaaagttttcttcgtatttaactcctcgataaattctccttttttttttcagctcaataatatgccttgtagatctttcttttgtatgtctgcatgattttctacagtgtggatgtaccataatttatttaacctggctgatattggtggacattaaagttatttaaaatttttcactattgtaaacagttctggaataagtaaatatccttgtagaagtctagttacttccttatgataaatttatcaaaggagaattgcctcatcaaaggtcttttgacacataaaagtttctgaaacatattgttaacagctttccatattaataaaatgtatacctccactaacactgtgtttgagccctattctgttgacattcagcaaaacagaaccttattgctcttttttaatatttgccagtttgatagcaaaacaaaatat

SEQ ID NO: 6603 - DNA, 1093 bp, Homo sapiens
tactttgattgcactatggtctgagagacagtttgttgtgatttctgttctttttgatttgctgaggagtgctttacttccaaccacgtggtcagttttggaatacgtgccatgtggtgctgagaagaatgtatattccgttgattgatttggggtggaaagttctgtagatgtctattaggtctgcttggtgcagggctgagttcaagtcctggatatccttgttaaccttctgtctcgttgatctgtctgatattgacagtgggatgttaaagtctcccattattgtgtgggagtcttgtaggtctctaagtacttgctttatgaatctgggtgctcctgtattgagttcatagatatttaggatagttagctcttcttgttgaattgatccctttaccattatgtaatggccttctttgtctcttttgatctttgttggtttaaagtctgttttatgagactaggattgcaacccttgcttttttttgctttccatttgcttggtagatcttcctcaatccctttattttaagcctatgtgtgtctccgcatgtgagttgggtctcctgaatacagcacactgatgggtcttgactctttatccaatttgccagtctgtgtcttttaattggagcatttagcccatttacatttaaggttaatattgttatgtgtgaatttgatcctgtcgttatgatgttagctggttattttgcctgttagttgatgcagtttcttcctagcattgatgtttttgctgtggctggtaccggttgttcctttccatgtttggtgcttcctttaggagctcttgtaaggcaggcctggtggtgacaaaatctctcagcatttgcttgtctgtaaaggattttatttctccttcacttatgaagctggatatgaaattctgggttgaaaattcttttctttaagaatgttgaatattggaccccactctcttctggcttgtagattttctgccaagagatctgttagtctgatgggcttccctttgtgggtaatccgacctttctcttgactgcccttaacattttttccttcatttcaatcttggtgaatctgacaatta

SEQ ID NO: 6604 - DNA, 1029 bp, Homo sapiens
accatgaccaagtggaatttatctctgggatgcaaggatggctcaacatatgaaaatcaataaatatagaatatatacaatattaacaactgaggacaaaaatcacatcatttcaactgattcagtaaaagtactgacaaaacataatacctttttatgataaaaacactcaacaacctaggaatagaaggaaattatctcaacataataaaggtaatatgtgaaaaactcacagctaacataatcattagtgaaaaatgaagtttttcctctaagatcaggaacaaggcaagaatgcccactcatcactttcttcaacattgtaatagaaatcctagctagagcagttagacgagaaaaagaaataaaaagcatccaaattggaaaggaggaagtaagattatccctaatcacagatgacttggttttacgtgtacaaaaccaaaaaaaataaaaaataaaaaaaactgtaagaactgttaaaccaattcagccaagttgcaggatacaaaatcaactctccaaaatcacttgtgtttctgtgcactaacaattaaggaaataaagaaaatctcatttacagtaacatcacaaagaataaaatgcataagagtaaacttaatcgaggggagaaggacatacattgaaaactataaaacattgctgaaagaaattaaagatacaaaaatatggaaagacataaattggtattattatgctgaaactaaagccagacaaatactactggttgagcatctctactccaaaaatccaaaattcagaatgcttcaatgagcatttcccttgagtatgacctttgagcactgtcagcacacaaaaagttttggattttggagcattttggatttaggattcttgtactagggctgctcaatctgtacaagaagaccaatattcctgataaatattgatgcaatactgttgtggattggaagacttaatattgttaaaatgtccatactgtccagtctacagagtcagaacaatctctgtcaaaatccttacagc

SEQ ID NO: 6605 - DNA, 1079 bp, Homo sapiens
gtgtgtgctaacttacattgttatactgtctctgtctccctatagtcttttgcaaaaatggtgtccatgttaagtggaaaacccaaaactgaaaggaaaaatttataatccagtcactaaaagcaaattatgtaacatacaaagagaggaaagcccttcatatcccaacccctcgaggcctcataaatagttggtagcccatcacctttcagttgaatagcaaatattgaacacttagagtttgataaactataaatccctaatagctagatatgtgttgttatcactgctatgttaaaggcactgtgctgcatgccatcttttgctctgaagttgttcatgttttatttggagagacagtatgtaactatgtgactagtcccacagcaatctgcagggaaattaatataaaacaaccttataacagatgtactaaaactgtatttcattgcctgataagtgacacagaatatgacttcaaaaggagattagagggataggacaggggaaaaagaacaaaaggggattagatcccccaatgctagactggttgatgcagtttcatgttggtgaggctatagaattaaacaagagattatagttcccacttttactatgctgttctgtttctaatttctgttttctattccattttaaaaaaatctatagactttatttttgagtagttttagatttatttaaaaaattgaacagagtacagagttcccttgtaccccctcacctgtcgttctaatttttttcacaatatcttttaaaagttccagctcattttaacagatttctaattcatattttataaagatgtctgaattgacatgttattgactgcctaagtggggatttattgactcactttccagatgctgtatattctaatgcagtcagttgggacattcagtgaagaatctgagtgaattatgtactctgtttttattgttcaatccattagtgaatgatgactagatctctggtccaaacagaaagagggaacattaagtagattccatcactcatagtttttgtttttgtaaccaggtgactcctaaaattaaaaatct

SEQ ID NO: 6606 - DNA, 1049 bp, Homo sapiens
ttcctaatacttcacgttcacaatccaactctttctaataatttgttgattcagccactgatattgatgcttttctattcagtgtcatccattttgccattgagaactttgatgacgcagcatttcttaaaagaatacataaaagaaccaaaaatctttgttgcagaattcttaagacacctttgtacttgtgtagagctgttctgatatttagaattttcctccacattactgaccatcctttctgccagttttggtactggtgcttctgatacacatgtgcaggaagcaataacaatatgttgattgtgatgcgtcctaatgtcagtgttgttaaaatgtgaaaaaaaggatatatcttagaattgatgaaatgtatatatccaactactgagtgttaggaaatagtaatataggaaaggaaagatcgccaaattggagtaaattgggaaagaagcatccagaggagtttaaagattgaagctggatcttgggagaagacagaacatgagcagaaaaagcattccaggttgtgagaacagcttgtgaaaaacagaatcagaatcaagtcctaagtttgtcactatcagaagtttagatgatttattttgaaattttgttttctttttataatttattctgaattttcttcatgattaaccagggcagttgaagtttattggtaaagggaaagaaaaaagtatcaatttttttcccccaattttagagtgccatttagaatcatttaaaaaatatatgttcttacctgagcagggtggctcacacctgtaatcccagcactttgtgaggccgaggcaggtggatcgcttgagtgcaggagtttgagaccaccctaggcaacatggcaaaacctcatctctacaaaaaatacaaaacttagccgggcgtagtggcatgtgcctgtggtcccagctactggggagggtgaggtggaaggatcgcttgagcccaggaggcagacgctgcagtgagccaagtcatatccctgcacttcagcctgggcaacagaatgagaccctgtctcaaca

SEQ ID NO: 6607 - DNA, 1054 bp, Homo sapiens
gattaaggtagagattgaagaatccaatggggctcttaaaatattggtgattttttttttccatcctagacaagtgaatttaattagccctttaacctgtctagtgagaaattataatacataccctctgaatatatgattgggccttcttacatataccattggcctcatgatagatctgatgcagaggcattcaaagaaaatagagatattgaaacgttagttcctatctgaaccacctagaatatggatctgcaaaattattctataaaggaccaaacagtaaatacaatattttaggctttgtggagcatcaggtctctgtcactacttaactctgctgttggagcaagaaagcagccatagacaatatacaaaccaaatgggcatggctctgcttcagtaaaataataaaattactttgtaaataaatataaaaacaggtggttggctggatttggtcatggagccatagtttgctgatacctgatctaaaataattactgccacgttgatctttagatctgtctcttttgcttgctttgaaaaaaaagcataacatctaggaaatactaagagctatccctagtttttcctttgcatcactctacttcatgtcttctgcttccttttattcctctttgcagctcgtgatgcgttgggtattaaacacaccatggtgaagattcgtcccttgtcacaggccacaagagcagccaaggccaaagctagagcttatgctggtgagtctataatctctgggtttttttcttgctgatggtggtattattgttctttccagaagttttatagcatccagacatctaaagacatatcacttttatttttagtgttaaaagaaatatgtttttaagaaaaaataaataaaagggaaatgaccatgttggaaatatggcatctgagcagccacttggagtgtgtgagaactaactgcaggcaatgcagcaatcagtttctgatgacatccctacctagtttacctctgtgtttagctgcctgatagagtcactgtaagatactttgttaatgcaga

SEQ ID NO: 6608 - DNA, 1077 bp, Homo sapiens
tgtatgtgactacagtagattttgtgattatttttcatagatctagaataaattttgaaagtctttaatttacatcctctctctgctttttttaaaacatgacaccaaactggcccttttacaatcttcaacgctttacattctcttatgtaaagtcttgactgcaccgtgattgcaggcaactcatttaatatagtcatttctgttgattgatttattatattggagaatgaaagttttcagggccagccaatgtgaatgttttaggtcaatcattttgtgctgaattttctattttttcttaattccttgcccttgtgtctactgttgggctttctctttattcttttaattgttggaggtcaagttagtaggagctttgtttcatgcagtttatcagctattatctgctttcctttctctttaataaagggacatgtttctttgtctttctgtttatacaatttttttcatatttttttcccttgtagatattttcagatgtcaggatagtagaaagtgtgctggtgaagaattaaggatctgggtcccagattcagttctttcactggctgtgtaaccttaggcaagtcatttcagctctctgagcttctgtttcctcatctttaaaataaagaaattattatttcctatcctgacctacatttctctattctattcatgttcttgtatttctaaatttacacctcacattttcactatttctttgtgcttctcaatttgtcttcctactcttactagttttttcatatggcttaccattagaatctatttacttttattagaaagtgttaggaaatgtttcaggccgggcacagtggctcacgcctgtcatcccagcactttgggaggccgaggtgggcagattacctgagctcaggagttcaagaccattctggctagcatggcgaaactctgtctctactacatatacaaaaaaattagccaggcatggtggcatgtgcctgttactcaagagctactcaggagactgaggcatgagaattgcttgaacctgggaggcggaggttgcagtaagccaagatcacaccactg

SEQ ID NO: 6609 - DNA, 1043 bp, Homo sapiens
atatgaaagagaaaggaaaaataatggacttgaaaatcctgacatggcttgaggtgacaggaaagattctagaacagattggaaactgagtttacaatcaaacagccttaagtgcaaacagggatgtagaagatgtagttattgggtgaagccgatggtctgaccagttctagaagtctgccttgtaagatgtcaaaggaaatgcatctctgttccatccatagccttttgcacaccacacacatacaagtcacacgctggagtgtgggagcagagggtacatttacagtgttccagctccctgagcctatagatggctgattccacagtggctcggagttacctgtgtggcagttgtgcagccagacccggtgcccatcatacttgcagcggcactgcagcatattgttggagaaatctgactctgccacttcatagtgggggttcacaatcacctagagtgaaagaggggacaactgaaaatgggtgatttggtttctgaatgagttgactgtggctgtgataatccttacatgtgtttctatttgcttcattaattcttaacaattacccaggaggtaggtactgatgttcccattttacagatagggactgagaagtcccaactgagaaactgatttatccagtgttcactgaatcaatactcaaacacaggttcattggacccagcttgactgttacttccctaacaggacagctcctttaagtgacaggcctgtcggaaaccctgtatgggaaattcttcccttcatttgccctcagggaaagttgtggaacatctggaggaaatcaggctctgtggggaatcccccagccgccttacctggaagatataattcccggggcccacatctgtgatatccacccactggcaatcaatgtcatgccggtaggtgtcccagcagcctacagtcactccctgttctccaaagttggcacatgcgtagcgccgctgcagtcctgtaaggaaggggacagacaggttttgaggcaggacgaagcactctgctaggtcttttatt

SEQ ID NO: 6610 - DNA, 1049 bp, Homo sapiens
caaggcctgaactggggggagaggcggggcaccgggtctgtgagcagcctaggagctgacctgctgggaagagggtccctgtaagcctgggaccaaattgctaccattgtttccaatccagttataatgacagctctgttcatgctacagggaaaggtgcttattatctcaggcgagaccaagtcccaaagtcattgcccattcctttccactttctccacccgtggctatgttctgaagaagaaaaaacaattctgcctttgtcacaggcattgtctctccctctctctggtctggaagctcctgataggaaagaatgttcattgtcacttttttagtggcagtctgttcatgctgttctttgagggccttgccttactactgaaggaatcagcgagcttttcctgcagagccagcaccctggatgggatgtctattttgggcccccaggttcctgggagtccccactttacctggcttctgaagacaaggcctatgatccaacataggaaaagtgtcaaataccattctaacagaacaactctgctggcggtgacgcctctatgggatgttgctgtgggaaacagaccccacgggcaccattgacatagtgaaggcgagagcgatggaggggcaggtggatgccgctgtcctcactgcctcctgcaggcaaggccagcaaggagagcgcacacccctcccaggaaaacttgcctgtggccagggaagggccaaactgctccctggaccctgctttttgttcctaaccctctagtgccaatgcatgggcaggctctaacctgtggcactggtgccaaacccagctatcgcgtccagtctttggacgaaagtcagtccggcccagattgtagatctgtgtggagaagcgcaataggcggcggtatccgtagggccagtccatgtgatccgcagacttggagaggcagttctcctcgtgggcacaatacagctggctgagcgggcggtcctccaagtaggccgtctcctgcactagctgggcgttcatcaccaggtctggtgcacctggg

SEQ ID NO: 6611 - DNA, 1075 bp, Homo sapiens
tggggctgcaggggaggcagtcaagcctgagctcaggcagcaggaggtgaggtgggggctggccacaaaggcagacactggctgccaagaggagactccagttgggtggagtgagggcttcagattcttccatgtagggctgatggggcacaagttaggattcaggcttaaagcagtgggaatgagaggaatcttctcatttccctgcttacaactttatagggacttcctgcacacttacaataagtgcaaactccttccgtggctattaagactgcatggtggagctcttggccatctgacctcacccctccagcttccccatccttattaggctctatgcacattgctgatcttacctctgagcctccgaacattctggtccttttgccctgatgggtttcctctcaagtgtgatggtgttttctagaggaatttcctcagacagactttggaccccgctctgagattgacaccctccccctctaccccaacaattattttccgtctcagccccttgctgctttcttgcagggttctcaccaatattcataatgttttgcccccactgctcccaatagagtatgcactccatgaggtcgggaacatatcagtcttgtttacctgtgtatccaagtacctgccacttggttggtacctgattgtatttgggatgggaggatgtggggaaactgcaagccttcaggaaaatctctttggacactttctgaaacattttcttttacaccaacagtgatgggaaagtagggaaaatccacatcacctctggttttgttgtccaggtctgaaaaagatgatggggtggggaagaggaggtaagttctctgtcttgctgaaaaaggtaaaataaataaatacaataacaattgacaggttatccttcttcaaggctttgcttcaaatgccacctcctccaggaaggccttcctgatcaccacctgcattaggcagttgggcgtgatgtctccctcctctgaatttgtgctccccctttgatgtgtcttctgtggtgcttatcacacactgcctggattgtgctggttgtgtgtgcatg

SEQ ID NO: 6612 - DNA, 1050 bp, Homo sapiens
aggtacatctattaatatttattacaacaatttcttttcacatgtaaagcactgtgctaagagttaggggtatgagataaaatctctgttcccaaagagcctaaagcatagtggatgaatagcacttccctttgcaaagctagaaggcaagctggacactcacctttcccatgacttccagtgaccttgaatttacaagtcatgtctcagtatataagtacaggatatgggtaagacagaccttggtacataaagcattaaaatgaaagtgctatactagaaatgcaaaaatgcaatgggaacatggaggatacaataactatgactaggtggcattttttttttttttttttgagatggagtctcactttgtcgcccaggctggagtgcagtggtgtgatctcgcctcccaggttcaagcgattctcctgcctcagcctcccaagtagctgggactacaggcatgtgccaccatgcccggctaaatttttgtattttagtagagacgaggtttcaccgtgttgcccggggtggtctcgaactcctgagctcaggcaatccgccaacctcggcctcccaaagtgctaggattacaggtgtgagccattgcacccagtcatattttgcttttataaattttttactgaagtttatgtttctataatttatacagaaaaaaatttaaatatagaatagtagaaaaaagaagtatgaaaatcatatgaggataatcatcccactatcctgaaatagtaactcaatattttgtcatattaaaaatatattgcacataataacaatcttaatgaaattcttaaaaagaaaacaaaaggaaaagcccattgtcctgccatcaagcacaaatcaaatgtcccattctaatcttaagagtgattttcttatagggtggtatttttgctatagtttcctcagggttgagtgctataatttgggaagactaattttaaaaatggagccgtagagatttatcatacttcttaaatttactactctattattggattgcttttaggagacactgagttctgt

SEQ ID NO: 6613 - DNA, 1025 bp, Homo sapiens
aattatgaagggaagagtgttccagctgaggcaggagtttgagctgaaaaagaaaggcagagagggagccgacactgtgtctgaacgctgggaaagccattatcataatgctgcttttcttccagcaaaatggggagctaggcagccgaagatatttgtcaaacataattttgtttccttcaaatgctaaaactgtatattttaaccatttttgatggtgatatttctaaaatgttttatacccattcctgcctttcttaacaaaggattctaaatataacttaatcttttcttgatgacgcaggatcatgatcatgagagtgtagttattttatgctgtattccctattttttacatttttttctgtcctctggctgacagctgttagttctctttgaatctgcctccagcaaatccctgccccaccgttctccacaaaatcactcttcctgtgtatatctcacttacagtttctgtttcactgataaactaagtgaataccatgttgagaatcatgtgcctgatatgtagtatacttcaatcaatacttgttggttaaatgattagttaggttttgactgtaagcctagggtagggagtcaatggagagacctgggacagttctttctgggaccatattcaaaacagtgggaagtcagacctccagataatgggttgttactctgctatttttacagtgttgcttagcaagccaaaccaccaactggcttagattctggtgacgaacaactattttttcatgccctagtgatgttggttaccatggtgctctggatgacacagttggcttttttataattgccttttagtggctcaagaatttattttgtgataaaggtgttgattatttctgataaaatagagcaggataattactataaagtacagccttttttttaagctagagaaagggacagttttgtttttccaaatcaaggcggttgctgcaggattggtagaataacatttttgtgtttctcttcctgatttggtagggaatgat

SEQ ID NO: 6614 - DNA, 1035 bp, Homo sapiens
tcatgaccactgcttgctcaggtattctagtttccatttgtttattgggaaagtaatgggatatggtagaaaaagcacaggggttcaagtcttgactccccctttgactcttgttaatcagcctggacaagccatttaacttccttggctttagttccttcctctgcaaaatgggtgtatgaatcacttttcattcagttagtgcttaaaaaaaaagtgacaaaaaattgaattgtaaaaagcagtaatattgtcaagtgttagggatctagggtggtagatttcagtatgaaaagacaagtttattttgctttttatacttgttccctacccttccatttaattgcctggtttttacagggttaattggtgctgggggtggatagaagagggaagattcccataagaagtgtgttttctgagttgcctctgaaacccactgcatgcttctgtccttagataatgacgtgcggaaggttggaagtctggctggatcttctgtctttcgtatgtatctctcaaaccccttcctcgtcctccccatcgtagtcctgcctcagcccgctctggggacctggaccgagcactttgagcctgggctggggctaagacaaatgctggcagcccctttgtaatgttctgccaggaacactgcttcctgccaggtacccacagaccatgggagcttaggttctgtgtgtctggaatgttttctgctgcttctctgctcacatggttggggggatgcaggggttgtgagggaaggcactgcttattgccaccttccagtgaatgcaggcaggtgatttgtgtgcttgggcagaggctcagcccttccttctgtgcaataacaattcacccatggcctttactcaaacactgtcatatgctattattgtgtctgtggggtttgtcctcagtaagaagtgactgcaagatttggggatgtaagttccacctttgtgcaatacgttgcttatctgcctctctttcttggttctccacctctcagctagtggagaggtatctgccagc

SEQ ID NO: 6615 - DNA, 1031 bp, Homo sapiens
gtgttgtatgtgtattaggtaggcagagggacaaggactggaatctaagtcttagatcctgctctccacctactgcctgggaccttgctgtacctctgaatatagacattttatgccccctagagggctgtgatttatttgcattttgaaagcagtgctaattacgaatctggtgctcgcactagattgaggctaggggtctctgcaccaaatattgccatcattatccatagggagtctctttctatttgagccttagtttgaaataagaacacagtggttcacagattacctccaggttgtggtgtggttaaccaacttggcaggtgctttcatttaaaaatgaaacttctgatcaggggtttcccctgaaagtacacagccccactgcaattagcattccctttccccatattcactccttctttcttctcctggtggtggagataattttgaattccccataacagtcctttcaaatccacaaaagcacagagacagagactttggaaccaacggttctttttcagtgctcggttatctattcataatgtgcactgagatcaataatgacagttttctgcttgaatatacagggaatctctaaaaataatatttctactttgcaaaatgtggtaagtggaaatattccttcgggttggctcttgtgtgatgaacatttgggaaccattaaagctccgtgtaaagtgaatgagttcatctgggatcctaacttgggcttagagttcacatcgtagttttgacagacagctggctttggtgttcggttgtctgatgctaaatattgccccagtataatgaattttaataattctagttggtactcttacaggtctatgtaattaagcttcctcatccattttggagaacagagatggcccacggcacaatcacagtcagaccaaagtaggccattccccctcatccctcactgatggtacaaaagatgtaggcaggcaacccctgaaccctcctttttcctcaaatcctcatagggaaaatgggagctt

SEQ ID NO: 6616 - DNA, 1035 bp, Homo sapiens
tgcatttttgttacatagatatattacatagtggtgaagtctgagcttttagtgtggccatcacccaaatagtatacattgtactcattaagtaatttctatccctcaccctctcctgcccttctgggtcttcaatgtgtattatttccctatgtccacttgtacatattatttagctcccacttacaagggaaataatgcagtctttgactttctgtgttatttcacttaagataatggcctctatttccatccatgttgctgcaaaagacatgatttcattctttttgtggctgaataatatttcattgtgtatacacacatacacacacacacatatacaaaatcacattttctttatccagtcatccattgatggacacttgggttgattctgtatctttgctattgtgaatagtgctgcaagaaacatacacgtacaggtatcttttttacataatttcttttcctttgggtagatacccagttgtgggatttctggcttgaatggtagttatatttttaagaactcatcagtttgttttcaaggaatgaggcccagaagtgaaatgtacctttttctgcccaactcttctgctttttacaattaattaccttggtgcttcatgttgttctctacattaccatcactgtccctgtccccgtcagttcttagtcactctggagaagggtctggtccttcatcacacagtggatgggtagggccctgggcatctgacttcaggaccccttgtttcacatgcccttattaaacaaacagtcttgctgctccatgtggcctcttcctcaagttactgggtcaaggcctgaggcttcttgatgccctttgattctagttgcacactattttactctatccagccacatttctggagtgtcttgctccccacccttacttcttggggaagtcagcttccccagaatgactttaggtttgtgatgatttaagagctttagtgactttaagagctttagtttgatgatttaagagctttaatgactttagctttgtga

SEQ ID NO: 6617 - DNA, 1103 bp, Homo sapiens
gaccagacaaggtcttcagagaaggtggtgcctcagctgagaactagtgactgaggagcagacagccattagctgaggcgggaggaggtggggtggggaagggaaatggcattcatcgaggtggggaaagcctgcttagttaaggatgcccagggaggccagtggctaaagcaaagcaagagaggggaaaggaggtcccaagatcagatcagataggaaagcaggggccaggtcacagcaaggaatttggattttattcagacaaaacaggaagctgatttgtgttttaaaaatgtgattctggcagctgaggtgaaaacagattataagattctaagtggggagactgtggtccaggtgaggctgaggtagctgggatttgagtggagacagagataggaccgatgggctcattatgtcagatggatcgcaaggctgcatgtggggctgagggagcggcaggagtcaaggacaatcctggggtttctggtttcaggaactgcatataagtggatgacacttactgagaagggggaagactggaagtggactccttaattccataatcagatcaaggcagtgatgattatggttctaatgagaaaatgattcaacctattattttactctttctgctacatggtttgccagacaacagcttggcagctaaatagatcatcaaccttccatgactcattctaaatagaggctaatcaaatattttgctttatctcaagagacaggattaaattcccaaggttctaccctgaaagagcagaatctataaagaatctgatttttcatttgaggcccctgagctaaatctgtgttaagagaagctgacagcctcctcatccccttttttggaagaagcagaaggattgggggagctttgcagtctatcacttggggtggttccacggttgagatgatgtttggagtcaccttcggtatcctgttttctgttgttcctggagagggcagctcacataaaaccaagtgacatggtcttaattgaacttttccaagaagtatttctttaaaatgtgaaaagaacctggctaagcattcaggagatctttgacagaaggcctgcagatgat

SEQ ID NO: 6618 - DNA, 1031 bp, Homo sapiens
aaagcagctcagctccttccccgggctctgatgggaagggtgaggcccatcaccaccacccagtgttaccatcgcctgaaagtcttatgggacctcagtaaacaacacctgtctctccctccttccctgtctccctccctcccccttcttcctccccacccatccctccttgtcttttctccatctctcaccatctgcagtaaaccggtccccttctcgctgcagtgggttgaatcgctctgagtctccaaaccgagagcgcagtgactttgggggcagcaacacccagctgtacagcagcagcaacaacctctacatgcctgactactcagtccacatcctcagcgatgtgcagtttgtgaaggtaactcccccaggaaggttatcctctccctcccagtgggcagtgttggctggctgagcgggacaagaagactacccccattcctaggagggatgtgtgcaccattcccctgtgttccaatacagtgctgggtggtaactgctactggctgtataaaggctgttttcagtaagctttaggacggttcattatttgtcactcttttaacatctcctgacccccttttttcatgtggggaaatgaggcacaaagcaatagattagcttgcctgacacaaattgctgccagaaccatttcctttgcatcccctaccattggcatcagtttgattttattcattggtttttctaagataagatttttctaagataagtttgcaggtgattaataaacaaagtgatgtgtagaagaaaccatgctatacatctgcctgtctgttggttaaaaagaagaaaccatgctatacttttacatgtgataatataattttataccttaaagtctaaaacacaacttgacctgtgtgttaactgaaaatcttttgtagtcactagtaagaccccttgaaaattactaagctatttgaagagaaccatgtgcaattgcccaggagagaggtagcaaaaggctcatggcctcataattaaagaggaggggagctatttcc

SEQ ID NO: 6619 - DNA, 1043 bp, Homo sapiens
gcttcccaaagtactgggattacaggcatgagccaccacgcctggccaataaaaaagttttaaaactcttcttagagaagaaaagcttcctaaatcttttcaagaacctaacataacattgctgctaaaagacaacaaaagggaaaaaagtagaatgagagacctagatcgtaccttgatactaacttcccaagtaaacattaatgaacaatattaatccagcagtacattaaaattacccccttgattgagagtcatcccatgaatggattataagagatataaaaccaatcatgctgctagatagagaaaacccaaatgatcatcacaacaggtaagaaaagcttggctattcctgagataaatgcttagtaaaacaggaaacagtggatacttcctgaaaatgactgaaaaaaattcatttaacccataagtcagcttaaaaacagtgaatcgtttagtagaaatcccatttaagccaacaacaaggtaatgttaccaattatcggcactattatgcaccaatgttctgtttgtatttataggtgtgagcatctgtgaaagaatactatctgaaatgtgaaacataagcaaagttgacattcaaggggatgcagaactaaacatagctgtacattacagagaggggcaaaggcagtgcactggggtgaaaatgctcagtgtgtgtcagatttggtgtgctaactactctgttatttacagtgatccttactgagcactcatcccttgctattactttaaaagttttgcccccacattgtggtttacctgaattctttatgcaaattgctaccaagatgatataacacaaatgtgcatttattttttatggatttgtcatccagctaagttgaatgtcagtttcatacatgacttcacattgcagatacctaagccactctagagtgctaatacttcctaagcaaatgagcaagacctcccttgaacatggttttaacttctggaaacacgatagatgcatagataccagtggaaacattcccaggcataatttttcattt

SEQ ID NO: 6620 - DNA, 1045 bp, Homo sapiens
ttgaccctgggtaatcagatagggttattgtatgaacagacctaatgctcctgcacgttctggatagaagtcaatctactgaaatagcaggatgtagttttaaaaaatgtgtgtaactcatatagtcttagccctgataagtgcttctaaattcttattcactgcctttattctgctgtgttagtgttgctctctgtcatacgtgggtcaggtcagaactagctcaaatacagtatgtgtattatgactttaaggagtggtgtcagacaagatgggtaaagaatgtctttcatgggactgcagttggctaaatggctgtgtataagtagtgaaattgaagccttgtatgctcgtcgtcattctatcacagtatgatttgagtttccctaaccggtaaacagcaagaaaaaatgatctgttattttttactaaagttacttgatgctctttagcaagctgacagaataattctaattttagcaaatacaaaaccatggtaatcctagcacatttggattctgtttaaccctgaaaactcttttggcagcaaatcttcaatgccaatttagataaatcccactaggaataagcactgaaagacgttgagtctagttcccagctctgccatgtgaagttgggcaaattacagtctctgagcttttatttcatctgttaaatggagataatacctcctagatttattaaaagggtcaatttagaaaatatgtattaaaatggtttgaaagccatttaagtacctaatgaatatttctatcactgtagcccaaaaagattcctgcctagaagactttatgtctcttctcctcatttggtatcattctattgcctgagattgttaattaacttttatgtatactcaatattttctcccaacttggttgctagttccttgagaactgaaaccatcaattgcacttcttggtatcctccacaataaggtatctaggtactcaaatatttgttggttgattaaaaacataaaccacaagacataattaactctttttaaaattgtggtaaaaaa

SEQ ID NO: 6621 - DNA, 1070 bp, Homo sapiens
cacttctctggtgagtcctagcattctctactagacaatctctttaaaatatatctacttactcttctggttcctctccatgaaggaggcacatactacctgtgtctagtcagccatcttctcattgtagttttaatttgcattgctctaatgactaatgattttgaacatcttttgaacagattgcttatttgccatctgtatatcttatttggtgaagtgcacaaatctttcgtctatttacacctgggttgtttgctttctcattatttaattttgagaattcttttcatattctagatacaagccctttatcagatatgtgatttgcaaatattttctcccacagaaggataacccactgtgtggcttatcttttcattctcttagtagtgtgttttgaagaggagtagatcttagttgcctttttcttttcttttttttttttttgaggtagggtctcactctgtcacccaggctggagtgcagtggcacattcatagctcactgcagccttgaactcccgggctcacatgatcctctcacctcagcctcctgagtaactcggatgagaggtccatgccaccatgcctggcatatatttttatttttaaactttttttaaagatagagtctgactgtgttgctcaggctggccgtgaactcctcccacctcagcctcccaaagagctgagattacaggcatgagccatcatgcctggcctagttcttagtttcaatggagaccaatttattaaggttttcttttggtgtgtgagtgtgtatcttgcttttgctgttgaatctaagaaatttcaaggctaccaagattttcttctctattttcttttataagttttatcgttttagctcttacatccaggactatgatctatttcaagttagtttttataagtgatgttagattttttttgtcactgtcagtttttactcattaatatttctctgcgttcttatcatgtgtgtacataaagagcttccttttgtttttccaggtacaacagcaggttcttttctgattccgcaaagtcctgcatggggtggaggca

SEQ ID NO: 6622 - DNA, 1031 bp, Homo sapiens
atgatgaggtttcccaatggtaacagaatcaaggggcactcaggaggggcatgggtctgggggcagggccaccagttggaaggcttcattagaagatcttggagaggattttaggcagttgaattaagcacccctagtgactcattggatggaaagggagaaagaaagttagaaggaagatattctaggatgactcccatacaggttcctgctctggtgaatcacagggtattttgtcaagatggagaatatggatggaggaggtttgggtggatatgatgagagtggagagataatgagtttatttgggacaatggggtgcctgaaagacaggtgaagagagatgggtaaacttggaagggagagtgtagaccacatgacactcctccaaattcctttagagggtagggtgggatggagtgtggagggaaggagaatccacaaggggaaatgaagcaaagcaaacaactagcacctaatatgggacctgttgggctgattttgctcagggctgggcatcaagcacatctggagaaaaattgcaaatgtaattgtaaggcaagcctttaaagagcagttaaaaacctgttttgaaacataggtttctataacttgttgcaacatgttgagttacagcaaatgaaatagagaaatactctcagtgctttttaatttgccctgctgactggaaacctcggaactcagccctatgagctgttaaccagataagcattgctggtttttgtaaagaattatgcttgacaaatgcttgagggcatatggatttattgaaggaagtattgtccaaaccagactgacaaagaaagttttacaaagaaaatataatgaaaaaatgttgggattaaaatgtaggtcttttctgttttatgatgtagttatgaaatgtaaattagaggatgtttcaatgaacttttgaattataagttaatatagttcataaaccataggaattaagtactattttaaaaataggaattatacttccactcaaaaacacctattttgtggaa

SEQ ID NO: 6623 - DNA, 1056 bp, Homo sapiens
cagccctccagaacaggtaagaatgctgcatgtgccatatcctgtcatttgtgtgccaacaccaaggttgacatgttcttacagtagtaaataaagcaggaatcaagaggcatttacgggactgaggctagtcagaagtcaatgtggcagattaacatccaagatggagtcacttttgtctatatttaccatttctggtctgcttcattcctttgtgtagatccatatttccatctggatccatatttccatatttgcttttacctcaagaacattctctagcatttctagtagagcaagtatgcggtgataaattctttcaacttttatatgactgaaaaagtccctattttgctttccttttgaaagaaatgttcattgggtatagaactctaggttgatcattttttttcctttcattactttaaagatgatgcttcactgtcttttggcttgcattctttctgagatgtctgctgtccttttaatctttgttctctctgtatagaatgtatctttttcctctgaatacttttagaattttctgtttatcactggttttaagcaatttgattgtgatgtgctttgatgttgttttctacatgattttatttgtttttttttttttttgagactatctcgcgcatctcccaggttggagtgcaatggtgcaatcatagcccgctgcagcctcaatctcctgggctcaagctatcttcctgcctcagcctcccgagtaactgggactacaggcatatgccatcatacctggctaatttttttgatttttagtagaagtgaggtctcgcagtgttgctcaagctggtctcaaactgctgagctcaacctatcctcctgcctcggcctcccaaagtgctgggattactggcatgggtcaccgtgccctgcttacctgattcttgtgcttgtgatttgttgattcttggatctatggatttgtagttttaatcaaatttggaaacattttgtccattacttcttcagatttttgttgttgttgttctcccctgcttttcctctggggactccagtaac

SEQ ID NO: 6624 - DNA, 1135 bp, Homo sapiens
gtttcttaaacagaggaggtgtgtgtgtgggtatggtattggggtgagtatgtgtgacagtgaatcagacctctttagggaaggtggatgtgagggatgccaaggcttttgagacttttctcttgggcttttggtcctctttagagattggctagtgtggcatcggcaaaacaggagggtccagcaatgcaaataattggccatgatggctaaggccatggctacaaattatatatgacaaaaaaaaaagaaactatatatgaaaaaatgcatgaaaggtctggtgatccattcattttaggagcctaaatagaggaaggcttctagttggttgaaagtgtaagaaacctgattaggtcataagaggtcagagttccaggaaaaggtaatatggctactgcccagaggggaaaactgttctttagttactagtttgtatgcacaatgagaaaaatggagactttccactgcataaatgccatttaggcctatcttcctctttagtgatcaaaggtcagctgacattttagccaaagcacacatggagacttcgaaaggaagagaaagaaaagttgagttgcaccaaaactggagctgtaaagttccttattttggcaggaatcagagaggataacaagatactttatttggaaagcaattaaaactttctaagaaagagaccagttgattttgaatagagctgtacaaagacacggaggagttaacagaccaacagctccattttgtgagctctaggaccaaaccaatcaatactatttgatacatcttttgggcagagaaacatgagaaactctgtgacaatatcaaggtagtatagataaggtacatgttcttgagaaacttatggtctaaacaggtagagcaagcaaatatgaaagaaatcttaggggctcatactgaaatataaacagggaatattgacgtccacattttagaacagaaggaagaggccttttcaaatcattctgggtactaccagtcagcattgttgggtagaggctttttaagaactgagaagccatgtccaaggagacaggagaggggaaggagtaggtagagaagcagatggatgttaaagagaaaaggaaggctgtattagaacagtggttctcaa

SEQ ID NO: 6625 - DNA, 1050 bp, Homo sapiens
ccagcgtgggtgacagagtgagactctgtctcaaaaaaaaacaaaaattgttttaacataaacaaaactagaatagtgtaatcaactcctgtgtacctgtcaccctgctttcctactaacatttatcagctcctggcccatcttgtttttatctgttttcccatccacaatccccctcttacttcaactgggttgttttgaagctaatcccaaacatcctataattacatttgtagatattttaatatgctctctgaagatagggactcttaaaaaaaagaaaaagaaaaacacagccacagtatcattattgcctttgtggtaaacacaagataagtaggctgacttagaaataacccacttagaggtgaggaaggtgaagcgggaggaggtaggtcttttaataacttgtgggaatacggagtggcttattgcaaaggaaagtattagaattcttttctctttttttaaaatttaattatttttgtcacacagatatcagtgttttaaatcggcttggatgtaccaagtcttacatgaaggattccactttccctatgactacccaaacctgcggacagcccagctggtgtatgaccgagaggttcagtggacgctgggagccattctatataaaacacgattcttaccactcaggtaaagtaagactgaccaatctggtatcttgagctcagaggatatcagttgatgcctcagaatcggtttctttctttttttttttaaccagcttagaataggtcttaagtgaccttcctctctaccccctcacaaaaacaaactcctttacttccatgtgagccactgttactaccaggcatgctcgaacagaaagaaggttgagcattactggtctggagtctcagctttgctgtttcagaaatccagctttatttgtttactcacaacaaaccagtctttaggactgagctcttactaatcacttccaagatactgacaagctaaaatgtcattcttgggttaccctggaaaacacatctgactaaagaacaggggtaggatgtctagagc

SEQ ID NO: 6626 - DNA, 1060 bp, Homo sapiens
caacatgcccatctaatttttgtattttttttgtagagatggggttttgccatgttgcccaggctagtcttgaattcctggctcaagtgatctgcccacctaggcctcccaaagtgctgggattacagccatgagccactgtgcccggccccttttttaactttgtattggggatactgtcagaacaaaaagaagtggtttatacctgtgtatacgccaaagccagcagagtcactgctgccatcttggtccttctaggaaggggaattctccgagagaggaagtagagcactgtaatggcagtgactgaagtgattccctgcagggaagaaagagtctatcacattagatagaagtgccaggtttctaactcaccttacatgtatctcctctagaaccactcagcaaccatgaagtactttcctgtaccagtcacagagaacctccctgcagtcccagcctgatcactcctccacaggctgtctcttccaccatcctcttctgcttgccacttaaacgtcggtatcacccaggctccacctaagattctgtatgtactttatacaccctcactcccagtgatctcatccaccttccaatgtgggtgtccccctcatttttaattctttgcatccttatccctaaccatatctctaatcctatattcttaaagcagggctgaccccagcacatgagggttattattttcctgggctgtgagtggagaaagtgctggtgctgccagctggtgctaaaaaagacctaaagtctcattttcattcctatctcttcagaacaagggtccaggactggcaataatggtctccttcctcttccacggtatcagggagaatgttttctatcatatttctacatttatttcacttcatttccttttcagtgctgtccacaatgacaatttcaaccaggctttacttatgctaaaatactgtgcgcaggtggggactcagcccacaccaggtaacatgcctcagcccagcccccgttggacagctgagccctctggccccctctctctggacgtgctgctctcatctca

SEQ ID NO: 6627 - DNA, 1048 bp, Homo sapiens
tattcctttgtgtagatcccgtatttctgtctggtttcattttcattctgcctgaagtactttctttaactttttttgttaaaaagtatgctagtgattcattccttcagcttttatatgtctaaaatagctttttccttcatttttgaaaggtatttttgctgggtatagaattctaggttgacaggttttttttttctttgaagatgtttttccattgtcgtcttgcttgtattgtttctgacaaaaagctatcatccatatctttgtttttctctatgtaatatgtctcttttttctacctacttttaagatttttttattattggttttgaacaattttcttatggtgtacctgagtatagttttttcatgtttcttggacctgtgcatttatacttctcatcacatttggaaaattttcagcttgcagcttgttctccactccctcctttagagacttaagctattcttacattagactacttgaaattgtcccaaaagtcactgatgaacttctctatttaaaagaaaatctcctttctgtgttttcattttgcatagttgctattgttttgtccttgagcttactgaccttttcttctgcactatctaatctgctattagtctctcctggtatgttttcatctcatacattgtagtcttcatctgtagaaatttgagtctttttatgtctctgatgtctcttaacttttttgaacatgtggaataaagttatgatagctgttataatgaccttgtctgcgaattctaacatctatatcagttctgggtttgtttcatttgatttatcatctaataatatatcttattttcctgccttgtaattttttattggatgcaagacattgtgaattttactttattggttactagacatttttgaattcctacaaatgttccaaaacagtttggtccttttgggtcttgcttttaagatttgctgggcaagtctggagcagtggttaatacagagctaattattccttactactgagtcaggattcttctgtgaactctaccctgt

SEQ ID NO: 6628 - DNA, 1013 bp, Homo sapiens
tgtaagatttttaaccccttgacaccttattgagacaaatttcttccttttacccctccctattagattctgtgaaggtggatctagggagtagtgcttaatatgaattattttcttcttcagggtataaatcttagtgggggtcagaagcagcggatcagcctggccagagctacctaccaaaatttagacatctatcttctagatgaccccctgtctgcagtggatgctcatgtaggaaaacatatttttaataaggtcttgggccccaatggcctgttgaaaggcaaggtgagaaatcattgaacatgatgaagatataaaggtggggtgggagggagaggggaggacatgtctggcaagtaagacagggaagatggtggacatatggtaatcaacacaacttcatattatttttatagactcgactcttggttacacatagcatgcactttcttcctcaagtggatgagattgtagttctggggaatggaacaattgtagagaaaggatcctacagtgctctcctggccaaaaaaggagagtttgctaagaatctgaagacatttctaagacatacaggccctgaagaggaagccacaggtatgtaagaaggattgggacaagatagaacttgggccatgggtggaatggtaaatcaatatctaattcctgaactgctcagtatccagtgaactagatttggaagcaaactacccagagattcaaactctgctttctgggttctgtgtctctttgaggaaacatagaaattgaaactctatgcctgggccaaactggtgacttatcctgctcatctgatgtctgacacacaatcaaaggacactctttagaagggtacaactgaaagtctgagtgagtaacccttgtggaagaaacaccagtggcacaacggtccctcttttagggatgccatgttcctattgactctagtcacacatgtcatcccatctaccccaaatccattaaaaccacttcctcgacagcttcat

SEQ ID NO: 6629 - DNA, 1022 bp, Homo sapiens
tgaccaaacagctccttgagcacacggtcctgactctgcacagtgtgcacaatgattttcaccatctctgtgctgtcactgtaggagtgatctataaaagacatcagtcagtggatataacctttcttctgtaacatatcagcctccaaacaaaaaattcctcaaaaatccctgaaactctgaaactaattttaattaataaacatctccatttaaattaaaaattgggttaagataaaagatataaagattacctataaataaaatctagttatatataaaaaataaagtttgcaggtgtataatgtatatataaatttatcagtaagagaccttagttgcctgtgcttgagaacaatagtcttggctatctttaacccatactaacccaagccctagacacaaatgcagcctctggccaagggaacaatttttcttggatgattaaccacatatttagaaacagtaggacaattcatcaaactttcattacctaaaggaaggaggcccttgaactaggttgcttggaatttcatgtttatccgtctgtttacaacccagaaaaactttgaaaaaagctcattgaaaccaactagtaaagggacctgtagacatcctgaaagttccatttgagggcagtatgacatcttaaagccaactggcagcagccagataccctcaaatgggatggctgttggtcacaatgggttctacagtttaaaatgtgacctcgattttaaaaaaaaatcattaattgttatatttcagaaaatggctaaaggagttgaaagttgcttatgcatcatgctggtatattctttggacaataattaagcctaaatgcaataataataatatttgctactctctgcttataattttcccatttaatcctcacagcagtcatgtgagaagactacttttgttacccccattttaccaaaaaggaaatgatgagcatcaaaggaggtttaaaaaacgttgtgtcctttgttatctatcactccaaatacttcccccat

SEQ ID NO: 6630 - DNA, 1385 bp, Homo sapiens
cggaagacgggacggagatgttagtggtgggcgccccccgagggttcaccactgtttcctgagaaacttccccagtgcccacccacccgttctccgtgtgcccgagggccggtcctgggctaggctccgcgccccagccccaaaccgggtccccagccccttccagagagaaagctcccgacgcgggatgccgggcagaggcccagcggcgggtggaagagaagctgagaaggagaaacagaggggagggggagcgaggagctggcggcagagggaacagcagattgcgccgagccaatggcaacggcaggacgaggtggcaccaaattcccttcggccaatgacgagccggagtttacagaagcctcattagcatttccccagaggcaggggcaggggcagaggccgggtggtgtggtgtcggtgtcggcagcatccccggcgccctgctgcggtcgccgcgagcctcggcctctgtctcctccccctcccgcccttacctccacgcgggaccgcccgcgccagtcaactcctcgcactttgcccctgcttggcagcggataaaagggggctgaggaaataccggacacggtcacccgttgccagctctagcctttaaattcccggctcggggacctccacgcaccgcggctagcgccgacaaccagctagcgtgcaaggcgccgcggctcagcgcgtaccggcgggcttcgaaaccgcagtcctccggcgaccccgaactccgctccggagcctcagccccctggaaagtgatcccggcatccgagagccaagatgccggcccacttgctgcaggacgatgtgagtttcccagcctggccccgtaccgccgggtcgcaggcgcgggctgggcttccaggggacgggttggtggcagaagagaggggagagctccgcggaggacttggtcatctttttcgagttgtgctgccttccgtgagttgggaatgtggattgtaatttggggacttgagtctccaactttagtttcttaagctttaaagaaaaatccggtcgtgctggtgcttttatgaattatgcgggttttcctttgtcttcgtggggatgtgagtgctttacttctccttcctactgccgcctcccgataggtttcgcgcccctcgtccccctcgccctccgcccctaatgtatctgtacagtttcagggaacttttctccgttgcgtctcggatacaccctaccctcagtgaactacggcgctgcggaagggtccgtactgtccacccttcccccagcgtgattagagagcggagtggccccagctgcctccacgtgtctcttctcctgactctcctcttcctcccccttccagatctctagctcctataccaccaccaccacca

SEQ ID NO: 6631 - DNA, 1008 bp, Homo sapiens
tcatactacacctggccctctgctgttattttaataacaccctggcttatgggttctgagctctgcaggagtagtttgtggcccttaaaaccttagagaaggcctagatagaggtgaaaggagatagctaggccctgggagaatgcctttaagatgaagaatgagtggtaagagcactattctctctcctgcctttctgactccttagttcctgggattctttagcttatctttttttcctgggttgagaggttggggggtgatatttttcaagtggtaaaatctaagggatgtggttatccctagagttcatggtaaagccagttctcacccaaagcctgacgaagacagtttctagcatccagagagtgtctctggcatcctttcccagatggaactcacactgattggtgactcccccactgtcttctcctggcaggggtattctactattttgtcagtgccctgggcataacagcaggagctcatcgtctgtggagccaccgctcttacaaagctcggctgcccctacggctctttctgatcattgccaacacaatggcattccaggtaagaagttgtctctgctcagctgtttgtcctccacactattaatgatccggggacagaaaggagggatcagcaccagagaggagccacacctgacagccatttcactttcctctctcctgtagtcacctcaagttccagttcagtccttaagtccataaagcatgaagagacttctgagtcttggaaaagggaactggaagataattggaaaatactcctgatgtgtaggaatatttttgatcctaaggtccctgtgttgtcacacaatctggccgttgtggctcttcatcataaggggctttggcacataagccagagactgaccttagattcctgggcagacactggacaataaattcactatttaaggtaaatatcttagggaggcagagctgggaggatcactggagcccaggagtttgaagctgcagtgag

SEQ ID NO: 6632 - DNA, 1672 bp, Homo sapiens
atacaaaaaattagccaggcgtggtggcgggcacctgtagtcccagctacgtgggaggctgaggcaggagaatggtgtgaacctgggaggcagagcttgcagtgagctgagatcgcgccactgcactccagcctgggcaacagcaagactccatctcaaaaaaaaaaaaaaaaaagtttatagcaaagacagaatgaagggaaatggggaaagggaatgcatcatagtcattaagctgtagcaatgggcaaatgatagcatgtggcgtttggcttagcttggagcaagaggaagaaaggaaaccaacttagtggtggcaatatcccaagaacttgccacatttgcatgatcatctctgccatagcagcttataccttgaaggcttccaaagttgtcctgtggagcaaaaggaaggaagagagatattggtacattctttaagggatggaaaaagtcatgaagaagcccagaggtcgtttgaaaatgcagtcatgatcacgagttgcatgcctggccttgttattgggttgtatgagctcttttgcaaggcaccagaatggtgcaccctgcagctgcagcttatctactgattgagaccctaggacacaaggctgcctgcctcatgttccccatgcctagggattaggtaccccatgaggatcttttccaacattccttgcttaaagaattgcaatgttctcacttcttgaaactctctgagctctgtatgatttacctccgttccacccaccatataactttcaagaaacagcagttctattgctatggtcctgggactttaagttgcttttttctacttaagcttcagtggcaagttgggagaagaagggaggcaactccatgactcctttggagcccagattcctgggtattttgtgaggttgggctgagcgccttgggctcttgatacctgtccattgggattctcctaatagggtgtctatcctcaagccttacattcctcttctctctctccccagaatgatgtctatgaatgggctcgtgaccaccgtgcccaccacaagttttcagaaacacatgctgatcctcataattcccgacgtggctttttcttctctcacgtgggttggctgcttgtgcgcaaacacccagctgtcaaagagaaggggagtacgctagacttgtctgacctagaagctgagaaactggtgatgttccagaggaggtgagtgaagccctgatggaggtggggatatggccctggcacctggtcattagggaccccattttttctcctgagactttcaaaatataagctgagaaatttgctgggtttgcatgttcacaatcttaatttaaaatcccaatttttaacatcccacgggcccgtagccatagactattgctccatttctttctctctgactatcttaattaaacccattacattcaagagatgtttattgtcctaggacagtcatagattcaaagatgattatagcctagttgcctaggtttgtttgtttgtttttgtgtttgtgtttcaacagtctttctctcttgcccaggctggagtgcagtggcacaatcatggctcactgcagccttgacttcccaggctcaagcaatccttctacctcaacctcctgagtatctgggactacaggcacacaccgccatgcctggctaa

SEQ ID NO: 6633 - DNA, 1995 bp, Homo sapiens
gaggtacaaaggggagggagattgctcaatgggcaacaccaaggaagtgatatgaaataaatagtgttggaatccaccaacggatagaaatttttacaactatgtgtggggagagacagtgcaaacagaagaaacagaatgagctaaaacacgaagcatgttccagcaatagagtccttttgcttgaagtatagggtatgggaagaagtaagactggagagactaatgccattcttgtcgagtcctaaaagcagacttaggacttaattcaataagcaataggaagccattacatcttttgaactgcaatgtggcatagttacggacgtgctttaggaaggctgcttttagaacaagtgtaagaaaccactgagccaaagtgagaggtagggacataagttaggtaatgaggacccctgctagcgaagcagtggcagaaatggagaaaagagttgggtgcagggaatgtcagtgatgtaaaagtcaaagacttgactgctgaaggaatgtagggaatcagtgcccttggaatgtcaatggcctggtctacattgagaatgaagactgagaaagggcttcctgagggacagagagctgcaggtgatcaaggacactcaatgggtctctgagggaaaagaagaccaaagaattagggagtagctagcagaaaatggaggcatgacactaaacacagactgaaaaagagtgctgattagaaagagaaaggagcccaaaggcagatgggaaaaccagccaaggatggagagacgtctgttcattagtttgtagtttggacctcacctatcttaccaatgtggtattatgctctagtaaaaagtcagcgatggccgggcatggtggctcatgcccgtaatcccagcactttgggaggctgaggcgggaggattgctggaaagttcaggcattcgagaccagcctgggcaacatagtgagacctcatctctacaaaaaattaaaaactaaatgggcacgatggttcatgcctgtggtcccagctactcaggaggctggggtgggaggatctcttggcccaggagttcaaggctgtggtgaactaaggtcacgccactgcactccagccttggcaacagagtgagaccctgtcaaaaaaaacaaacaaaaataaataaaacaatgaacttagagtcagacaagcaattcaacatggaagaaagacagcccatcccctcccaattagtgtggaagatccatgtaggtgtggagtccccctccattgacctggtgtctggtctgtcaatgtaggtactacaaacctggcttgctgatgatgtgcttcatcctgcccacgcttgtgccctggtatttctggggtgaaacttttcaaaacagtgtgttcgttgccactttcttgcgatatgctgtggtgcttaatgccacctggctggtgaacagtgctgcccacctcttcggatatcgtccttatgacaagaacattagcccccgggagaatatcctggtttcacttggagctgtgggtaagtcagctgtccaagtaagactacatccagtggtctgctgattaggggattaggctaggagccagaaaaactagataaatctgttttttatggctactttgtatctcagtttttccactataaaattagggggcagtatactggaaaacgcttttgagagtcaggcaacatgttttatgtaaaaatgaaaggataagaaacaaaacacaaaaaaacactgattttgattccaggttctaaaacaatttccaaatgccatgtatgctccgggcccggcggctcatgcctgtaatcccagcactttgggaggctgaggcgggcaggtcacctgaggtcaggagtttgagaccagtctggccaacacggtgaaaccctgtttctattaaaaagcaaaacaaacaaacaaaaaagaaaaccaaatgccatacatgatgagcaccttagagttttcctttctttcatcaactctgggctg

SEQ ID NO: 6634 - DNA, 4881 bp, Homo sapiens
aaactgtcagttctcctcccacaaggctcccagacagccacgggtgaccagggtctccaatcactccttaagatgcctttgactggctgggcgcagtgactcatgactgtaatcctagcactttgggtggtcaacgtgggagggttgcttgcaacatggcaagaccccgtctctacaaaaaaagtaaaataataaaagtaaagatgcctctgaggggatctgtttggttcatattaaaagagactgaattcatccattcaacaatagcgagtttctcccaggtgtgaggtaccctgctagctaactggtgtgcacaaatcaagaaaacctcaatgcaccgtcactccataacttctcgcttttgtttcaggtgagggcttccacaactaccaccactcctttccctatgactactctgccagtgagtaccgctggcacatcaacttcaccacattcttcattgattgcatggccgccctcggtctggcctatgaccggaagaaagtctccaaggccgccatcttggccaggattaaaagaaccggagatggaaactacaagagtggctgagtttggggtccctcaggttcctttttcaaaaaccagccaggcagaggttttaatgtctgtttattaactactgaataatgctaccaggatgctaaagatgatgatgttaacccattccagtacagtattcttttaaaattcaaaagtattgaaagccaacaactctgcctttatgatgctaagctgatattatttcttctcttatcctctctctcttctaggcccattgtcctccttttcactttattgctatcgccctcctttcccttattgcctcccaggcaagcagctggtcagtctttgctcagtgtccagcttccaaagcctagacaacctttctgtagcctaaaacgaatggtctttgctccagataactctctttccttgagctgttgtgagctttgaagtaggtggcttgagctagagataaaacagaatcttctgggtagtcccctgttgattatcttcagcccaggcttttgctagatggaatggaaaagcaacttcatttgacacaaagcttctaaagcaggtaaattgtcgggggagagagttagcatgtatgaatgtaaggatgagggaagcgaagcaagaggaacctctcgccatgatcagacatacagctgcctacctaatgaggacttcaagccccaccacatagcatgcttcctttctctcctggctcggggtaaaaagtggctgcggtgtttggcaatgctaattcaatgccgcaacatatagttgaggccgaggataaagaaaagacattttaagtttgtagtaaaagtggtctctgctggggaagggttttcttttctttttttctttaataacaaggagatttcttagttcatatatcaagaagtcttgaagttgggtgtttccagaattggtaaaaacagcagctcatagaattttgagtattccatgagctgctcattacagttctttcctctttctgctctgccatcttcaggatattggttcttcccctcatagtaataagatggctgtggcatttccaaacatccaaaaaaagggaaggatttaaggaggtgaagtcgggtcaaaaataaaatatatatacatatatacattgcttagaacgttaaactattagagtatttcccttccaaagagggatgtttggaaaaaactctgaaggagaggaggaattagttgggatgccaatttcctctccactgctggacatgagatggagaggctgagggacaggatctataggcagcttctaagagcgaacttcacataggaagggatctgagaacacgttgccaggggcttgagaaggttactgagtgagttattgggagtcttaataaaataaactagatattaggtccattcattaattagttccagtttctccttgaaatgagtaaaaactagaaggcttctctccacagtgttgtgccccttcactcatttttttttgaggagaagggggtctctgttaacatctagcctaaagtatacaactgcctggggggcagggttaggaatctcttcactaccctgattcttgattcctggctctaccctgtctgtcccttttctttgaccagatctttctcttccctgaacgttttcttctttccctggacaggcagcctcctttgtgtgtattcagaggcagtgatgacttgctgtccaggcagctccctcctgcacacagaatgctcagggtcactgaaccactgcttctcttttgaaagtagagctagctgccactttcacgtggcctccgcagtgtctccacctacacccctgtgctcccctgccacactgatggctcaagacaaggctggcaaaccctcccagaaacatctctggcccagaaagcctctctctccctccctctctcatgaggcacagccaagccaagcgctcatgttgagccagtgggccagccacagagcaaaagagggtttattttcagtcccctctctctgggtcagaaccagagggcatgctgaatgccccctgcttacttggtgagggtgccccgcctgagtcagtgctctcagctggcagtgcaatgcttgtagaagtaggaggaaacagttctcactgggaagaagcaagggcaagaacccaagtgcctcacctcgaaaggaggccctgttccctggagtcagggtgaactgcaaagctttggctgagacctgggatttgagataccacaaaccctgctgaacacagtgtctgttcagcaaactaaccagcattccctacagcctagggcagacaatagtatagaagtctggaaaaaaacaaaaacagaatttgagaaccttggaccactcctgtccctgtagctcagtcatcaaagcagaagtctggctttgctctattaagattggaaatgtacactaccaaacactcagtccactgttgagccccagtgctggaagggaggaaggcctttcttctgtgttaattgcgtagaggctacaggggttagcctggactaaaggcatccttgtcttttgagctattcacctcagtagaaaaggatctaagggaagatcactgtagtttagttctgttgacctgtgcacctaccccttggaaatgtctgctggtatttctaattccacaggtcatcagatgcctgcttgataatatataaacaataaaaacaactttcacttcttcctattgtaatcgtgtgccatggatctgatctgtaccatgaccctacataaggctggatggcacctcaggctgagggccccaatgtatgtgtggctgtgggtgtgggtgggagtgtgtctgctgagtaaggaacacgattttcaagattctaaagctcaattcaagtgacacattaatgataaactcagatctgatcaagagtccggatttctaacagtccttgctttggggggtgtgctgacaacttagctcaggtgccttacatcttttctaatcacagtgttgcatatgagcctgccctcactccctctgcagaatccctttgcacctgagaccctactgaagtggctggtagaaaaaggggcctgagtggaggattatcagtatcacgatttgcaggattcccttctgggcttcattctggaaacttttgttagggctgcttttcttaagtgcccacatttgatggagggtggaaataatttgaatgtatttgatttataagttttttttttttttttgggttaaaagatggttgtagcatttaaaatggaaaattttctccttggtttgctagtatcttgggtgtattctctgtaagtgtagctcaaataggtcatcatgaaaggttaaaaaagcgaggtggccatgttatgctggtggttaaggccagggcctctccaaccactgtgccactgacttgctgtgtgaccctgggcaagtcacttaactataaggtgcctcagttttccttctgttaaaatggggataataatactgacctacctcaaagggcagttttgaggcatgactaatgctttttagaaagcattttgggatccttcagcacaggaattctcaagacctgagtattttttataataggaatgtccaccatgaacttgatacgtccgtgtgtcccagatgctgtcattagtctatatggttctccaagaaactgaatgaatccattggagaagcggtggataactagccagacaaaatttgagaatacataaacaacgcattgccacggaaacatacagaggatgccttttctgtgattgggtgggattttttccctttttatgtgggatatagtagttacttgtgacaagaataattttggaataatttctattaatatcaactctgaagctaattgtactaatctgagattgtgtttgttcataataaaagtgaagtgaatctgattgcactgggtctgggagtttcttttggctgtgattcaaagtcttgggatttgtctctggctcatatctatgtctgtacctttaagagtataaaagaagtagaagttacaatggttgactcataccccattaacctgccctgctgtcctaaaggtaactttaggttaaactctgggacgcaggaagccaggagtctgctgccattaaatcaaacacattaacaccagctggcaacttggccctggggaagtgccagggttctcgggtgtgtcacgtggtcggtcacatagacctaagataaagacactgggagaggaaaagaccagcaggagaagcgctccctgggaaagcagttttttgctcttgcccaggctggagtgcaatggtgtgatctgggctcactgcaaattctgcctct

SEQ ID NO: 6635 - DNA, 1052 bp, Homo sapiens
acccagttactaaagtcagcaaagaagatgcggtaatcaccgcctgatctccacatggtgaacacaacactctcactaacacctccttgaccagtcagtcttcagcactgggggtggacaggcaggttttctgtgtttaccagaatcgcacaggctaagcacaaacatggaaccagagttccaggtgaggaaacctcactcgcagaagcccaggctgcaccccaccaggtgatgcagtgcgcctaggctgtgggtgctaggagccaagtgctagggactcgtcatgagtgggaatccccacgttcctgtcactgctgtcaaacagaaggtaaacagtcttacgaatgtaattccttaggaagacttgtacaaacttttattaggatatctatttatttaatactgaactttggcctactttgtgataagactataaacaaattgaggaaatcactatttctcacttctgtatttctcaaaaaataattttgttacagagttcaatatactgtgtactactgatcttctattgtgaaagcaaagcatttcatcaaaacaaagtattttaaattatgagtgaaaattgtgtatgttaattttgcagctgtaatattaatcaaactttgtgtaattctaatcacaaaatgatgtgccttaaatgcccctccagctgtgggttggcagtgtccagacagggaccctgaaatcctgaatgactgctagaccaattctattaaaaacatttcaaggcaaaaaaaaaaaaaaaagaggtggctggagctgaaggcgtagtcaaggttaatgctcctttttcttcatctgacctctcccaatcagttagcgtttaggctgtttttcatcaaatataaaaacccagcccagttcatggcccatttggcaacaacccttagatgctttaccgccctagacccagaggggccagaaggccgtcttattctcaatatgcattttattacccaacccgctccggacattagaaaaagctccaaaaattagattccagccctcaaaccccacaacaggacttaatt

SEQ ID NO: 6636 - DNA, 1135 bp, Homo sapiens
ctccttggcaaccgatcatgcaccccttaccatcccattaaaacctaatcacccttaccccactcaatgccaatatcccatcccacagcacactttaaaaggatcccacagcacactttaaaaggattaaagcctgttatcactcgcctgctatagcatggccttctaaagcctataaactctccttacaattcccccattttacctgtccaaaaaccagacaagtcttacaggttagttcaggatctgtgccttatcaacaaaattgtcttgcctatgcaccccatagtgccaaacccatataccctcctatcctcaatacctccctcccacaacccattattctgttctaaataaacctagctgaccccataaatcctaaatcctttccccactcccctttccattccttaaaaaacagccctaaaagctgctcccacactagctctccctaactcatcccaactttttcattacacacagccaaagtgcagggctgtgtggtcggaattcttacacaagagccagaagcatgccctgtagcctttctgtccaaacaacttgaccttactgttttagcctagccctcatgtctgtgtgtggtggctgctgctgctttgatacttttagaggccctcaaaatcacattatgctcaactcactctctacagttctcataacttccaaaatctattttcttcctcatacctgacgcatatactttccactccctggctccttcagctatactcaactcttttttgagacagagtctcactccgtctcccaggctggcatgcagtggcacaatcttggctcactgcaacctccgcttcccaggttccagcgattctcctgcctcagcctctggagtagctgggattacaggtgtgtgccccacacccggctaattttttgtatttttagtagagatggggtttcaccatgttaaccaagctggtcttgaactcctgacctaaagtgatctgcccatctcggcctcccaaagtgctgggattacaggcatgagccaccacacccagcctatactcactctttgctgagtctcccacaattaccattgttcctggcctggacttcaatccggcctcccacattattcctgataccacac

SEQ ID NO: 6637 - DNA, 1095 bp, Homo sapiens
ctaaaaatatggaaattaggcaggtagggtggcacgcacctgtaatcccagttacttgggaggctgaggcaggagaatcacttgaacccaggaggcagaggttgcagtgagccaagattgcgccactgcactccagcctgggcgacggagtgagactctgtctcagaaattaaaaaataaataaataaaatgataactgtatttgacttactacctcatagggcagctatgaagtaaaaagaggtcgtataaatgaaagacataataaagcactattgaaatgtaagtgatcatcactgctattatttttatgtatatgttgtctgtccaacctgttcaaagatccttgggtttttccttttgttctactgccacagccccttcctcatactagacacatagcagatcctcagtaaatatttatttgtgaactgatagatgcactcagtcttgcctgtgttgtcagaagtaaaaagagaagtatttacattttggtagtcactccctagccacttcctgctctcaactccttaagcctaaaaaactaataaaaataaaaataaaaataaaaaaacaacttgttaagtttgtagtcagccaagactcatagcctttttcacttgaactgttaagctaagtcttccttatcctatgttggtgaaattaatattttgaacataagcatgggactttaaatgtatccctggttggccaggtgcagttcatcacgcctgtgattgcagccctttgggaggccaaggcaggtagatcatgaggtcaggagatcgagaccatcctggctaacacagtgaaaccctgtctctactaaaaatacaaaaaattagccgggcagggtggcatgcgcctgtagtcccagctactcgggaggctgagataggagaatggcttgaacccaggaggcggaggttgcagtgagctgagattgcgccactgcactccagcctgggcgacagagcaagactccatctcaataaatatatatattatatatatatatatatatatatatatatatatttccctggtaaatttcatttatttgttaattctaactttggaacctattgagagctt

SEQ ID NO: 6638 - DNA, 1055 bp, Homo sapiens
ctacagccagctagttctgtagcttgagggatgagggaatgattaaacttgagctatgaatctctgggttcccatcttcttcctcataaagagttagttgcctagaagggtcaggcaggtgaatggaaggagtaatatcgtctgtgtgaaatcagtgatgaggctgaaggcataagccttgttcaaagtgagaagccaaggccggcgggggtggctcatgcctgtaatcccagcactttgggaggccgaggtgggaggattgcttgagtccaggagttcaagaccagcctgggaaacgtggtgagagctagtctctgcaaaattaaaaactaaaacaaaaaaccatggtgagaggtcattacttgactctgcttgcttcagttttggagtgcagttctagggttgggagatattccgattttcaagagaagttcaaaatcaggatttttatttaaaatcttttgactttaaatggagcaactaaatcagatttaaagaaaaaaagttgcagggggccaaacaaaaatgtttgtcactggatttagctctgaaaatgcctgtttgtagccattgtccttaagtattgtgatgactgaggatagttcaacctgaaaagttgtatagtttgttgtgattctgcagtaaagaaggttaggattctctagcttagggaagatcagattaaatttgtttttcctatcacaacagcaacacaagacacacaagacagtgattcttcctctctgcttttattcctgcttatgaggacagcctcttatgtaggtccgagacagtattcagtcccacactataacactgcctctggggaattgctttcgctcagtacttcacggtgaattaccctctcgcatttggtgtccaaccctgggtttctctctagtctcttgcttcactcactcctgttcctgactccttatcagcagtctgtggctaagtgaatggatttgaaatatctttttttcttcttcttaacacttagcagttgtcataatgatgggatttttgaccagaagagtttccaagatatgaactgt

SEQ ID NO: 6639 - DNA, 1021 bp, Homo sapiens
ctttaggatccctctctctggtcatccctgatcatcttagggccgtctcccttttctgatttttgacagctctgtttattttgcccatggctagtcctcttgttttgtgtctgctgtgtgttcttgcccttccattgtcagttctgtacatcctggttcagcttgtctcactgtggtagccccttctgcttgtcttcagccatcttggtttaatcctcataggtcatggatgaatggagccttgctgagcactttgagggcatttctgttgggcacaacctcagaaacgggaagtcttgaggcctgggggcgtgtggtcagtgaggcctccagaggtgggttaggggtgggcacctacaagggccagttgaggggagaggtgcagggattgctgaggagactttgtgagaatgatgtcaggcccgggaagctggtgtggaagaactgagctgtcagaaggagataccaatatcccctttgcagggtggtgatgggcatcaaacatgacgtggaacatgtccccttcatggagggtttccatctaaatgcatctgtgtgccttagggatcagtagttcaggggtggtggacttttttgagtgtctcctaatttctctgaggtgtctttggctctgtgtcaccaaatgtgcctgacctctgcatcccagtggttgctgaaagggaaacagtatattgcgtagtcagatgtcaggagtagagatcttaatgagaaaggccctggcagctggagagatgagaggacctagtggtcagcttatacccagactatctctccactcctccaagagtttgagtcccatagctgatgaaagaatttacatatgggctcccccctgctttcccactgaaaatctattctcatattttgggaaggagcatatgtcctttaactttcaatggtaaacaatctaggatagtgtttaaaggcatggattttggagtcacatatagttggtttgaatttctagcttcactacttaccagctgggtttgaccttggt

SEQ ID NO: 6640 - DNA, 1035 bp, Homo sapiens
caccacaggcaccgacccaaactggagagagcagagcatcaaagaaggtttcagtgtgagacaatgcctgggctgaggttagaagaatgagtaggggttacacaggccacaaaaagtcaggaggggagacagagagaaaagggagtttctggcaggaagaccagtatgtactaaaacccagaggtaaagatggcacaggagaggtggataggtctgctgggctaaagaatttgagtcgttgtattaaggggatggggagcccataaaggattttaggacaatatatgacataattaagatttgcattgtggaataatcctggcactgccacttacttactagctgtgttgctaacaacttacttaacctctctgtgccttgatcgcctcatctatgaaatgggaataataatagtgcctgcctcttagggttgttgcaagaatgaagtgagattgtataggtcaggctggcatgtgaaaatgcccttagtgaagattcgttactgttattcactgtaacagactggactggggctagaggagaccactggaaggcagagtttgaagcctactgctgggtactgcagagaaaatgaaggccacagctaaggcagaagcagcacatgaggccagttgaaaagctctcaagagggaaaactcacaagacttagctattgcttagatgaaaggggtgatgaaaagatggcattcacaatgacccccgggtttccggtttgggtggctgcctctgggaatacacaaatagatttggggcagggagatttggtgagttcattgtagatgagttgagattgagattcttgaggaacttccagcaggagatgcagatattccgagctgacctctgaggtctgaatggaaaaaagaagtgccagtgtggtcaagggagccctgggcctggatgaggtcaccagggtgagtgtgtgggaaggagggggtgtgggctgcggatggagctgtgacaacacagtcattaagggggcatgtgagtgaaatagaagagtccctagagaag

SEQ ID NO: 6641 - DNA, 1050 bp, Homo sapiens
agatgtggatgctgcccaagagggaagtgcccaaggcaggaagagggagcagaagaggctggtctcccagaagctggctgatttgagcagaggtaggggaggccagagaggcaaagttcacagctggacagcagcagggaccagtgtgagcagtgtggatgtagcttctgaaaagggttgccaactcagaagctcggcctcctggcccacatctgagatggtcagcaaagtggccttttagcagatagaggtgtggaccctgggaaacctcctcctcctactcagggcatcctgaggacctccaggaactgcctctttcctgtagttaacaacccccttccaatgcaactgcatttccctccataaaacaaacagcttagcccttggccagcccccgggggaggagagggcaataaagactgagaaatgtttctcaaggaggctgggagtctcctagtcttgtctgtcagctcaaagcccctgattagctagaggaatttagggcacagacatcatagttcctctccttgaaaggagagggctaagacaacttcagacgtgtggcaagtcagagatccctttactgtggaggccaaagcaagccagagggctgttcctcagtgctcacatgccctagacccttcctttaggctgtgagggtcccaagaaaagaggctagcctccttcaaacatccctgagtctgctggccacatccccaaggacctccagcccccaacctcagctctgatttaattatgggggcatttccatagcaatgagacattgacagatatgcggctgctctcggcctgcagcctagggagtcattggatcaggcctctttcccttcctcctttatccagtccactgatagaggtaaaggatatggaaaagaagaggccctaatccactgtcgggatcagagtcaggccatatttgaccagaataaaagctgtgccacctcaatctcaggtcccaatcccatgtccttgtctgtgcctaccggccaccctgtgctgctgggctgcccttcccaggagggtgccatg

SEQ ID NO: 6642 - DNA, 1086 bp, Homo sapiens
gcagtggacattttgtgtgcatatgaacttagagaacctacctcttgaaagttacattcatggttattttacaggtttcttgtatgttttacccaaaatcattttttctctttctggtgtattaatcaaaaaggagtctgaggtccaatattttagggaagagatacagtgttacatttagtaaaatgcatttagaattatcttgtgtgcaacaaatgagctgcttctgggtcccttcccatctctcctcaatcaataacaagatcaataacaaggtatcatccttcttccctttgcagaacctccaacatttactctggtggagttaatttgcctagtataatttatgtaaacaaatgcatatattcttccatagcccgtcactcatattcatctcataagcacttagcttttataccagcatctcaaacaagcgtgatggacttggtaaaccagtaaagatgtgcattgctcttctaatgtgaccagtaaagtgtacaagaagcttaaccttcaagaaacttggattgttggaattttcactgagcattccaacctcatagtggatgaatgtttagggaaatcaatagtctatagcttattctctttcagtaaaatgatacattttagcaaaatttaccagaaagttaattttttgttcagcatatcataacatccccttttttgcagctgacaactctacagtgaacaaatcagaatacgaattctggtaatggattcctatttcactttagcattattgccaatgtcagaacttgattagttaagccagataatgaaatccagtctttacggtacagaaattcttaaaaattaatttggtttttgttattcttgttaactttcttccttttctccttgtgtttttcccaagcaatgtgttatttttgtaactatcttaaggattctttgataaaaaattaagaatttgaaactagttgtgacaactcattctaatttctgctgttacttagattaacatcttaatgtataaagagggtagcataagtttggtatttttcttttctgcccttgtccagcaaactcctcttcaactgattccct

SEQ ID NO: 6643 - DNA, 1043 bp, Homo sapiens
gtacaccagtcatactgcattgggacacagcgtgatttttttttttttaatgagaaattaacatttatctgccttcaagtgtttatcctatacgtgttttaaggtactatacatttaaatgtagaagtgttacatttctgcaaccaggtagtcctaggtctaaaagaatttccagaagtacctatggcatccttaacttggtacaaatatgcagttgtttgttttagggagtggcatctttaattctgttaaggtggtaaacttttcatagctttggaatgaaaatgagcatttgtcattagctttaaatttcttggacaccagtatttatccagttgataagtaactctttttctgcattccatatatggtgactaatctcagccttaatacttagaattttaaacctttcattagggtgttctagacactgaataaactttactaaagttggaaagtatatttttcactaatctaacaaaaattaaattttagcaggctctaagcagaataaattccctgaaaaaagaaaaaggaactctgtggactcagatctgaaaagcacaagagaatctatgataccaaaagcaagagagtccttccttgagaagcgtcctgatggaccacatcagaaagaaaaatttataaaacatattgcactgaagacacctggtgatgtgttgcgcttagaagatatatccaaggaaccgagtgatgaaactgatggctcttctgcaggcttggcaccttcaaattctggcaattctggccaccattctaccaggaatagtgaccaaatccaagtggcaggtaccaaggagactaagatgcagaaaccccacttacctttatctcaggaaaagtctgcaattaaaaaagctagcaaccttcagaaaaataaaaccgctagctccacgacaaaggagaaggagacaaaactacctttactttcccgtgttccaagtgctggttcctctctagtaccattaaatgctaaaaattgtgctcttccagtttctaaaaaagataaagagcgttcctca

SEQ ID NO: 6644 - DNA, 1035 bp, Homo sapiens
atcacctgagcccaaggaggtcaaggctgtagtgagctgtgattgagccactgcactccaatctgggtgacagaataagaccccgtctcaaaaaaaaaaaaagtggggggccaggcgcagtggctcacgcctgtaatcccagcactttgggaggccgaggcaggtggatcatgaggtcaggagatcgagaccatgctggctaacatggtgaaaccccatctctactaaaaaataaaaaaaaaaattagctgggtgtcgtggcgggcgcttgtagtcccagctcctggggaggctgaggcaggagaatggcgtgaacccggaagtcggaggtggcagtgagccgagattgcgccactgcactctagcctgggcaacagagcaagactccatctcaaaaaaaaaaaaaagggaataagatgggttctcttgttcatagactggatcaaaagatccaggtttttatagtatactgcactaactaataatataaattcctttctgtttattacaactagtatctgatagctgaaattctagatcgaaagcatgggtagaattttttgtgtttttttaatggaaaatacatataaaatttaccattttaaccatttttacatgtacagttcagtggcattaagtaaatttatatgttgtgcaaccattatcaccatctagctacagaactttttcatctttccaaactgaaactccataccctttaaacaataactccccattttcctcttcctcccaccctcagcaactacccttctactttgtctctatgaaattgactgtgttttagttatctcatgtaagtggtattatatttgtccttttacgactgtttatttcattcagggcagtgtcttcagagttcattcatatagtagcatgtgtcagaatttccgttctttataaagctgattattccattgtattatgtatataacacattttctttagtcatctgtcagtggacctttggattgcttccactttttggctactgtgaataatgctgctatgaacatg

SEQ ID NO: 6645 - DNA, 1067 bp, Homo sapiens
atgtgccaccatgcccagctaatttttgtatttttagtagaggcggggtttctccacgttggccaggctggtcttgaacctctaacctcaggtgattcacctcccttggcctctgaaagtgttgggattacaggtgtgagccaccgtgcccgaccacttaaaatccctttttaagcaattcagggttttacataaagggaaaatggatattgttaagtgtaaagaaagctataataaaaggacaaaatgaaagagtacacactggaaaaaaatagcctaagaaagaacaactatattatttagctttgttcaatgtctcctctttcttttgataggtatcagtcctacatcgctatcttgtgcagatgaagccttctgatttgttaaagaaaatggtcttgaagaaaaaggctgaacaaccagatggcattattgatgacagtcttcatttagaacttgaaaagcaggtatccagtgctagaaggtctcaaagagtacatagaagcataactgttatcagcttactaaccatagactgatatgtaggcatttctggatttggacactagacacattctagcaaacataattttaaagcgaataatatttttaatttatcactgtcatgaaattcttccataaatttgagagttgaaaatttaggtaaaaggatgattgttggtaatttgctcccaagagtattttttgtagccctttattagggcagtcgtgaggtcatgaatcatggtaaaaagaatgcacttgagttagaaatgagaaagcctagtttagatgcttcgcttttacttactgaccagctgggttaacttgaccgtatcctttatccttcctgggcaattttcctaatgtgtaaattggaatgacatctatgctagctaattcataggtgttaattttattcatttctctaacaggcatattacctgacctacattcttcttcatttagtcggtgaagttagttgttctcattctttttcttctggacaacgggtaggtagtgtttagtgttgttgctgctgtttttaaataggtgttactgatgat

SEQ ID NO: 6646 - DNA, 1053 bp, Homo sapiens
atgttcttacatggtttttatattttatacattttttttttcgagacggagtcttgctctgtcacccaggctagagtgcactagcacaatcttggctcactgcaacctctgcctcccaggttcaagcgattctcctgcctcagcctcccaagtagctgggatcacaggcgcctgccaccacatccacacccagctaatttttgtatttttagtagagatggggtttcaccatgttgatcatgttgctctcgaactcctgaccttgtgatccgcccacctcggcctcccaaagtgctgggattacaggcctgatccaccatgccggctataaattactttttatgattaaaaaagtcagtgactgggcatggtggctcatgcctgtaatcccagcactttgggaggctgagtcaggaggatcacttgagcccaggagttcaagagcagcctgggcaatgccatctctgtttaaaaaaaaaaaaaatttagtgattattgtaaaacttatataaagtaaaacctgaaagactcctacaatccagtgccctcctgtaaatttcttcacaatttactaatatattacatataatatactaacaattattttaacaaaaatgtaatcatagtatcatttgcaacttcctttttttcctctttaaaaaaaaatttttttttctttttgagacagtcttgctctgtcacccaggctgaagtgcagtggcacgatctcagctcactgcaacctccgtctcttgggttcaagtgattctcctgcctcagcctcccgagtagctgggactagaggcatgtgccatgatgctggccaatttttgtatttttggtagagacggggtttcatcatgttggccaggctggtctcgaactcctgacctcaagtgatccacccgcctcagcctcccaaagtgctggtattacaggcgtgagccactgtgcccggcctcctctttaagacattagcacttggctgggcgcagtggctcacaactgtaatactagcactttggtaggccgaggcatgcagatcgcttgagc

SEQ ID NO: 6647 - DNA, 1071 bp, Homo sapiens
taagtctttgagaaatcttatatttatgttttgttgtttttgtatttgtttctaaccttaatagattttcttttaatgctggtcatgtactgatgtggtattaaaacagaaaataatttaatagcaaaactatactaatcagcttaacattatttaatctgcttaactaagcccctccatgtgtgcagtggtgagaaaaacatcctgcacttattttttactgttttttgttgtttgactactgaatgtgaaatttgaatctgattaccataaattttcagagaagtcaatataaagattttattacttgtcttatcaaagcccattgtctgatgattagtagttttataaggattaattcataatatgattaaattttgctttaccctcttttttctccttcccttttttaggggcagcttcatgacttctgggtaccagattcttaataggagttgcagcagcaaaaatatgaaccaagagaaattcaataagagcctttcatagaggagtagaaaggattattacagaatccaatgaatgccaagaaaatgtacagcaaatgtgccacttgaatatctagtatgaagctggtaatgaagaaattgccatttctgaagcagatatgaaatatgatctgcttaattgttaaggcaactgacctttcaaaagtgcagagtcttattaaaagaggggaggggtagaagcagaataatagtcatatgtctaacctgccccagttaactcctcttgttaaattataagccagttatcttttttagatagtatttttgtcacttggataatcacaggaaatatataagaaaagagcttggactaacttgagaagttggacatggaaagcaagaccaagttccagttgggtttaattttccctcttggttattttcggacacaaagggaatgcttaaaactgagtttagtaataaaaagcataaatctcttctgtaacttttataaaccacagggaggtttcaatccatgcattttccttcattactcaagattataaatctgtttttaaaatacatctaaacaaacagttgagaa

SEQ ID NO: 6648 - DNA, 1048 bp, Homo sapiens
ggctgaggcaggagaatctcttgaacccgggaggcggaggttgcagtgagctgagatcatgcactgcactccaacctagcggcagagcaagactccgtctcaaaaaaaataaaattaaaaaaataaataaacatcttggggaaacatcactttaggaatatttatctggccccaggcactggatggatgaaaatagggtgagtctggaggcaggaaaagcagtgaggaggctgggggcatcatttgggtcagaggaaggggcctgagcaggcttatggagacgggggacagatggtagtggcttgtaccaggtgagggagcaggaggagacacaaagaggcctgtatggatttaaaccctgggtaacaggcaagaggaggaatcattaacgtggcaaaggagtcaagaggctggcagctgagggcatttgacaggcagagaagaccagtgtggctggagtagggtgagtgagaccagaggaatgggcagagtcccatcacacagggctaggagcatgtgggactctatattcaggtcactgatgagccgatacagtggtgtgatccacttgactttttttcagacatggtctcactctgttgcccaggctggagtgcagtggttcactgcagcctcgacctcctgggctcaaacaattctcttgcctaagcctcccaagtagctaggactacaggtgcatgccaccacatagagatgaggtcttgctatattgtccaggctggtcttggactcctgggctccagtgatcctcccacctcagcctcccaaagtgctgggattacaggtgtgagccaccacacctggctaggtttacatttttagaatatcccttggaaagtggttggagagtagcaaaagtgtgttgtttggtaaaatatctctggaaggaaacttcagacaatagtaacagcagtcttcttggcaggcaacctgggagacagggataaatgggagactccctgtttataacatacccctttgtactttctaagttttatactatgtacatgtattcattgactgaata

SEQ ID NO: 6649 - DNA, 1050 bp, Homo sapiens
cgtaccgccctgcctgcctggcacaagtccatcgtatctttccggcagcttcgggaggaggtgctaggagaactgtcaaatgtggagcaagcagctggcctccgctggagccgctttccagacctcaatcgtatcttgaagggacatcgaaagggcgagctgacggtcttcacaggtaaccctttgagaaatcactacttagagtaaaggggcagaagatcaggtgacaaaagcaagtgggtttgggccatgacaatgttgaaaagaaggttggccctttccccccagttttaaagccctgacctatgtcttggtttcaagggtaggacttcctcctcacccaggtctgttccaccccactgcagggccaacaggcagtggaaagacgacattcatcagtgagtatgccctggatttgtgttcccagggggtgaacacactgtggggtagcttcgagatcagcaatgtgagactagcccgggtcatgctgacacagtttgccgaggggcggctggaagatcaactggacaaatatgatcactgggctgaccgctttgaggacctgcccctctatttcatgactttccatggacagcaaagcatcaggtgagactcccagattccagccaccttgctttcccagacatatcccagcactcaggaacctttggttccttttccagctccagtaggaactcccccatctccttaggtttggagtttttcaaagaatgagagggcagggctggacacactggctcacgcctgtaatcccagcactttgggaggctgaggtgggaggatcacttgagcccagggatttgagaccaacctgggcaatatagggagaccacccctctctataaaaaaatttttaaaaattaggctgggcatggtgatggcatatgcctgtggtcccagctactcaagaagctaaagtaagaggatcgcttgagcctagtaggttggggctgcagtgagctgtgatcacaccactgcactccagcctgggctacagagcaagaccttgtctcaaataatagtaataat

SEQ ID NO: 6650 - DNA, 1102 bp, Homo sapiens
aagaactccctcaccttctccattccaccaaagaacaaggcccggctcaagaagatcaaggatgacactggaccagtggccaaaaagccctcttctggcaaaaagggggctacgacacagaactctgagatttgctcaggccaggcccccactcccgaccagccagacacctccaagcgttcaaagtgaaggccgtgcagagctggtcactgaaatgagcctgataggataggctggagcataaaactctgcaagggctcctctatcctgtggtcctgagctgtgtgcccttctcagtctgaggggcctaacctagagcaggtttccatagtgagaaaattcaatgtagcagactactgagaaactactgtgttgctcaggctttgtttgaggtcctgtatatacagcactgaaaagagagataaagtccctgcctgcatgcattctggcggaagagacaagcaagcaatgaacaaattagcagaaaacctagttttagtgaaaaatgctgtaaagaaaatagaaatgcgatagagtgctggcaggctagtgtagataagtggtctgaaaaggtgtctctgagccgagggcatgtgagctggggcctaaacaactagaaggagagagccacgtgaacatccggcgaaggggacccaggcagagagaaaaggaaatccaagccctgaggtaggaatgagcaggtcagattcaaggcagtgaggtcaggccgcatgaacctggaggggaatcggggacttcatgcgaaactccagcctaggctttcaaagtcaaagggtgatacagtgggtaccaagctcctctgctccccactttgtagagcctagcatgaggtggcatgtactagaattggatcctaggtgcttagccctgcaatatcagggcctcactggtgggagctgcctcgggctgggttgcttggtcatagagccatagaaggaagctgtcagcccggagtgcctgccacctagacactgatgccattgtgtgctgcctcaagactgctggagtcaggacattttatagagccttttccagttttactaaaaaatttttccattgcctttgtttctgtgctttttct

SEQ ID NO: 6651 - DNA, 1068 bp, Homo sapiens
cttcatgggtcctcgggccaccgggctgtctgggagccagggcagcctgacgcagctgtttgggggccctgcctcctcctcctcctcttcctcctcctcttcagctgctgacaaacccctggcatttagtggctgggccagtggctgcccatcagggacgctatccgactctggccgaaactcactgtccagcctgcccacctacagcaccggaggtgccgagccaaccaccagctccccaggcgggcacctgccttcccatggctctgggcgaggggcactgcctgggccagcccgaggggtccctactgggccctcccactcagacagtggccggtcctcctccagcaagagcacaggctccctagggggccgtgtggctggggggcttttgggcagtggtactcgggcctcccctgacagcagctcctgtggggagcgctcaccaccacccccgcctccacctccttcggatgaggccctgctgcactgtgtcctggaaggaaagctccgagaccgggaggcagagcttcagcagctgcgggacagtctggacgagaatgaggctaccatgtgccaggtgtggtcagaggcaatgatggggaaggggcatggcaggacatcccaaggccctgggatgcaagcggcatttccattttggcagggaacgggggttgggtagttgtagttgtgacccccctgccctccccaccagttgtctggtttaatgtgtggagtagccaggtgtggtggctcacatctgtaatcccagcactttgggaggccgaggtgggcggattgcttgagctcgggagtttgagaccaacctgggtaacatggggaaaccccatttctactaaaaataaattagctaagtgtggtggcatgtacctgtagtcccagctacttgggaggctgaggtgggcggatcactggagcccaggaggaggaggttacaatggactgacattccaccattgcactccagcctgggcgacagagcaagactctatctcaaaacaaaaaacaaaacttgtggggtggaaaggagtcagagtgcatggattc

SEQ ID NO: 6652 - DNA, 1053 bp, Homo sapiens
gacgacttcgcacagctgctgcaggagcgcgaacagctggagcggcgctgcgccaccttggagcgggagcagcgggagctcgggccgaggcttgaggagaccaagtgggaggtgggccagaccaggaggggcagggagcagggtcacacagggagaaaccctggaaaaaggggcccagccccaccctccctcagcctgccacccccagaggtcctcccctttctcacctccgtgagatgaggttcccctctgtccctttctgggaggggggtctccttgttggccttgtctagtggcacgtagccacgcttccagccagtagtaagaatgtggtgcttgtggtgtggaggcactattctaagcatgttacatggaacagatcatttcatccttataacaacactgagggggctaccattagtctccccattttagagatgagtaaactgaggcccataaaggctgaagccccaaatctgaacccaggcagtctggctccaatatctgagctcttaactaggtcactgtagtacctctccagcaggcacctgggcactgccctccattgtccccactcctgcagcacttgccaggacccagtccccagtccccagtccccagggcttggtggtacttgcagtgtcttgtgatgctttgaagacaccagctttgaagcaaaaagttctaggtctgctttccacttaagccccatcttaactgtatgaccttggacatgtcactagacttgctttagtgtctccatctgtaaaatggggataaagatggactcttctctcccaaatgcccagcatgatgtgcagggcctgtccccccaggagaacctgtctcaccatccttccccacttcctcccacccccaggtgtgccagaaatcaggcgagatctccctgctgaagcagcagctgaaagagtctcaggcagagctggtgcagaagggcagcgagctggtggctctgcgggtggcgctgcgggaggcccgtgctacgctgcgggtcagtgagggccgtgcgcggggtctacaggaggccgcccg

SEQ ID NO: 6653 - DNA, 1096 bp, Homo sapiens
ggtcagaggcttggctactcggtgactgcagccaagcagggaatcttccaggtggtgatttcaagaatctgcatggcgattcctgccatgggtaaggcgggagtggctgggtggggcataggagactctgagagaagcaggtgcagttctcagggactttggaggactctggggagagagggaggagctttgaggggggtcacccttcacagttcctgactttaactccactactaatgttctccttcttggccctgctctccccacagccatcccaccactgatcatggacactctggagaagaaagacttcctgaaggtaggcgactgtacctctcttgtcctggaatgggcgatggctgggagaagtgaccaggccccaactctctctccagcctcgcctgattctctaagacttgccagcccttctcctgacccctgcaccgcctcctccaccttcgttcattcagcaagaatgaactgggctggggtgaaggaactctgcaggggcaggaggagaggacaaaggaaggaaaccaacttcatcagtgttactccagtggcttctgacacacagaaggggactgtcatagtcatgcttgatctcatgctcattcttttaccccctagtgcctccatactgagaggtacacacgggtgaacacgcacacacagacatgaacaggacacgaaagcaaagcacaggaacaagctctggctcattcacagaatcatttattcacaaatgtattgagtgccatgcaccaggcatgttttagggctgaggagatggcactgaacacaatggttatggcccctgtcctcatgaagtttatagtctgatgcagaaaccaataaacaaggaggcacccaataaatacattcttagaaagtgtaatatgtgctttgtaggaaagcaatgggggtagtgtaattgagattcatgggggagagctgtttagataggatgatcagagaaggggtctttaatgccgcaaaggatgaggagagagccaaataacgcagagaagagtgtttggggtacagaaaacagtcagtgcaagggcactgcagtaggaggggcttgcacatttga

SEQ ID NO: 6654 - DNA, 1601 bp, Homo sapiens
ggtgttttgttagagtcagagacctctccttgggtgattccattcgtcagccccacaagtccccgtctctggcctttttcagggtctccggcagctctctgacagttccccttctgtctcaggtcgacacttattccaaggaccagggattactcacaactatccgccagagtttgctccgccctttctttttcctgtttaaaatccgcgggctcttagtgttctcggttcctagatttcctgttctgattctcgcgacagttgcgaggcctcgcgtgaagttcccttctagtccctatttcgaatttgagaccgggagagagtgtctgcccttgcccacctcctcagaacccctctggccagggatggcgcctacgtggctcgggagcccctgaatgaatgggcttggcccaacttaggggcgcattccgacgggagagtcctggctgtattccgaggctccagtgcgcatgcggagtcgatcccgcgcaggcgggcggggacggcagccgggtcttgtgggcggagcctgactaagtgccgcccccttgccggctgcagattgctatttctgccccccaccctcgcccatccccccgcgagctggactgcgccaaggcttctgtgagccgcttggggccggccggggcggggcctgcccgacccgggtttggctggcgggcccctaggaatgctctcctccccgcccccggcccaaagtgccacggtggcggtggtggcggccgcgaggccgagtgtctccggccctgccagcctcgcaaccgtaacctgtaatcccgacccgagggacgcccgccggggaggcgccagcccgcctctccctgcggccgctggtcggctccgacctcgaatcacccggctcacccgcgggtcgcagcacctgccggatgtggggaggaagaaggaggccagatgagggaaggcggatgtaggcgcccagtctgtccgcgccttggtggggcagctgggtgggcaagcctgcggtcgctcccgggaaccagccctgggctgcggggagacgaaggtggttggtcctgccctccaggagcgccccgacatcgacgtaaaatgacttggcaccagagctcctgccgcctcccccttatgcagctgccctcgccgacgccagggactgtaaaatcagatgggacagggcctagccgttcagccaacactttgagcttcccagccaaactcctacccccactccccgcctccggtcctcacccccttcctctctcccagcctcggtgtctggttacggctcctctgctcgcattgtgactttgggccaggctgggggaaatgacccgggagggtcccatgcggctacataaaattggcagccttagaactagtgggaaggcgggtgcgcgaagtcgaggggcggagagagggggccggaggagctgctttctgaatccaagttcgtgggctctctcagaagtcctcaggacggagcagaggtggccggcgggcccggctgactgcgcctctgctttctttccataaccttttctttcggactcgaatcacggctgctgcgaagggtctagttccggacactaggtgagcactct

SEQ ID NO: 6655 - DNA, 1049 bp, Homo sapiens
ggttcttaaccagaggtcccccaagggctctttgaatgggcttcaggggctctgtaaatctcagaaatttatatgtgtacccaggtgggcacatttttctgggagcaatattatataacacccaggattctcaaagcgggtggggatccagaaaaggtaaaggctggaatcaggccactgtagggaagggaggcaagccactggggaagggggatggaagcggcctcctcccaggcctggggagcagggaggcagctgcttcaaaattcaggctgggctccaagcctgctcctggacctgccctgctttttctggccacacccagctcttaggacctcagctggcaggaagacgtggggcaccatctgagggcaggacactcctttggtcccctccctgattctccccttccctacttcttttgtgagctgaattccttcagagcactgtgacaaggtgaccataccacatgcaccagcctcctccaggcactgtaatcctgcttggaaggagcggggagtgcttgccctttggaagtactgggggacatagacagaccactgagtgacagagacaggaagggaggagaagagacaagttcccagagatgctcaagtcctgggtgcccactctctgcagcctctagaacagccttctcttttggttccaagcttttgctcccctcatccaagggttgggatgatttgtgtcccttcctttcctggcacctcctgctctgtctctagtgctcaactcatttcctgggggaaaccttctctgccctgttcagctcctctgcgctccttagcacattcccctggatgtcactgtcatattgccaagaatgtgttgctttgtctgtctgtcctgcctctctctctccatctgttgtgaacttgggaaggaaggacctgaatcacctctccatgcccctatgccagcccagcatacaccaaggggtccaagcatttgttgagtaaataaactaaataaataaacaagggacaaaaatggagccagacagggaacttagcctgtgcctcagagag

SEQ ID NO: 6656 - DNA, 1055 bp, Homo sapiens
tccaggagacaggaggtagagactgccagtcttctaaatcctagatttggaagtccaagaatgtcactgtgggtcaaagccagtcaaggccaactacagagggaggagaaataatgtctacctattgataggaagggtggcgtgcataaacaaggaagggggaattgctgggggccaccttttgagacttgctaccgtaggtgctatgctagttggatgttaaggctaaaaataaaaatggtatcggccaagtttgtgggtcataatgctaggaatgtttaggaggcatctctttttttgaggttaacttcggaaggcactaacatgatctcctgcgtgacttcccttaatgatgtcactgttgacataatactgggtgaattaatgtgattaagtaaacttgcttacttacttcaggaaacagaggtatctaaacagattacattttaaaataaattgtcagatgtttcactgtaatggaattttctttacatcagtgaaattgattaccaggtagtgggatgaacatctgaaactagttcttagtttaagttgtctgagtttttgtgtatactttacctattcccagtttaaattggctttcaaacagtttgttttctgggtactcttataggtgttggggtatgaaattagtggtaattctttttgcctattttctttttttttgtctgagataccctgagtctcgctctgttgcccagactggagtgcagtggcacaatttcggttcactgcaacctccgcctcctgggttcaaatgattctcctgcctcagcctcctaagtagctggaattacaggcgtgtaccaccttgcctggctaattttgttgtatttttttttttttgagatggagttttggtcttgttgcccaggctggagtgcaatggtgcaaactcagttcactgcaacctctgcttctgaggttcaagtgattctccttcctcagcctcccctgtagctgggattacaggcatgcaccaccacacccagctaattttgtatttttggtagagacagggcttttccatgttg

SEQ ID NO: 6657 - DNA, 2719 bp, Homo sapiens
gatgaatagatagattttgacagatatctctctgaggtaggcagtcaagcggtggccagagtggaagaattactgtccagatttacatataggtttcctgattatttaaattaccgatgaagtgcagtaagactctactgttgtcacagtatcatttcagttagctattggcgtttagaatcacaaaataccagcatcttacagtgataggtatttattctcttgaaattgtgggtttgctgggtagtggatgatctaaacttggcttactcaaagtcaaaagcccaaagtcaagcagggcagggagtaacttgcacaatactatagtgacagtaatctactgcagtgatctagtacagttgatttagagaagaatggtaagatgcttattatgacaactattgtgctttcttctttctgctctctattgttgacactctcctgatagcactttttcattttggttgctgaataatacctgttgattggatactcctagaatcataatgtaatacagcagatttcttctcttcatgttatgtagaaaaaaagcataaagaaataatcagaatcttgactattccacagtgatgccctgaaaagttcagcaatatcatggtgctattcttctatctttgggactgataagcttgatgtcactggaatggcatttgtaacagaatttgaactgtaacagagtttacatcaaggtcatacataataacccaacaactcctttgttaacagttttaacagctttccatctcttcgctgcacctaaacttaaggttgcaaagatcaggtgctgatatatttagatgtctggaaaactttcatgctttcactgaaaagtcatagagacagatatccaggaattatagcatgtggataaatatttttgtagcacagattcataaatccttgtatgcaggaagtactacaccaaactgttaatgtggttatttgtgagttgctgaattatgggtaatatttcaaaatatttaatggtattctgaaaatatactagtaaatacacagaaaagcattatttaggtgatatttcttttaattcttttttttttttttttgtatccccggagcgagtgcaccgttcctggaggtactgcaataccaggtcgatgcatggagtggacggagcaagctcctattccatctccctgctccaaaaatctatttaatatattgtcctcagatagaggacatatcagatactaaactgatgagaacagatactacacttgatcttagccaaaaggccgagaagtgattttaattctttttctttttttctttttaaaatttttttatttttattttttttttaagatggagtttcgctcttggtgcccaggctggaatacaatggcgcgatctcggctcaccgcaacctccacctcccgggttcaagtgattctcctgccttagcttcctgagtagctgggattacaggcatgcaccaccacacccagctaattttgcagttttagtagagatggggtttctccatgttggccaggctggtcttgaactccggatctcaggtgatctgcccgcctcagccttccaaagtgctgggattactggcgtgagccaccgcgcttggccctttttttttttaattttttgagacagtctcactcactctgtcacccaggctgggtgatatttcttttctttaattctttttctttttaaaaattttttatttttatttttattttttttgagacgaagtttcgctcttgttgcacaggctggagtgcagtggtgcagtctcagctcactgcaacctctgccttccgggttcaagcaattctcctgcctcagcttcctgagtagctgggactacaggtgtgcatcaccacactcagctaatttttgtgatttttattagagacagggtttcaccatgttggccaggctggtcttatactcctgaacttaagtgatccacctgtcttggcctcccaaagtgctgggattataggcatgagccaccatgcctagacttctttcaattcttttatgttttacggattttctacagtgaatatatatcataatcggaaaaagtaaaatttagtatattgagtatatgcatttataaaacaaaatgatcatggactacattgtagcaagtgtactggccagtgggctgacagtggctgcttaaacgactccttactctgagctccagttttcttaaccagaaaatcagctattgttaattttacctacttagggtctctctctatttttcctttcagttcatgttaatttctaaattgccatgtataagtaaggggttgtcaatttacaccataaaacccctttatgtatccaaggttttcataggaaatttaggactgtatgatcctaaattgtgctggagtaccacattttctgttaagtagtacttggcaataaagtataggaaaaaaaaatcagtgggttgacaaagagaggtcatgatagtgtacctgtaatgtaatttgataaaaaatgtgagcctgaactgattgcaaagcattgttacatataggggaagacattatgggggcagaggggggtgaagatacaaagttgaataaaacttctctagagcttcacaatctaataagataggcatttataaatatctcttaaggcgcactttgttaagtgctaaaatagtggcacaaagagctatagaatttaa

SEQ ID NO: 6658 - DNA, 1081 bp, Homo sapiens
ggttgctgagagtagggtagaacaaatgaagaaaaagagtaaaatatagctggcatcagtcatgttaagggcaattagagggttatcaaagcagtaggtaggtaagggaaaatgagtgtttggtgggtgaagatattgggatggtccctaactataataaggagactttgaatttaagatatattcgtataaataaagatgggcagggccgggcgcggtggttcacgcctgtaatcccagcactttgggaggccgaggtgggcggatcacgaggtcaggagatcgagaccatcctggctaacatgatgaaactcagtctttactaaaaaatacaaaaaattagccaggcatggtggtgggcgcctgtagtcccagctactcgggaggctgaggcaggagaatggcatgaaccagggaggtggagtttgcaatgagccgagatcgtgccactgcacttcagcctgggtgacagagcaagactccatctccaaaacaaaacaaacaagacagaaaaaaaaaaaaaagatggtcaaagtgatagaatatatgagacttggaaggtggaaagctgggtgatgattagatggagattatatattattctgtacttttttgtatatttaaaagtatccatgataagaggttaagaaaagtttatctgctgggccaaatggtatttccagttctagatcccggaggaatcgccacactgacttccacaatggttgaactagtttacagtcccaccaacagtgtaaaagtgttcctatttctccacatcctctccagcacttgttgtttcctgactttttaatgattgccattctgactggtgtgagatggtatctcatagtggttttgatttgcatttctctgatggccagtgatgatgagcattttttcatgtgtttattgcggcattattcacaatagcaaagacttggaaccaacccaaatgtccaacaacgatagactggattaagaaaatgtggcacatatacaccatggaatactatgcagccataaaaaatgatgagttcatgtcctttgtagggacatggatgaaattggaaatcatcat

SEQ ID NO: 6659 - DNA, 1062 bp, Homo sapiens
gtttttcctagtactatgaacagattgtgtatcatcttcatttattttaaagatgctgtggctggtccctcagctcataatcaccatcagccatggcatctttacatagaggaaaaggatgtaattcagtacaattaaataaggtaaatgtaaaggtgctttgtaggtcatagggtaaggtggtggtggtggtggtgctttcacaacaacattctaacacaaagcaattcatacagactcccaaagtttattgaataggcattccactctcattccattttactctttaaatatatatttattcatgcctgctgtatgcaaatttttgattccaatttttttaatggacatacagtaaaatggatttttcttaatgtacacagttttaggaattctaatatgtgtagtagattcatgtaaaccacaatcaggataagaacaattgtatcactcccccgcaaaaaactcttatactcttcctccacctctaaccccctcttcctcacttcattttatgtttttgagaatgtcatataaatggaaccgtgcaatatgaaatcttctgttactgacctcttccgttcagcataatgcctttgagctagattaatccatgtttttgcatgtatcaggagttcacgtcttactattgttgattagtattttattgtgtagtgtaccagactgtttattcactcctgaaggacatttgggttgtttctggttttggtgattataaataaagctgctataaataaacacttgtgtatagattttgtgtgaacattttcatttctctaaatacccatgagggagaattgcgtgataaatgtaggtttaacctttttagaaattgctattttccagagtgattgtaccagttggcattcccacaagcaatgggtgagagttctagttgatctacatccgtgtcagcatttgggattatcagtatttttaattttagccattctaataggtgtatagggatatcctattgtggtttcaatttgtatttccctaatgcattcctcgattcttgatgcttttattgatggagga

SEQ ID NO: 6660 - DNA, 1034 bp, Homo sapiens
gctaatttttgtatttttagtggagatggggtttcaccatgttggccaggctggtctcgaactcccaacctcaagtgatccgcccacttcggcctcccaaagtgctagaattgaaccactgtgcccagccccagttataacttgtttccatgggaaaacatccgctttgaagcagtattcagtaatatattgaaatgagaaataggcggtcaagcagtgattcaggtttagtgttcagtgtaattaagaaaaggtgacttaagttgaagaacattgatgtatctgtttttaaattgcacctaattataatgacaacttacaagatctctttccttccttctctcttggaatgttgactataaatttcacataatttaaaaacaatttaaaagctagtcaaattaattgagaagaatcctgctttatcaaattttgcctgtaatcatatccagacatggcattttgaaaatcagaaaggattgcttccacttatatcagagtttgaaagtagaaactcttttcatgtaggtatgggtcacctttgattatatggtagtcttctgaatatggtcctcttacctgacacatatgcacctcatcaataaactacatacaattcttaggtttatatgtggtcatgttacaaaggatttcttaagtactcttaaatgtgttctactaatgtcttgtggaaaaatataatcttttgaaagcattcgtgttaaaaagaattagacgtgatttatctcatttagacctgttctttttcaatgtgtctttaaaatgtaggtacagtatataagaattcatactaaaggatcaactgagactttgatttaaatatgttataaattatagtatggaggcctgcataatatactacatatttttttttcctaagaagcttatttaaatggttctgttaagtgtaggaatgttctgatgattatctttttaattaaaatgagaaatctttgtttaaagtggcactcgtttttttatggcctgttacagtctctgtaacaatcatttct

SEQ ID NO: 6661 - DNA, 1107 bp, Homo sapiens
ggtagagacggggtttcaccgtgttagccaggagggtctcaatctcctgaccttatgatccgccctcctcggcctcccaaagtgctgggattacaggtgtgagccaccgcgcccagccaatcctagctatattacagtctttgcctttaaagttaatttcaccgtctgtgccatcttggtattggcatctgttgataccagttgaagttttcccctttttagtataccaagtaatttttgcgttatatccttggcttttttaatattatgcaactcagttttgtttaaattgtattgaaaatgttgatatttttgtcaggcattcaacccagttggcttcagtctacaagttgagatttctgtaggattgtggtttcaatgtctgttacattttgaaagcctttgcagttctattgagatatattccatgcgtgtgccacttgatggccattgtggaatctggatgatagtccatcttgtagttcagttctcaaagtctatgcctggccgagtgcagtggctcacgcctgtaatcccagcactttgggaggccgaggtgggcggatcacgaggtcaggagatcgagaccatcctggctaatatggtgaaactccatctctactaaaaatacaaaaaattagccgggcgtggtggcgggtgcctgtagtcccagctactcaggaggctgaggcaggagaatgggatgaacccaggagacagagcttgcagtgagcctagatggtgccactgcactccagcctgggtaacagagctagaatccatcttaaaaaaaaaaaaaaaaaaaaagtctatgccttactgttttgggttatatccacccatgtgcagcttgggggtgaacataggagttcattaaccactttatggggccattttcttgagttcctccctctgtacaatctccccagtactatctggttccctggggccgcctttttcagtcctccagccagaaagctaggactttatttaatcctgcatctgttactgcatatggggctacgcaatgggaggctagaggaaaaaaaaaaagcaatgaggttttgtctcacccttttaggatcacaactcctctgatcagagagg

SEQ ID NO: 6662 - DNA, 1028 bp, Homo sapiens
gtattttgtggggaggtattttgagactatttaagtatcctcctccttatcaaacttacagtttatattttgtttcattttattttatttcattttagagatagggtcttgttctttcactcagggtggagtgcagtggcgtgatcctcattgtaactcctgggctcaagtgatcttcctgctcagtctcccaagtagctggaactacagatgcgtgtcaccatggcttctttttttcctgttaattctttttgtagaggcaggatctcaaaatgttgctctgactggtctctaattcttggcctcaggcaatctgctgggttacaggtgtgacccaccacacttgtccccagtttattttttatgtcattaatggagtcatagatttcaactttattcagtggcttattttattagttatctattattacataacaaattacctcaaattgagtggcttataataacacatacatttaggctgggcacagtggctcacaccagtaatcccagcactttgagaggccgaggcaggtgggtcatttgaggccaggagttcaagaccagcctggccaatatggtgaaactccatctctactaaaaatacaaaaaattagctgggtgtggtggcgggtgcctgtagtcccagctactcaggaggctgaggcaggagaatcgcttgaacctgagaggcggaggttgcagtgagccaatattgtgccactgcactccagcctgggtgacagagcaagactctgtctcaaaaaaaaacaaaaacacagacatttatatttttttgggggggtgatttacaagtgagttgtatttaaactttaaatggcgaatagttattacaatattaaatttttcaaaaatatatagaaaaatgaatacttaatacttattttcaataaatttttatgagctccagtatttcagagtgccacctcccaaaatgacagcatgatataccttggcaatagtttagacctcttctagaattttctcacatctgctttttttttgcc

SEQ ID NO: 6663 - DNA, 1042 bp, Homo sapiens
tttagaaggttttaataccaacagctttctaggtgtcgtcttcttcctcttcctctcccctccccccctcccctccctcccttcctcctcctcctcctcctcctttttcttcttcttctctctctctcctttctctctcttttctctctcctttttctctgtctctcctttctctctctctgtgtccctgtctctctttgttgttgttttcccttctgtttgggttgtttcttcccctcgccttataccccccaccccccacagaccccaatccatctggaaagatgaagaggcagctgctatggtaactgtgcattttggttaatgaatagcagactaacaagatacataaaacatacgcaaactgtgcagagtttgttgctgtcaaagccgtagggatacaatactttttcttttccttctaaaaaaaaaaaaaactctcttaactgtggtgttttgttttctaatttaccattcctaatattgtaatgtttctgtgaactcctcctctttctgcttagtctgcacagtattacaccctgtggtgagtttatgggagctgagttgaggtgcatagaggaaaataattgatcaactggattaagaagtagatttcctttagactgatacatagaagaatagggacaaaatgtttttgactaaatgtttggttttttgaacgataacttctttttttacctcctttccttttggccactactgccccttttgggattctctctggggttaaagccagtaagtagtgtgtttcttaaagatgtttctatcataaaggtcagctgcaactggaatattgcgttcagccaagccttaaaaattcctgtaatctgtgccatcctgtctcatactgtcccatctcatagttgtcctctctctgcagtgctctatgcccaggtctctgtggctgggctgctccagcctggcggacagcatgccttcgctgcgatgcctgtataacccagggactggcgcactcacagctttccaggtactttctctgtctctgtgggttatttgcggg

SEQ ID NO: 6664 - DNA, 1065 bp, Homo sapiens
gtactcacctgtcccagctatctggaaggccaaggtgggaggtcaaggctgcagtgagccatgattgcgacactgcattctagcctgggtgacagagtgagaccctgtttcaattaaaaaaaatagatagatagatagatagatagatagatagatagatagatagatttatatggccctagaatactttagctatcaagtgtaaccagtaattttaggaaaatcttgagctaagtgaaacgtgatattttaacattagctagggttccatgtcaaaggttgaaattgtattgaattcaggagagatgttgtattttattccttaagaatgcttacaagtctactgaattttaccatgtacaaagtgaaatgttaaaatggaacaatacaggaaaattaggcattattcattatatatatggaaaacttaattttacatttgagattttagaggaatatggattatcgaattgaatatacattaacattcaaattctattacaaaacaataccataaggaaaattatcctgtgacagaaatgcttctcattctgtagctgataccctctctattgtatatgaataatttctgtgtagcacaatttctgtataataaatgtagttattttttatgtatatgttaacatttgacttgtatttatcccagctacacccttcaccttaggggtttgcagggaatgacaaatcaaacatgtttttgtttgtttgtgcagaaatgttttgttctcctaataaaatgaattattgtttattatggaatatgtacattatttggtaaatatataaacaagagtatcacccatatgccttccactttaagataattattgctagattaacatgttagtgtcctttgatctgaaatgacttatccatccatgtgtgcctgtgcgtgcacacacacacacgcccaaataatggtttcatttttaagtattttattacatttaattaaattatgagatatacagttaaaacatttaatattcattgtagaaaatagaagtagaaagaaggaaggattttaaatgtcctcccagagat

SEQ ID NO: 6665 - DNA, 1017 bp, Homo sapiens
tcttgcttttactttgttggttctactagaaagttttttcttggccgggcgtggtggctcatgcctataatcccagcactgtgggaggctgaggcgggcggattgcctgagctcacgaatttgagaccagcctgggtagcatggtgaaacccagtcactactaaaaatccaaaaaattagccaggcgtggtagtacatgcctgtgatcccagctgcttgggaggctaaggcacgcgaatcgcttgaacctgggaggcggagatagcagtcagccgagatcacacccactgcactgcagcctgggtgacagagtgagactgtctcaaaaaaaaaaaaaaaaaaaaagtgtaataagtcagaatacaatgtagacacgtcttgttttgaacacaatttaaataatgtaatttaattactgcctaagattgcatatacttctttgatttgaatgatggaaaaatttctaggaacttagcctgggtttgtttcctcatcttttctttgaagccagaaaagcatagaaaagcatatgtaagcactttgacaaatgacataatgtagcggcatatcagagtggcacaggtattttaaacctagctccagttcctgaagatggtgaacatctgcttagaggtactgtagagctccacaatgcactaattgaattactcttttctggagttgcgactgcactaattgaattagaatctctctctctctctctctctgtctctgtgtgtatgtgtgtgtgtgtgtgtgtgtgtaaatgagataattccaaccttaacgggagagactatgagagacatgactgatggtgtgtactgtgctgctatctaatggcagcctatggaactactacgtggtctccagggaagagaaaatacagcgtgacctcagtctaaccccatccagtttagttcagaaggtcccaggatgtaattttgtaattctaaattgaaaaggaaagaatgtgataaatttctgtattaaaaattaagatatattttattaggc

SEQ ID NO: 6666 - DNA, 1068 bp, Homo sapiens
aagagtggaaacagagggaatgatgaagggagcaccacagctgcacaatgccaggctcagtttctgaaaaggaaagcaaaaaaatctgtgttttatgttactttttttcttgctgtgtacaggcattatctttccattctagagctggttgcaggcttaagaaatactgcctactttccaaagtaatgccacaaatatggttgatatattaataatctatagactgtaattctatcaggagtcatttgattttgattaccagcatactttctttggcattgtactctgggttttaagcttgatttttctaaaaatcaggtaaccagaggaattacattttttaaagttctgccttgtcagcctcctctctcctcatcactccaatttagagttttccttgcaagtaacatgagagttttctggtttggagcatttctgtcactttgagttatttaaaagaggagcaaaatccaggcagccagctatgtcatatttaaattatattcctttcctgattctgtttattagaaatttgctgttttgtttttctattacctgtgctattgacttctcagtgttgggctgtgttatttcaatttatgtaattgagaactgaatatcaatcaagtaaggtgtttataggaggaagaaggagaaaatctaggcattaactgagactaaaggttgattcatccattcaaagctcagatatactaaaattgtaaccttgttaatcaaatggtattaggctatagaagacataaatgagcaaaattttctgagccaaatcagcttctgtttcctagaccttttttggaaggctttaattttgggaaagtatatgaagccatcatgatttgcagcgtgttagtctttacatattagacttagtggcttactgtaaaagcaagtaatatgttataggctatgtaaatgaattcaaatatcttctaaagatacacaaaatatttttttcttgatactaataattaggcatttatttgaagtactaatatgcaaaagctggttaccaggtacccacctgggtacagaattggtaggaaagag

SEQ ID NO: 6667 - DNA, 1032 bp, Homo sapiens
gcttgtataaatatcttgttcaggctgaactgagagaagtagtgtattcagaaaacttactatctcttttcggctgggtgtggtgcctcacacctgtaatcccagcactttgggaggcctaggtgggcggatcacttgaggtcaggagttcaaggccagcctggccaacaggatgaaactttgtctctactaaaaatacaaaaattaggtggatgtggtggctgcacctgttgtcccagctactcaggaagctgaggtggggagactcacttgaacctgggaggcagaggttgcagtaggccaagattgcgccactgtactccagcctgggtgaaggagcaagactctgtctcaaaaaaaaaaaaaaactctcttttctgggttacctagtcagtaattccatgtaacttaaatagtcacctgccttattaacatagtatacagatctttcaaggatctaagttgacttcttggctccatattacattgttctgtatataaaatgactgagataatattagacaactggttcagggtggtgacttactttagtaattgttttagaagttgttttggaatacagattttatcctgttgtctgtgtcacaatttgtagtgtaagcatgcactggcagtcctttcataccaacacatttgtttttcccacttaaacttggttattaattttgtcaattaaaaatgtgtcccttggcctggttcggctcacacttgtaatcccagtactttgggaggctgaggtgggaggaacacctgaggtcaggagttcaagaccagcctggccaatgtgctgaaacccagtttctactaaaactacaaaaaaattagctgggtgtggtggcaggcgcctataagcccagctgctcaggaggctgaggcaggagaattgcttgaacccaggaggcggaggttgcagtgagccaagatcgcgcctctgcactccagcctgggtgacagagtaagactccatctcaaaaaaaaaaaaagtctcttaaggcttcaggtctgtctgat

SEQ ID NO: 6668 - DNA, 1014 bp, Homo sapiens
ctaaaaccttaaagcttttaagattttaaattattaattttaaagtcagcatgtagaaaagtcagagaataataatattacctgtgtacctgtcactcagaatgatagcatttctttgcattaaaaattcaattgtttaagaaaagtttgacctattcttggggttatagaatatcttgcttgcccaaataatattgtgaaaaatgttttttaaaattcgagggccaggcacagtggctcaagtctgtaatcccagcactttgggaggccaaggcaggtggatcacctgaggtcaaggagttcaagaccagcctggccaacatggcaaaaccccgcctccactaaaaatacaaaaaattagccaggcatggtggcacacgcctgtagtcccagctactcaggaggctgaggcagaattgcctgaacctgcggggcagaggttgcagtgagtggagtacactgcactccagcctgggcaacagagtgagactgcgtctcaaaaaaaaaaaaagaggtgtatgcttaaacgccaatatgatgggttttaagtaagaacatgtgaagaatgaatctctatttttaaatttatgtacgcaattttattttaacttacagtagaactggattatagactcaaagtttaagagccagactgagcttcagataatcccatccactcactcatgttacacatgaactcccatgccagcagatacttcccccaggttgtatggctaattagtgatttagactgggcctaaatctctttagcatcgtgttgcctcacttttgctttcaggctacattaaaacatttatgtcaactataagaaaactttttgatgaatggtttgtttccagagcatcaaagttcagtatgtattccttaaatggaaaatagaaataaactacagtgtttgatacatagaaaaattccatgggaaagagttattagtactcttgagcctcgtatttatagtgctccatatgaacttaaaccactcccaggtaaaat

SEQ ID NO: 6669 - DNA, 1027 bp, Homo sapiens
aactatgtagattacaatcctttttagttaaaactcatcacaacttatgcccttactatgtgccaggtactctttctgaatacctttatatgtattattttaatcttaacattagcccttctagctaagtattgtaactatcaccattttatagatgaggaatttgaagcccagagaagttaattaatttactgaagatcacactccaggtaaatagtagagctgggatagaatcagtgtcaaattatgattttttaatgatattctattacataaactccttcagaaagacatttaagcttgcttcagtgtggcactttgagtctcagtgcatatgtaaacctcttttggttatagaaatgcatttatccatctatgcaaagcagtcctggtcttctacatttagtcatagtcattgacttggagcttcattgtcattgaaaagaggaagaggaccagaatttcattttagaaaaactgttcagcttatataataactgcattttgaaatctgaactttactaacttgtgtgaatctgagcaagttattttgatcacctgtgctgaaaaaacagatgctgcatctaaactaagcttttcctggataaattaagaaaacaattaccaaagtattccagagagaaatgtcttcagtcccttgatgttcccagggttattaaagttttacctgaagataaccaagacttccagaaattacaagtcatttacttcattcactgcagctaagagaagcttgtgctgctgcctcatagaattatttcttgctgcatttaacatgcattaacaagcatttgaaaagagttgaatttcttctagaaagttgagttggcttcttgagatcctatccaaaaaactttgtattttcctaatcccagttttagataaagccttctcaaaggcttttttcaggagcaagttttaccaagttgttgaggcctttttatagaacacagaaattgaaggattagagcacaaagaagagcagggtagttttttccttctttat

SEQ ID NO: 6670 - DNA, 1029 bp, Homo sapiens
aagttgggcagaagactctcagtttcaactttcagcatcacagaaattttattctggtaatcttaacataatttgacatctaggtgaacaacctccacctgaggaagttacacagaaagaacaaccagattccagacaattaaactttattactccgcctgaaacattaagtagtggttttaaaaaatagttttttatctcctctccctcttgatgtttattgtgtgggagaggatgtttgtccaacaagcatattgctcctcttagagcaggtgagcttggtaatgctgggtcccttttgcatttggttatattcattctcccccttcccacctatttctcacttcatctctcctgtagccatctccctccatctcttccccagctcatcatctctccccatccctatctttcccctagacctgcttatccctcttccttcatccttatcccatctctcaccaaccccactgcctagtatccactgtcctttccccaatcctcggtcacttttgtcattcctcttcctcttctaccctcttctctagccctagcccttcctctccttgcgttcctccttctgctttcccattttcccccttccatttcccttttctttctctcctcactttctctccctttgactctctttcttttctcctctttcctcccctcctttcagctcccctcatcacaataacctataattctctgtcctccaggatcagatcttgacttctctaacagcaaagattaattttgcttgctctgatcaatttgatattatgaacaaagaattctctagatggcacagatacactccccctcccccatattcttcaaatatttgactaataaattttaaaaaaattttgttttctttttgagatgaagtcttactctgtcacccaggctggagtgcagtggtacaatctcagctcactgcaacttctgcctcccgtgttcaagcaatcctcctgcctcagcctcccaagtagctgggattacaggcgtgcaccactgcacctg

SEQ ID NO: 6671 - DNA, 1093 bp, Homo sapiens
atactgctttgcaaaaaataatggaaagctgatcagccctcctgtttaaaacattctgttatctgggcagaagttggtatcctgtggctgggcacagtgcgttcacgcctgcaatcccagcactttcggaggccaaggtgggcagatcactcgaggccaggagtttgagaccagcctggccaacgtggcgaaaccccaactctactaaaaatacaaaatttagccgagtatggtggcgtgcacctgtaatcccagctactgtagaggctgaggcaggagaatcgcatgaaccctaggtttctttcagaaaatttcttgcctttatcttatgcctctggtgttttgtcacctttgtaatcaaaaattatttttaagcccaagtggaataagaactctagccatcagaaaaagtgaaaatgaaattaagtataaatcattgtttcttcttaagacttctgtttttcaagattttctgacttaattccgaattccccaaagcatcatatagttagcagtctaagagacttcactaatttttttgttgttctcttaacagtactatttcattagaacttctgaaagatatctttctttaaatacttttctctcagagtatgtctctagaatgtcactataggaaagctacgtagtaatagttcacaaataaaggtgacatattaaatattctcattgacagaaaaaattataataggcatgtgtgtgcttagtgatgtccttccaaattaattttatcagttgtttatcttggatcataaagaggaaaacagttaaaagtagagaacacttttaaaagataaatattcatgggccagctttcctttgaattttcatgaaaaagtagttggctctctttctttttttctatctttgaaatttattaacacataataaatacaatgacctataaatattataccaaatgcctcagatttttatcattctggctattaggaagactgtttaaatttttctctcaaattgaattaaaggaacaaaaaaactaggcaatttttaggctgtgtaacaaagaatattgttggccgggtggggtggctcacgcctgtaatcccaa

SEQ ID NO: 6672 - DNA, 1049 bp, Homo sapiens
atttcttgtcttccttgttggatttatgtgtgtatgtataagacagggtcttcctctgtcacccaggctatagtgaagtggcactacatgttgctgatgtatatcaatatttcatttcttttgaaaatttgctgagtagtattctattgtatggttatacccattcactgattgtttctcgtttttggctattaacaaagtttctataaacatttatgtagaagtcttgggatgaatgtatgctttttgcttttatttctctgaggtaaatacctaggagcagatgactaggtcatatggtaagtgtatgtttaaaatttttagaaactgccaaactgtttttcaaagtggtttacccttttacattatagtatatagcagtgtatgagagttccagttactccacattcttgccagtactgagcacagtctgtaatttagtcattctcattgtggtttaattcgtgtatctctaatgattaataatgtcaagcatctattctttgccatctgtatatctcctttggtgaagtgtgttcaaatcttttcccattttttaattgagtggttattgagttttgagattcttttatatattataagttacaaatgcattatcagatgtaattcacaagtattttctccacgttcataaaatttgtttctttgttttcttaaaagtgtctttcaaaaagcggttcttaattttaagtctactgcattgactttttctattatggcctatgttacttgctgttgtatctcagaaaaacctttgactaatccagagtcacaaggatttttccctgtgttttcttctctaagttttataattttcagtttgtattttggtctatgatccattttgagttaatctttgcatatggtacaaggtgtagatcaaagggttgggcttttttacacatgaatatccagttgttccagcaccatttattcaaaagactgtcctttcgaaatgcttttgcagctttgtcaaaaatgaattgaccatatatgtgtgagtcttctttgggaatctgttctgttcc

SEQ ID NO: 6673 - DNA, 1044 bp, Homo sapiens
gccacctcagcctcccaaagtgctgggattacaggcgtgaaccaccgcgcccggcctagggtttttcatagtgacccattatcaggggattaggcagttcccttctgttcctagattgctgagagttttaatgaggaacacatgttggattttgtgaaatgctttatctacatccattgagataatcatatggtttttcacttttattctgttaattggtatattacattgaattttttttagctttaaatcctttgcattgctggtataaacaccacttgttcatgaggtataattctttttatgtgttgttggattcaccttgctaatatctttttaaggatttttgtgtgtgtgtgtatctgtgtttgtaagggatattggtttgttgctttattttctgtgtctctggttgactgtcatgataatgttggccttataaaattttgaagtgttccctcatctattttctaagagtttgcatatgtgatattatgcttctttaaatgcttgatagaattcactagtgaagcatctagacctggaattttctttgtggaaagttttaattacaacttcagtttctttaataaatacagcactcttcagatttaatatttcttttgaagtccactttaatacttttgtcttccaagcagtttggccgttttatctaaattatgaaatttattgaaataaagttatcatattcccttattatccttttaatgcctgttaggagcatagtcctgtttccttttttggtttcattgattttttttttttatttttctagcttcttaaggtagaaactaagatcattgactttgaacctttttttaaatataatcagttgaagctataaatgttattagaagtaattctaatcactactttagccacatcccaaaaaatgtcaattaagtcaagttggtttataatattcaggtcttctgtatccttagtgatttttctattcgtccttaccaattattgagagaggaatttttatgtctcccactatagttttgaatttgtctattt

SEQ ID NO: 6674 - DNA, 1473 bp, Homo sapiens
tgggagcacacagaatactattaatgtgcacccagctggtctccccaggcaagaaggtatcctcttcccaaggtgtacccactgaatgttgttactacatattgagagtcattttatgcatatgcattctacctttcctgctttatgagtatttttaagcttttagttcaaggttatattcagaaaatatttcccagtataatgatacatcgtagcctaagaaatattttctcaatgtaattcccttcccagctacccaaatgctacagagaaatgttttctacttggccactatcagggttcgtcatctattgtgttgactattaatggctttttgattgggtaaggattttgctatagatgaaggtagagggctgtcagccctgaaaaacacacaggtcagacatttaaaaggcatgggtttcgagctgtctcaaaatattgcccaatagccataattttaccagcctttctgtcatatgctgctattacaaagtggaagctgttgaatgtttattggtgcccagggttttgctctccaatctaggttcagttgaaggaatattgtttctaagactgttttgagacatgtccagtacatcacaaaggagatcggggcgacccctgcagatgtggagccattagcccagttgaggatattctccaagttgtcctctctcctgctgatggaaatgggaatgaagttaagtggtctgaaaaacttgaatcgttcacatttctcagctctgggggtcatttaccagtttgttgtagaagaaataatcaggtaagttaaaagttcatttccagagaaggtaaaccccacttaccatctctgcatgatttcagtgggaattgattatcactaatccccaactgggctagaataaatgtaaagtttgacctttttaaaacgaaaagagagacaaagtctcagcacattccaaggagtggtagaaacagagctgaaggtgtccccattgtagattagtctcttctcactaaaatttactttccaacgtagggcctaaaggaaacctttcttaaagacaggctgaaaccccttcaaaggcagatgaggaggtacagacacgtgaccttttggtgcacactggagctacttggacaagaccagcatgccttgctgcacgtgtgtgtatttcactgctgagaacatcctttaacttggtgtgcaatttgaaaggatgtgaatcatggatggaaggccatttgtacatgtcccttggcaaaattctttctggtgtctcctaacttcagagacagggactctttttggatctctattgacaagtaataaaagtctggccctcataacttgtttccgaactagaaaagtctgtgagacccctacatcattctggtttttttgcttgagtaagaacaatccttttttatttttcttctgtacagtctaaagctacagagaaaaaaaaatgcactcttcccttgccg

SEQ ID NO: 6675 - DNA, 1150 bp, Homo sapiens
gatccctcttgggacttctccccaccctctttcttagagacctcttcccccaagcttcctagctggagacccccaagatcaagaccacgctggggccaatccccacctccccagcagcgcagtgatggagaagaagaggaggaggtggccagcttcagtggccagattcttgccggggagcttgacaactgtgtgagcagtatcccggacttccccatgcatttggcctgccctgaggaggaagataaagcaacagcagcagagatggcagtgccagcagctggtgatgagagcatctcctccctgagtgagctggtgcgggccatgcacccatactgcctgcccaacctcacccacctggcatcacttgaggatgagcttcaggagcagccagatgatttgacactgcctgagggctgcgtagtgctggagattgtggggcaggcagccacagctggcgatgacctggagatcccagttgtggtgcgacaggtctctcctggaccccggcctgtgctcctggatgactcgctagagactagttctgccttgcagctgcttatgcctacactggagtcagagacagaggctgctgtgcccaaggtaaccctctgctctgagaaagaggggttgtcattgaactcagaggagaagctggactcagcctgcttattgaagcccagggaggtcgtggagccggtggtgcccaaggagcctcagaacccacctgccaatgcagcaccaggttcccagagagctcgaaagggcaggaagaagaagagcaaggagcagccagcagcctgtgtggaaggctatgccaggaggctgaggtcatcttctcgcgggcagtctactgtaggtacagaagtgacctctcaggtagacaacttgcagaaacagcctcaggaagaacttcaaaaagagtctgggcctctccagggtaaggggaagccccgggcttgggctcgggcctgggcagctgccttggagaattctagccctaagaacttggagagaagtgctggacaaagtagtcctgctaaagaaggccctctagacctctacccaaagctggctgacactatccaaaccaatcctataccaacccatctctcattggtcgactctgcccaagccagccccatgccag

SEQ ID NO: 6676 - DNA, 1181 bp, Homo sapiens
tggatcacgaggtcaggagatcgagaccatcctggctaacatggtgaaaccccatctctactaaaaatacaaaaaaattagccgggcgtgatggcgggtgcctgtagtcccagctacttgggaggctgaggcaggagaatagcgtgaacccaggaggttgagcttgcagtgagctgagattgcgccactgccctccagcctaggcgacagggcaagactctgtctttaaaaaaaacaaacaacaaaaaaaaacaaccatggattacagtgagatgtgaagagggacagtcagggaagggttatatagaaactaatcccctaagctgaggcttgagaaactctatcaggtggtagatttagggaacagggcattctaggaagacagagcatcttgaatgaactgaagaaacaaaaccaactgggtatgttttggggaattgtgagaggcttggtttggctggagtgtagtagctgatcagggcagtgggcagaggtaaagcgagagataaaactggagtggtaaatagaaggtcagattattgggacctcgaatgccatattaagctctttggactttatcctgtgcattgaagaaactttgccagattggtttttgggtgctccatctagcaggaatgtagaagacaggtggactctgaagctgcaagtggggagacgatagatgatgactgcatgagtgcaggaaagatgcagcctagaagtcaggcagtactcgggggaaggggcggatctgagaatggagagcttagactctaggacctggctactaggtttgggtagtgagaggatgagggcttcaggaagaccctagctggctggatttctcttgctggtccccaagttggggaacatggggaaggggcagttgaagcagtgggaaaagttgggctgcttaccttgcttggtgtactttgtgagatgaggtgggggtctctggaggctatatacacggtatttggaagcgtagaatcggatctcatcctgctatctccatcctccctccccaccacagggctcacccctccagctacccctccccaccagttatggaagcccctggctgctgtctcactgctggccaaagccaaatctcctaagtccaccgcccaggagggaaccctgaagcctgaaggagttacggaggccaaacatccagctgc

SEQ ID NO: 6677 - DNA, 1023 bp, Homo sapiens
gtttggggggctgatgacaccctcttttgtcaggtacagctcttatcgttcacatgaccattaccaaaggcaaagagtgctacaaaaggagcgtgcaatagtgagtagaggaacagatcatgggaggatggggcttaccccctgagccttgagctcagagagctgcctgcagctgtagccctggctaatggtgtgttgattttttttcatttccaaacataggaagaaagaagggtggtcttcattggaaagatacctggccgcatgactcgatcagagctgaaacagaggttctccgtttttggagagattgaggagtgcaccatccacttccgtgtccaagggtaagcttgggccccaggctcaggatgttctttctatcccattcatctaccttggtgtttctttgtcttgcctccttgctctggtgtgctgagcaatatggggcaccttcatttctgcagtcagagggttggccactgggaatgagaagaaccacctctgtaccttgggatgctgtgtctcctctatggcatgggcccatatagccactccagcccctgcctcactctcctcctactagggacaactacggcttcgtcacttatcgctatgctgaggaggcatttgcagccattgagagtggccacaagctgcggcaggcagatgagcagccctttgatctctgctttgggggccgaaggcagttctgcaagaggagctattctgatcttggtgagtggagggagggcctaaagctttggaatgcttcatcccctccccagaagggttcctaaccctttgtgagtggggctaggcagacttaccttagtttgacatacaaagaacccaagggggctgggcatggtggctcacgcctgtaatcccagcactttgggaggctgaggcaggcaaatcacgaggtcaggagttcgagaccagcctggccaacatgatgaaaccccatctctaccaaaaatagaaaaaattagctagaggtggtggcacgcacctgtaatccca

SEQ ID NO: 6678 - DNA, 1050 bp, Homo sapiens
cgttatgcgcccgcgcggcgcaatgacgtaacacaggcccgcccactgcccctgttgggttcctgagtcgtgctgcgtcgacaacggtagtgacgcgtattgcctggaggatggcggacgccggcattcgccgcgtggttcccagcgacctgtatcccctcgtgctcggcttcctgcgcgataaccaactctcagaggtggccaataagttcgccaaagcgacaggagctgtgagttccgggcttggggcggggaccgggctgagatgaccacaaggcttcaggccctgacgtgcttaggtttccaggtggggaagtctgggggtccgccagtccagtgtctgcaaggcctttacgccgacccctcggcagtgaccagagaaagcctgcggcctcggtcgcttaccttcctccatgtctgagtagatatcgctgagtcttgttgcttttttcttgtgacctgtgcagcggcggcagcgtgggagcctcgtggccccaagccacatggctggcagagtgcagcggggaggtagagtcttgttccactgaggacgttggttcttcggcatcttctggggggcttttcgttgggtgaggcaaaccgtgatttgaccttagcctcagtcacatttactgggattcaaaagcaagtgaaatttctttagaatgaagtctgggattttcgtttgtaaagaagaaaatgaatgaaagtagaagcagagttttgttttgagttacactgagaattgagagtcatcaacagccctaccaagtaggcatagtagtgggcttggagctttggctaattgaatcaaacaaacctaggtttgggaccaggctctgccactttttagatacgtgacccgggcagtttatttaacctttctgagtctttctacagggatgtcatcatccactttataggatttttgtgagtttcagtaagatgatgtgtaagagtagcaatctcagtgctggtacagaggaatcttgtaaaagtgaaagctgtaccatagttatggcaatttaggatgctccaaacacatgtaag

SEQ ID NO: 6679 - DNA, 2129 bp, Homo sapiens
agagaagaaacccccaactaaggcagtagtctctaaagcaaccactaaaccacctccagcaaagaaagcagcagagagctcttcagacagctcaggtaaggcatatggaggccctcagttcagtgagatgctctcaggcagctgctaagggctcccctgaatccaatttggggagctgttgattccatcccttctgtgtctagactctgacagctctgaggatgatgaagctccttctaagccagctggtaccaccaagaattcttcaaataagccagctgtcaccaccaagtcacctgcagtgaagccagctgcagcccccaagcaacctgtgggcggtggccagaagcttctgacgagaaaggctgacagcagctccagtgaggaagagagcagctccagtgaggaggagaagacaaagaagatggtggccaccactaagcccaaggcgactgccaaagcagctctatctctgcctgccaagcaggctcctcagggtagtagggacagcagctctgattcagacagctccagcagtgaggaggaggaagagaagacatctaagtctgcagttaagaagaagccacagaaggtagcaggaggtgcagccccttccaagccagcctctgcaaagaaaggaaaggctgagagcagcaacagttcttcttctgatgactccagtgaggaagaggaagagaagctcaagggcaagggctctccaagaccacaagcccccaaggccaatggcacctctgcactgactgcccagaatggaaaagcagctaagaacagtgaggaggaggaagaagaaaagaaaaaggcggcagtggtagtttccaaatcaggtctgtacccaatgaacatgccctctgggttttgtccccccaaatcaggatgggatatactctttgagagtagggtagtgagaggaggcccaccactgggcttccagttgtggaaactgggaggaagaacaggaaactggttacctttttttttttttattagagtctcactgtgtcacccagaccagggtgcaatggcatgatcacggcttgtgcagccttaacctcatggactcaggtgatctttccaccccagcctcctgagtagccgggactacaagcatgcaccaccatgtctggctcatttttttaactttttatagagacagaatctcactatattgcccaggctgatctgaatttcctgggctcaagcgatcctcctaccttggactcccaaaatgctggggttacagttgtgagccactgtactcggcctgagtctggctttttgttttgtaggttcattaaagaagcggaagcagaatgaggctgccaaggaggcagagactcctcaggccaagaagataaagcttcagacccctaacacatttccaaaaaggaagaaagtaagttgtctcactttcttctcaggagccagctctttaaaagtagaaaaatctaggatcatcttgacagctctgcctggcgtgacctggtacatgtgcccatgtgtatcactcaggagaactgttacatgaccactctgtctttaatttcctacttcattcttctgtagggagaaaaaagggcatcatccccattccgaagggtcagggaggaggaaattgaggtggattcacgagttgcggacaactcctttgatgccaaggtgagagagagatctgtgccattcttgggagggaggatgggtagtgtcagagaggacaattcttggttcaggttggtgggaatcttctctgggttcaggtttccttgagcagggagtagaaagaataaagtgacagggctccagcatggtcctcctctgtgttaatctccctctctacttaccagcgaggtgcagccggagactggggagagcgagccaatcaggttttgaagttcaccaaaggcaagtcctttcggcatgagaaaaccaagaagaagcggggcagctaccggggaggctcaatctctgtccaggtcaattctattaagtttgacagcgagtgacctgaggccatcttcggtgaagcaagggtgatgatcggagactacttactttctccagtggacctgggaaccctcaggtctctaggtgagggtcttgatgaggacaga

SEQ ID NO: 6680 - DNA, 1648 bp, Homo sapiens
tttgtacagacttgtttttgagtgttgagtagcagggacaaaataagggaatgttattttttaagaaaattcattttcattgttgtctccttccttttctgtgaaagtcctcatactgagaaatttgtatattttatattaaatcacttactattgatttttgttgtgattttcaaaggtggattcccacagataaaatcttggctattgcccaaaacatagtaaagggtcacgtgtgactttttataataggaagaaaattctgcctttgtgagtgcacatgtccacatttcatccctccttccctcaaaaccctagagaggggcattaaagaattgttgatgtatatgcaatgtctgttaagcatgcactatgtatttcatcctcatttattgggtctgggactgaagtttttagccagcatggacctaacctactttttgggataaaattctctgttttgttacaggcaaaattctggtatggcgtgaatgccatgggtcattctgaatatatttttttctgtaattttatcattacacgatgtttgcaatacgtgctttgttttttaatttgaaagcaaacttttctactgttgaaagacattttttgacaacttgacccttcctagtattgagttctaagttgaggactgcatcttctcgttttttacagtatagagaacaaaatgacatgagtttgaaaaatacatatcacttggtattgctgtcttggttgcagtggtgatacagaattggtttcattaattcctacatggttgagaatcactgatcaagaaagtggggggaaaaaaaacaaacgttaaaacctcaatcctcagtaggaaggtagattacattaggtgaaattataggtaatctatgtatgtgctaatggggttggaaagaaccttacagagcatattacctgataaactggagtgggtttgggagaacaaactaataggattattgtgtctcctagttggtacctgggagcaattgacatgcccccttcagaaccttaactgttagtagcagtggctgtaacaacacaaaccagtgaccagagataacagcttttaggccaagctggcctgacggtatggctgcaggaagtgactgagcagtagcggtactcagccagaccaagacggagagggaagagtccacagctttctggaagctaaggcattctggtggtagaaaagtgtgccccaagccttcatggacgagttataggtcttaagattagtctcctcttgtttggattccatacttgctaaataacctgataataacctggttttccatgtaactgcctctaggaagaaaatgtactgttcatgctgacacagatatttcagtctgcatggtaaaagttctaaatcttactacaaaataataaactggctggtttataatgtgtcttgggagttttattattgtgagtctaaacccctcccaccccctactcaaaccagaacaactttggtgccagttataggactggggtccagacctgtgatttcactgcagaggctttttggcagcagcttgtctcacggtgccttttccaggctatattctagcctacgcatagtccaaattgggggttggcaaaatggcctatgggtcaaatccagccc

SEQ ID NO: 6681 - DNA, 1045 bp, Homo sapiens
atagctcggcctgctggctgcgctcgcgcttccgccatttggcgcgccggttcttgaaccacacctgcgggcacgggagaaaggcggtcagggcccggggccgggtcccagcggctgaagggcgggccaccccgacggggcttccagccggggccctgcggtcaataaacgagatgaggtggctagagacggggtgggagggaaggagcgcacggagtccggggtcggagaacagaaggcgcgggcggctggaccgagtcatcggcgccagggtctggcgggacagtaggatggggttgaggaggggtggtgaggggaaggagagacggtgtcagggccgaagaagcgcgcggtccgagtagtagggagcagtgggagcagaggctggaggttggcgggcaagagaccgcgtggggctgcggccgggagccagggtccggggtccggggtccgagggagggggcaggtggggtggaaccgctggcctccgggtcgcaggctgagcgcggagggcccgcgcgggtgcgagtcgcgggtctggagagcatacccgcacgcgggcctcggtgaggttggtccacacggcgatctcctcgcgcgtgctcatgtcggggtagcggttcctctggaaggtcgcctctagctcctgtagctgctggctggtgaagtgcgtgcgctgccgccgctgcttctttttcagcgaaccgtcctctggggagccgccgggcagcgaagccgaggccttttctgagtctgggggccagggtgggggcaggtcacagagcgcccaagccagcgcatattctccggctcggggacctcctaagccactcgctggctcccaccggggctgcccagccggggtcccacccgcactggggatgaagctgttatgtcctgcacccccggaagggggcgcgcttaccgctgtgctcctggcccttgcagccgtgctctgggagctgggggtgcggagtgccagcgtctgacagcgacagggcagggctccgggcctctgcctcgctgagcaggccgaactccatgg

SEQ ID NO: 6682 - DNA, 1050 bp, Homo sapiens
ccagtgactgctccactcatggacagcctctaccaagcctgctccaggccataggcaggagcttcattagaccaccttcctactcatacttcctttcccaaacttagcctcacattgcccaggagcctcccagggtccttctccaagtttcccccgcagggtccccttttctgcctgctctcccaggacccctctgctgcgaggaagggaaatgggcaatactggggctcaagactctgggtgccttttggttggaggagaacagaaggaggctagggacagagggaaggggtagagagctgagtgggaggggcctctctgcctctctcaccccttccccattaacaggggcttaatgcaggctgcacaggatggcattaatgtggtggattagcctagattgagatgtgtgtcacttggctgctctggatttattaggagcctttctcagggaggtgcagatgggcagcagcctgtatttgcacatggtaatgcccccttcaacagctcagagatcacagctgtgcccccactccccaccccacctctcaagccaggttgggagtggaaccgaggtcaaggcaggaggttgagaaagagtccctgctctttccacaggcagaggggtctagatcttggaccttttattgggtgtgaagagacagggctggagggaacccaggacaggagaaaagtcaggccagaactggaggtgtgctcagcttacttccccttccaggtcgggtcaggtcagggggtttggagctggaaaactttggccaacaatgctctgatggaagggagatgtccctgagaaggaactatggtagccttggctgggaagatgagggaggaagggttagaactgagagttggaaaaaggggtgctctgaagtctccccttacttcataccccttacttcatacccaagatgcccttgaaatgcaaatcatccccctgacttttccagaggccatggaagcaacatggagctgggaaaaaacccagagaggggtttacctgtgggaaaagcagtcccacccttgcca

SEQ ID NO: 6683 - DNA, 1002 bp, Homo sapiens
cggggatcagagaaatgactccacagtcttcctgctcttccttgcttccttccttcagcaagtattaggtgttaagagggatcccaagaacagtaaggcagagaccctatcttgtaggagtctgcagtgtagggaggcaaacagagcacaggatggaaagatggaccgcatgggtctgactcccagactgtgggagatcagagagagggaagcccatggaaggtggtaccgagtgttgggagctcagagaatataggcacgtgactgaattgggagttcaagaggaagagaaggggtatggcattctaaataatcagcagtgttgggaataagctggcaggctgggagggcagtggtgagcctaggttagtcagagtctcagtgtaggccacgggagatctgcagagagaaacgagtcaaaccgagggggcctccaatgggggacaaggggcagtggttcagatttgacaaagtctaggctacagtatgtccagctttttcatcaaaaaccgctaagattcacactgagcaacagccctgaataaagaaaaaaaccctaagaccagtcaaaaacaacatctactagaaaacagaagcatgacctgaaacagctgccactagtatgaaattgttttgaggtcaccagctttatgttaaaaatgcaaacaaatttttcgttctattccatactttagtcatggattataaaatattttaatataaaaataaagctttttttaatataaaaccccccaatcttcaagtgatatcaccacaccaggaagatgggccctgtttagactgtgtgtcatgcctcctccactcccgtactgccctcctcccccgcccaccccactatgagaagcaatgcaccaagcagtaggggtcactggaggcttgtatccaggggtgtgacaaaaaacagcatctttgtgacctttatttgaccatggtgagcataaagggttgggcagggaagaaataggaaaggagaaactatta

SEQ ID NO: 6684 - DNA, 1002 bp, Homo sapiens; identical to SEQ ID NO: 6683

SEQ ID NO: 6685 - DNA, 1022 bp, Homo sapiens
gcgctccggctaggacgcttaggcagagccaagtgggcgagagtagagtggtcccggtagccacgggtaaaagggatcggctggcagcgaagtgggttgggccgctaccccgaggaaagtggatcggcgccaggtgggaaggcgcacggggccgccgggtctcagcgctcagacttctctgccactcaagtttcgccgattttctccacttgtcgctgtccgtctctcctcccttttgtctctgttccaatcctcccacgtctcgcctttctttcctcttctttctcctcagccgcttcgctcctgctgtttaccattctccttcctctgccactttaaaagactcatttctctttctctctgctcctctttcctcatatctttcctcttcttcatttcccccttcttctccaaggaaggtgacttcgtggagacagcagggtttggaatgatacaaaccaaagtagtattccaacgctgccacgaactgcaccatcactgagtgaacttggacgagtaactatcatctccctccccgcgcaaaacaattaagaggaggttcctgctggatctcagggcttgggctgggcactccaaaggcattgcctttcagtctgtacccttgtcttgcttaggctgtgctctccctccttcagcagggctggtttcccgctggtggtaccaggttaagtcctgtgggcaaggtgtggccttggtgcctgctggttaggaatttgcaagggacaggacagatgaccaaggaacatcctggcagactgtgacttcggccctctctgacttaggcctcaatttccaggaaacaggctccttctcttctcccagttaggctatgttgcttgggtgctccgaagagcctaagcccaggccaaacactgtggctcatgcctgtaatcccagcactttgggaggccgaggcgggcggatcacaaggtcaggagattgagaccaccctggctaacacggtgaaaccccatctctactaaaaaatacaaaaaattagc

SEQ ID NO: 6686 - DNA, 1047 bp, Homo sapiens
aggaagaagaatggcgtgaacccaggaggcagagcttgcagtgagctgagatcgcgccactgcactccagactgggcgacagagcaagactctgtctcaaaaaaaaaaaaaaaaaagagcctaagcccagtcacacaatatgcccctaaggcaaatctgagcagtcatgtcttgactgttcagtgactcccattgcccttaggataaaggtcaagctccctagcctggcatacaagaccttcaggacctgaccttgtcttcatctccaatttcctagtagtgtcctgcacacctctggcccttcctgtgaaagtaacccatctttatattgtcaattcctactcctccaatgttccactcaagtcttattttctctgggaagccttttctgaactctcagtttagccccttgctctcatgaccctcagtgtataccttctattacaccacccaccatattgaagggatcagcttatgtgttgtctgctatgataataaaatttaggagggtaaggaccatgtctgttattcccaggcataatgtagaatctcaataaatgtcacactgaaatctatgaggaagatgttctgcctggtaagatgatgattagtggttaggagggactagggaattgtcatctctctcctccccatctctattgcacaatcacatgcttttagaatgatgaatttctggaggtatgtagaagtagatattggcgagcagaaatttttggcccacttagaggattttccaatcggctttccaggacctctcaatctgagacaggcccaggacaccaactctcagttttcaaatgaagaggaaaatggctttgaggtaatgtggaaagaggtgctatgatggtatatcctctttccctgactctctttgggtgatagaggctagatcctcagctggacccaccgaccagaagcccaatgtgcaggtgtaggaagttactgaggggttcttcacgtctgatatctgatgggtgctttacactagagcatcgtggccaggtgtggtggctcacacctgtaatc

SEQ ID NO: 6687 - DNA, 1260 bp, Homo sapiens
aagtgctgggattttaggaatgaaccaccatgctcaacccattcctttatttagaagagccaactgctcctttttcagcagattgttactgttttagagtgcaggcacagaatgaccactctttctatttttcaggagaaactggaaatttagatcattgtgttttctaattgttggaaactagttaaaagtatttttaagcctttttcaggccaaagaaaatatgtctgtggactggattctgcccaatggttactggatgatgaccctcaataaacaaaatgggcaggccttatgagacttaatcactgcagttctctatacataatcacatagactttttttctttgtcctactctgccagctgtcacctttgtaccttgggtgccctgagtggctaaaagatggagtgagatagagaaggtttgttttatttttcatctccaagctggcagaagggacagctttggacatattagtagcttaccttgtaaacggtttttgagatactctcagaatctccacagggggaggagatggcatgctagagctgaggtaccctggtcacccgattatcaggtctgggaggattttccagtgatgcattgtcagggcaccagcttttttcccagtttaaccttcttttacttccaccctttaagtaaatttcttgagctcagtaagttgtttcctagtttagtaactttggttattctcaataaagcacagaactatgatgtgttcctaggccagctctggaaatgttaaaagctctgcatctttagtgtttctctggctttttttttttttttctctgatggagtcttgctctgttgcccaggctggagtgcagtggtgtgatcttggctcactgcaacctccgcctcctgggttcaagcaattctcctgccttagcctcccaagtagctgggactacaggtgcacgccaccacacccagctaatttttgtatttttaatagagatgtggtttcaccatattggccaggctggtcttgaactcttgacttcgtgatccgcccacctcggcctcccaaagtgctgggattataggtgtgagccaatgcgcccagccttctctggcttttaaaggtattgagtgaacataaaccttagaagggcctattgctggtcctttagctccctactaccatctaccttttcagaaagtccatcagtttttcttggtttgcccagctctgtattagacacaaaggcatcatgaaaaagaaaaacaaaat

SEQ ID NO: 6688 - DNA, 1081 bp, Homo sapiens
gtgatcctcctgcatcggcctcctaaaatgctggattataggcgtgagcacctggccttttaagtattatcagatttaaagtgttttgctatttcaggaatgtaaagtggtatatcattataatcttattttgtaattttcctgattattaatgaagctaataatcttttcatatatttatttgctgtttatgtttcctattctgtgaaacacctattcatctctgttgccaattttggggaggggttatatgtctagttcttatagttttgtagcagttattgtatactctggatattactcctttatattagttatatgtgcctcaaatattttcttctggtttgtgccttatcttttccctcttttttatgttgtcttttgaacaggcatttttaattttaacatggttgaattcaccaattttttaaagaggttttgctttttgtttcttgtttaggtacttctcccttatgctgagtttataaaaatactctcctgtagccaggtgctgtggcacacacctgttgtcccagctacccaagaggctgttgtggaaggattgcttgagcctaggagtttgagtccagcctgggcaacatggcaagaccctatctctaaaaaaaaatcaaaaagaaaatattctcatatattagcttctaagagatttcaagttttgcttttcatatttaaataacctgagatatatttttggtattccattaaataagaatacaatttattgtttctttttctcctgcttttgttggatatagacagagttgccaagtgatacagtgactcctctttggatcctgttgaggtaactgggatgccacaaagcactaggggaatgttctagacccagctttaaatggacagtggtttcaagggtacatgttactcagagtctctgggccagtggcttatctggctaagggtgttagttggtatttatttagttgttccctctcttatttatttttttctattaatttttcatttgtgtgggtacataatgaatgtatttctcttgttatttctgacacaagataaatcttaagttcgtttctactatact

SEQ ID NO: 6689 - DNA, 1047 bp, Homo sapiens
ctgtagtatgttttgtgttttttttttttttttttttttttgagatggagtctcactctgtcgcccaggctagagtgcagtggcgtgatctctgctcactgcaagctcaacctcccgggttcacaccattctcctgcctcagcttcccgagtagctgggactacaggcacccaccaccacgcccagctaattatttgtattttttaatagagacggggtttcaccgtgttagccaggatggtctcgatctcctgacctcatgatccacccgcctcggcctcccaaagtgctggaattacaggcatgagccaccatgcccgggctgtagtatgtatgttttaagctaagtattattataaaagtccaaaagcttaaaaaaatttaaaagttataaggtaaattatggtaagctaaggttaattaatgaagaaagaaaaatctttttaaaaataaatttaatgtagcctaagcatagtgtttataaagtttgcagcagcatacagcaatgtcctaggccttcacattcactcactattcactcactgacttatccagagcaacttccagtcctgcagggtccattcattctaagtacccagcacagggttgccattttcttttttttctttttctttttttttttttgagacagagtcttgctctgtcgcccaggctggagtgcagtggcgcaatcttggctcactgcaaccttcgcctcctgggttcaagccattctcctgcctcagcctcctgagtagatgggactacaggcgcctgtcaccacgcccggctaattttttgtatttttagtagagatggggtttcaccgtgttagccaggatggtctcgatttcctgaccatctgcccacctcggcctcccaaagtgctgggattacaggcgtgagtcaccatgcccggcccattttgtatcttttatgcagtatttttactgtactttttctgtgtttagatatacaaatccttaccattgtgttaaaattgcttacagtgtatagtattcaatacagtaacaggctgtacaggtt

SEQ ID NO: 6690 - DNA, 1003 bp, Homo sapiens
acaagtccaattgatctgtttactttccagaatgccttccctgtgtctggtcaactctatacaacacacctactatctcttgatgccctattgacagtgattgacagcaccgaggcccactgccaggctaaagtcctcaacagcctcacccagcaagagaagaaggagacagccagaccaagctgtgagatagtagatggcacccgagaagctagcaatagtgagaggcatttctttctttgatgaacccagtgttctatgcttatcccttctctactctctgagtcgtttttcctgtccccatatcacttcccctgggatgctcccaattctgtttctgggctttggcagtttaaatcacaggccagtcaggcagattagtagaactcatagccttctccctttttcctcctccccactttggttttttacagaattattatttctttatggcaagagaagagaacagagattaaagaatataggatttctgtctctgaaagctccaggtcccaccatccctcatccccaatatctgcctccactctaattagtcctctctagctcccccttgaaatttgaggttgcagaagatcagggaaagtgactgggtaatctcttcattaaattagagaatctaatgcttggctgggacagggactacttattttggcttgggtttgtcctgctcagggctggcgccctgtgcaggaaccatgcaggtcttctgggcttgggatttgatctatcctgcagctctgcttggcttcataccctataagtcttcacgtatcttcttctctcttaccagctgagagaactgccagcgatgggaaagctgtaggcatggcctcagacatcccaggcctgcatctgccaggtggagggcggctgccaccagaacatgggaaatcaggatgcagtgatctggaggaagctgttgactctgggggtgggtactgggtgtccatgaccctaagctcctcacctggagggcctggtg

SEQ ID NO: 6691 - DNA, 1027 bp, Homo sapiens
actgtgctccagcctgggagacagaccaagaccctgtctcaaataatataattaatatatttctatttgaaaaaaaaaaaaaagaccagagcagtatcctaaattgggtcctagccaaactgtcttcactggcctaaggagactggtgggaaagaaaactagacaggaagctgtgtgcccacacagctccccgcttccccgctccctgccctaaccccactccaggtgctgctctccctgcgcattttgctactgatgaagcccagtgtgctatcccgagtcagccaccaggttgcgtatgggctccatgaactcctgaagaccaatgcagccaacatccactcaggtgatgactgggccacactcttcacactgctggagtgcatcggctcaggtgtgaagcctccagctgctctgcaggccacagccagggcagatgcacctgatgccggtaagccctttcccagggagactcaggctggcagataaacagttacaccccaggagttgggacaggaaaacaaaacacaggttactgtgttcagcagattaaacagccctggctcctgccatcacttccagagcttccagtgcccgctggctagtacccataagttaaatagcatgagggcaaataagcaatgcagacggctgtgaagccaggcttcctactgtcctgaggactgatttgtcctgaggactgtttcccagtttctgtttctgagctgtcccgaggactgttttcccagaattctgggaaaatagaattctgtgagcagactttatatcactaaatcgatacatcactaaatcccagaaactgggaaaacagtcctcaggacagtggaaagcctggcttcatagccttctgcattgcttatttgtccttgccaccactccctagagtggtgctacagctgccactagatgccatcaggaacccagattagcctgccaccttatttggtcaacagagaaactgttccggccatcctttggccctctggtgacagaaattaaactatgc

SEQ ID NO: 6692 - DNA, 1025 bp, Homo sapiens
tgtccccccaaaagcccccggggtttatcagccgtggcctccctcctggcagaaaatcccaaggttgctccagaccgggggaggggagcgggaggcggacttggccccagactgccagcctcctcccggccgtgaaagaccctcctgttccctgccctggagggaggagggggcttaacccccaccggggcttcccggattctcctagacctctgcccgctgaaaagcagcgggagcccgtagactgtcgagggcctcccgcccctcccgtcgcgagggcggggccagtggcgtcatttccaggcccgccccctccggccccgcctccccttggtattttcgggactttcctaagctgctctaactttcctgccccttccccggccaagcccaactccggatctcgctctccaccggatctcacccgccacacccggacaggcggctggaggaggtcggaccctcccccaaatctgggcccccatctcccgcccacccccatttagatctgaccccctcccccacgccactcctcccaactttaggcgggcgtctaaaattctgggaagcagaacctggccggagccactagacagagccgggcctagcccagagacatggagagttgctacaacccagtgagtcatgccgcctgcccctgacccggccggctgcccctcgtgtctgtccacctgtctgcccgagccccctctgctgccttacacctgtatgctcgcagatgctctcagcctgccagtctgtccatctgtctgcaactctgcctccaaaaggagctttctcttgggtctgaggaggaggggggagtgaccactgaagacttggagatgggaggtggggctgtggggggtgctgagagtcggatgccacccccagtctgtctccaaaccagggtctggatggtattattgaatatgatgatttcaaattgaactcctccattgtggaacccaaggagccagccccagaaacaggtcagcaagttcactaacctcccctagtcctaa

SEQ ID NO: 6693 - DNA, 1024 bp, Homo sapiens
tctttattcagggttttggggagatttctggggagctaggactcctgggctgggctcctatcttggggatccatatcttggggactccctttagctcagaaagccccttggtttgcatagagatgcccttctcagtgtgcgtgttctggctctttccccagcccctcacccctccagccccacatcaggccccaccaggaacacatctgggcaggaagcgacagatggatccctgccatggccctgagccccctcccctcttaacctactccaattcctgttggaatttatggaactcctgtccatttccttagctgtgggcccccattttcagctccaagctcagaccctccctggaataggagttctcttggtatcacaagttccttatgtgacccatcctgggcctcaacttactcatcctgggaacgggagacgattcacagaagaaagcatgcaagagcagcgtccaggctgaaagaactttggccacctggcactgagaactgaattccataggctgtgagctctagcaatgccctgtggactcagttctggtgcccggcagtgctacaacatcaatgccaaggccgtggggcagctgatggtttgggctcccaacttcccagccaggtgcttctgcaggcccacatcttgcccactggccaaacctttaaataactttgactcgggctactcttatgctcaaagacgtcaggggctctcccaaatctctttaccctgccagaaagtcttctatagtacggcctccacttagctttcacgcctgatcttccatcgcatcctgctcataacctgccactagtgaacccctgctgctccggctccacacttctcatgctggtccttcctcagtgctcctggggacacctcttgcctgtcactgtctgttggaatcctggacattcttcaaagcctctctcagatgcctcttcttttttcctttttatttattttttttgggatggagtctcattctgtggcccaggctggagtgcagtgg

SEQ ID NO: 6694 - DNA, 1044 bp, Homo sapiens
gcgggggtaggtgccgtacgcgcgccgcagctcccggcgcacgaagtccggtagctgcagaggggggccccgcgcgcgctccacgcggccccagcgcagctcggtttgcaggctcccgccctccggccacggcgcccagctctcggccaccgccgcgggcgcctgcagcgacagtcccgagatgccggcggcggcgcagggccggcgcagggtcgtggcgtaggccggagggcaggcccaccagggcggcgcggcctcgggtggcgcggcggggccgtagaagcggtggtattcccgtggggccgcccactcgcccgcatgcaggctcccgggccggctgcggaagctgtgggcctggactgggggtagcagcagaggggcggccaggtaggtgcaggtgagcagctgcggcggcggcggccagacgccctgtttgggcggcggccagctgtacacatacatggtcggccccccaggcggctgctgttcttactgggggctcctgcggatccagacctgcggcggaggaagggatatgtagacagactttctacttaaccgcctcctgtccctgtgggccggttccccgggacgccggttcatggctttgggggaattcatcccaaatcgaacattcagctccccgcctagcctcttgtcccaaggtcgggcagagcctcaggctcccagcagacaataaggagccttttcaagccctccgccgggatgctcttcccagtgactccccactcacttgtctccttcagccttggggagccggcgggatccagagcggggctcctctccgcactttgtagctgcgttgctccgctccatgccctgcctcagccactcctcctggttaccaggcaaaaggaaacaccttgagctggccaggagctaccagcgtctgtctacacctgggtgagccgtactggtcgtagtggccccaccctacaaggatgcccttcctacagtattactgatggctgtctaatccggttagctcccagtcactacaccccagcctcccagcgcctgcag

SEQ ID NO: 6695 - DNA, 1050 bp, Homo sapiens
tctgactgctctgctcttcctattctgccccccttgcttttcctctgaagtgccaggcattcttctacctcagggcctttgcacttactctccctatgcctgcaaagttctgcctgcagatagcttcataccttacctcacttccttagaccctttcgcaaataacttctctcagttaggccttccctgacctccttatttaaaaaggaaatcctgcaccctcctcccacaaagcagtatccccctttcctgcctaattcttctttttaaaaagttatatatatttgtatagtcagggtctcactatgttacccaggctggtctcggactcctggactcaagcgatccttctgtcttgcctcctaaagtgctgagattacagacatgagccaccgcacccagcctaatttttctttttcttttcttttcttttttttttttttgagatgaagtctagctctgttgcccaggctggagtgcagtggtgcaatctcggctcactgtaacctccgcctcctgggatcaagcgattctcctgcctcaccctcccaagtagctgggactacaggcacgtgccaccacacctggctaatttttatattttttgtagagacggggtttcaccatgttggccaggctggtctcaaactcctcaagtgatctgcctgcctcagcctcccaaagttctgggattacaggcgtgagccaccgtgcccagcctatttcttctttaaaacacttatcacttctgcgatgtctattatgctttaagaaatttttttttaaattaccatctagcttattttacttacttacttatttgtcttgtttattgtctgtcccccctccttcccactagaacataagctccctgaagataaggatggaaatgtgctttatccattaatgtttctccagtacatcagtaaatatttgttgaacaaatgaataaaatggaggaagctcttgctttggggtttttccgactgttggaaaaatattctcaccactggagacggagaattctcctggcccagcaccaagcccgag

SEQ ID NO: 6696 - DNA, 1101 bp, Homo sapiens
aattacatttgcaaagtcccttttgccatttaaggtagcatatcacaagttccagggattcaaatgtgggcattagggaacatttattcaggctaccacagtggtgctcttcttcaagctaggtaaagatggaaagatcaggtttggtaagatactgagtttggatttgtgtagactgaactagaagtatctaggtctggttctttgcttgggtatagatttgggaatcctcaacagaggtgtggtggctgaagccatttcatgaggttgctgaaggagaccgtgtggtgaggaggggcggagactgagtcctggagaaagtggaactctgggccaggcgcggtggctcacgcctgtaatcccagcactttgggaggctgaggcgggtggatcactaggtcaggagatcgagaccaccctggctaacacagtgaaaccccgtctctactaaaaatacaaaaaataagccggtgtggtggcaggtgcctatagtcccagctacttgggaggcggaggcaggagaatggcgtgaacccgggaagcggagcttgtggtgagccaagatcgtgccactgcactctggcctgggctacagagcgagactctgtctcaaaaaaaaagaaagtggaactctgactttgtccctctttccccacctaggaagtcccctaggggacaggcggaggccacgcaaggggaaatgttcacgttctgctttcctagtgaagaggtttccaatgacggcctcccttcgccagactgtcgttcatcctctgcgtaggtgtaaggggcagagcagtggctagtcctggggcatcatggggcttgggccagcactgaaggtcttagagcagattgacaggaaacggtacaaataggaaaggcagctggcattccaagcatgtgctggagtttgggtgagtggtccttggacttgcttggcattgccctgggatacagagagattgtagagaagctgcaggcagcctctgtaaagccctagagcaacaggaggtctgcggtttaggtttctctatagtctctgggtccagctgggcctaaggctgggcttgtccctatgcctgttggagacatgcatgg

SEQ ID NO: 6697 - DNA, 1030 bp, Homo sapiens
ttctgtctctatgaatgtgactactctgggtacttcatataagtggaatcatatgacatttgtccctttgtgcctggcttatttcacttagcataatgtcttcagggttcatccatgttgtagcagatgtcagaattttcttcctttttaaaggctaatattccattatatgtgtataccaatttggcttgtccatccatctattgactgactcttgggttgcttctaccttttgactattgctaataatgctactctgaacatcagtatacaaatttctattcaagaccctgctttcagttcttttggatatatacctggaagtagaattgctggatcatgtggcaattctatgtttaatttttgaggaaccgccatactgttttccatagcagctgtatcatcttacatttccaccagcaatgtgtaagggtcctaatttcatgaccattgtgaaaggagtttatttttatgctatagtgaataataggtgaacagaaaacattagaggctatagagtggggttctgatgtaaagttcctgttcctctttaccagtaagaggtggaaagagaacccctcacctctcaaagattagtccctctgctttcagaaccattgtttttagtgacttgtaatgtcctaccacataatgtgccagaactcatataataccgctacttgtagaacagttagattgtttctagattttttattcttataaatactactgaatatacttatgcaagaggcttttttttttccaaatgtaagattattcccttaggtaaattagcagaactggaaactgctactgtaagtaatcactgacactaagatctactgtgttccaggtgctgttctaagtgttttctatattatatgttaactcattttagtagctaccatatggaaactacaattatcttcgtttttgaaaaaagacttttttagagccgttttaggttctcagcaaaattgagcagaaagtacagagagctaccacacaccctctgcttaccacacgcatg

SEQ ID NO: 6698 - DNA, 1035 bp, Homo sapiens
tctcttttttggagacagagtctcactctgtcacccaagctggagtgcagtggtgtgatctcggcttactgcagcctccacctcctaggttcatactgttctcatgcctcagattcctgagtagctgggattacaggcgtgcaccaccacacccggctaatttttgtatttttagtagagatgaggtttcgccatgttggccacgctggtctccaactcttggggtcaagtgatccacccgccttggcctcccaaagtactggggttacaagcatgagccgtcgcacccaacctcaagctctcgtttcctggtttcgctaagctgcctattgccccagtcagctaactaaagccaaatggagctgcctggttatattcatatcatttttctccctcacactctttttaattttcctgacattttctttgcctcaacctgattcatcctcttttctggttgctgtggatctgtgaaatattttcacttttatcagttagtaatactgaccaactgtaagacaaaacaactcttgatttctctgcactttcctaagattttagattaatagttgaaagattgtgttcctactgcactgaagaaaaacaggtcagtccctcagaaatgagtttgtgccctaaaatttaagtgatttagccaatatataaatctgggtatttttagggaaaacttaaaccctgagagcagaggttggcaagtacagcctgcaggccaaatcctgataatcacctgtttttataagtaaaattatattggaacatagccatacccatcatggattacctgggcttcttttgtgccacagcagtggagttgactagttgtaacaagaatgatatggccctcaaagcctgaaatattttatctctggccgttcactgcaaaagtcggccgacaactgacttagagaatgttttccacttctgaataacaactcaggtggagaggtagccatctctgtgagatttcagaggtcccgagaaatgagttgccttagctgggtcctgtgctctgtg

SEQ ID NO: 6699 - DNA, 1049 bp, Homo sapiens
ctgacagaactggcaagcaggaacaatttaggtttttggaaatatccacaaactctttgcttccatccggagtgaatgcttctcttccttcacaggggctaccctaagaggctgggaagcctcccagcctgggctagtgagatcccagcccagattccaggcctggatctggggccttgaacaatgaggatccttgtatctctcccacagagaacaccttctgcagtggggaccatgtgtcctggcacagccctttggataacagtgagtcaagaattcagcacatgctgctgacagaggacccacagatgcagcccgtgcagacaccctttggggtagttaccttcctccaggtgaggcacaggttggacgctggctcaagccttcctgtgggaagggtcctgggaggacaaggaggcttgaggagggggagtgaagggagtgggaggtttcctttggcctcgtcctgatttctgtttcctctgatggtttgtcaggtagattcagatggtctgatttaacctgctgagatgggagaggggagaaagggaagggggcatttggttgggagagaatggctgtagctgagagggagtaatggggtggcgggtattctttgaacagtgaagacccagtctcaggaacaggactttccagcgggaagccagctctgggtcgtccttgctctttgccagaagctgtgggaacctgcccagctttgaccagtgcttgtttttggtcacgaagtctatgtgaaggttccactgattcccttgatatttacacaaaggcctatcccctaataaggaagggaggagtttctctgcaggctgctatgacctattggtggtggttccaagcctgataggtctcaaagtctcttgtttacattccccatgataccagactgggtaggaatggctccctgaacctcccctacttccagagacatggcctgaggacacatcttgagttgctcaggccttggttttctcctttgtagctaagagctagacttggtgtcatccagacacagcaagggcaagggt

SEQ ID NO: 6700 - DNA, 1022 bp, Homo sapiens
tagacacagggtctccttctgtcacccaggctggaatgtggtggcaagatcatagctcactgcagcctcgagctcctggcctcaagtgatcctcctaccttggcctcccaaaatgctgggactacaggcatgagccaccacacctggcctgtatttctctaaactgttgctcagatgctgggaacctgcaccagtattctagggccacctcctccctcagccagtgacttaccacctgaggctgggaactcttaggaagctctctgagttgtgtgccctcccagagagggacagggcacatgcaggtgtgcacacttatgttagaggggaaaagttcctgactatgggagaagcactttgtagttgaggcacctctaaaaagcgaactcaccatcactgctgagtttctcagtcttctagaatcacaccagcagcttttaagacctttaaaaaattttttttgccttaatttcatggagaattaagattctgtaccatgaattcctctgctgtaacattcacatttgcaacacctccccaacatacacacacacacatatacatagatttctctctactcttaggagtgtctctgcacttgtctgtttggcctttgattggggtgactttgctccctctaattcccatcttgaataccttgtaacctggccagggagtcatcctttagagaaaattgtgttttgttttgctcagcttgtgaggtccatgaagattaattagaggaagaaaatatcttgtttgcatccaacttaccagtgaattggggtgaaggaaggtgagtttccatctggggaaacagctgggctgtggctggtgccgctcgcacgaagggcagtgttgggtaaccctgcttcaaggggtctctcctgtcagcgcagtggccagcctggagccctctctgtcacgttggcttccctcacactcccacgctggggaagtacagttgcttgcactggaaagaaagcccagaaagaaacagcccttctcttagggccccagcc

SEQ ID NO: 6701 - DNA, 1046 bp, Homo sapiens
actttccccagtattgggaagctgctgctattaataaagatggaagggctgggggaggaggccgggaaaagtgcagaggcaggagaaaggagggctgtccagttctgtcctgggattggcagtggaaaatgagaggaggggaaaggagatgtggctgaaaggaacaggggaggggcagcaacctgggcgatgggcggatgcctgcccgcacccacagtgctgctgtagctggtctgagttctagggatgtctttaattggggtgggggagaaaacgtcattatacctgacttggtgtaggaggatagctttaggtgtctgtgtttttgaatgtctttgagactgtgtgcttcgccctccaatgcacctgtctcctgtctctacagttcagggcacaggcaggggtgggtgggtggcatgtgcatgcagagtattccctggggtgccccccagcaggcccctcatttccagactcgtggattggatggaagcaggcactgaactttgtcggcaactccgcagggtgtgtgtgtgcgtgtgtgcgtgtgtgtgcgtgcgcgtgcatgcgcgtgctttcttgtgcctggtgtgggcaggctcagaagtagtgggttgcatcagggccagatgtgcaattctgtgcgttcagcagctgtgccctgcagtggcagcctgagcctcatccttctccaggttccccctccccaggcccctgattctttctggtgccccaggccactggggttggaaacccttcagtagcccagtgtcactcaagtatgagtttgacttattgaatgtggaggaataggggccctgcctgccctcccaggagggagaggagggggtgaaccataggaacctaaatggaagaaccctctgcactctctgtaggccaaacagggggagtgggtggagcgctcttccttggccccttttctcttcccggagggagtctgccttaaagggcctttgctggtgttgtgggcgagggccacagaattccccaggatacaggggcagaagcacagagacctggcacctgcc

SEQ ID NO: 6702 - DNA, 1021 bp, Homo sapiens
tctgtcggagggcaagaagcagcctgggggctggccctgagccctgaggtgagctgaaagcacaggtgaaaggcgttttggggatcggcccggtttttgttttgacacagggtgtcgctctgtcgcccgggccggagtgcggtggcgcgatctcggctcactgcagcctttgcctcacaggcttaagcgattctcccgcctcagactctcgagtagctgggattgcaggcgggcgccaccacgcctggataattttttgtattttgtttttgtagagacggagtttcgccatgttgcccaggctgggctcgaactcctggggtcaagccatccgcccgcctaggcctcccaaagtgctgagactacaggtgttccaaagtggtgagccactgtgcccagcctctggccggttttgctaagctgctttggacaggaccgcgtaccatctgtagtcctggaggaggcaaaaatgagcctgcatttttagccaaggaagagcaagtgggacactggggtgggttgggaagtgctacctcccatccctttcccgatgcagaggactataagaagagtttacacaaacgtgctaggccctgttctagacgctggagacacagcagtggacaaaatcagcccgtatggaaattacatccttcctaatgaaatacatttcataccaaatttcattttcacaacccctagaaattggtaattgcggccaggcgcagtggctcatgcctataatcccagcactttgagaggtggaaggggaggaaggcttgagcccaggagttggagaccagcccgggcaacacagtaggaccctgcctctacaaaaaaaaattttttttaattagccaggttccgtggcgcacttgtagtcctagctactcgggaggttgaggctggaggattgcttgagcccaggagctattatcacatcactgtactccagcctgggtgaaagagcaagaccctgcctcaaaaaaaaaaaaaaaaatgaaaacaaaaatcaacatct

SEQ ID NO: 6703 - DNA, 1102 bp, Homo sapiens
agagaggaaagactagcttttgagtattgtgtttggaaaggacctgagacaggaagaggcctattgcatttaagaaaatcccggccgggcttggtggctcacgcctgtaatcccaacacttggggaggccgacgcgggtaatgggtcacgaggtcaggagatcgagaccatcctggctaacacggtgaaaccgcgtctctactaaaaatacaaacaattagctgggtgtggtggcacgcacctgtaatcccagctactcaggaggctgaggcaggagaattgcttgaacccaggaggtggacgttgcagtgagccgagatcgcaccactgcactccagtctgggtgacagagcaagactccctctcaaaaaaaaaaaaaaaaaaaaaaaaaacccatggcaggaccggggctggtagctcactcctgtaatcccagcactttgggaggctgaggcaggtagatcccttgagctcaggagttgagaccagcctagcaacatagggagaccctgtctctacaaaaaatacaaaaactagccgggcatgttggcacatgcctgtggtcccagctacttgagaggctaaggtcagaggatcgtttgagcctgggaggtggaggctggagtagtgagccatgatcataccactgtactcccacctgggcaacagagcaagaccctgtctcaaaaaaaaaaaaaaatcccatggtatttgaaacttaacatgcagaaatcaagcttactattaatattttctccctcaaagccaatttttctgtgctctccctgttagcacctatcgcccaagtcagaaaccctaggtatcactctggatatttgtcatgtgtcaacttggctaagctaagcaagactcccgggattccctctctggtatattccagttatagtggctacccaggagcacacacacaccatcttccagctcttcagacaaacagtaatctaggtgctgctgtgaggggattttgcagacctaattaaattcctcaattgtttggctttaagttaatcaaaagggagattatcctgggtggcctgacctaatcaggtggaagccctttaaaggagggctagaacacccc

SEQ ID NO: 6704 - DNA, 1044 bp, Homo sapiens
taattagccctcaggaagttcctctacttgaaaaaatgttactcccaacagtacccttaatcccatgagaatcaaaagtgctcttccaatcccagcattctcagtcttacttgaacaggtctagtagtggcgttttaaccataacctttcttccaccctgcaaaacttggtctttcattttctttgacacacacatccatttccaacctttgcttagtggataaagtgaaagattaacttacgacgtttgccctcaatttttagtgaagagagaattttggggaaaatcctactcttatctgagattgcataaatgttcagagaaacgtggaaaaatgaagagaccctgccagcatatcttctcctcttccagctcttcggggatgcaagctgttggtccctatcctgtgtttggctgactatgcctacccttccggtacagtactgggggtttcagggcaggtgagcaaggctgctgagggagaaatggaacatagaatttagagactgaggctgggtgcagtggctcacgcttgtaatcccagtgctttgggtggccaaggtggaaggatcacttgagcccaggagtttgagaccagcctgggcaagatggtcaaaccctgtctctacaaaaatacaaaaattagctgggtggtgtggctcatgcctgttgtcccagctacttcggaagctgaggtgggaggatcacttgagactgggaggcagaggctgcagtgagctgagatcatcgcaccattgcactccagcctgggtgacagagtgaaacttttgtctcaaaaaaaaaaaaaaaaaaaagaatttggagactgaaagacactggagagataacgatactgtgaacagatgttcagttagagagtctgtgctgctcaaaatataggagatttggggttgagcagactcaactgtgtgactgttccgaggcttaaccgtaagcttatacattgtgactccacaaacgagatggtagactttgattacatgggcctcttatcacagaaatggctggcctgggaggggtct

SEQ ID NO: 6705 - DNA, 1059 bp, Homo sapiens
taactcactgaagtgtctcaaaggcgaacaagttttaccaaaatgaatcctttttcagttaacagatcaaatggatgagttctgagcctctcaagttcctttccccagttagagtggggaactgggcaagtgttaactgtgggactcactgcagcgtcctatcctaaaggcacgagaagacggaaatgcaacctgcggagctgggcttggttcccaggtcacagtttggcccccgctacaggatgctgccctgctcagagagagatttaatagggagctgaaggaatcgttagggggccagggagatgtgactgaggctggctttccacgtgaatgagacggggtcggtggagggtttggtgctacagccagtcagaagatttgcaaatgcgaacacattcctgtgtgaggcacgttaccctttgtcagttattgtgaatatgtgtattttaagcaataagattcagctggtcagacttttctgggcagtctcagtgacgcatttcctgtgctgtgattgttctgaagacagagtggctctaaccactgtgagaagcccaaataaaaattgatcccaaaaatgctactgctctttcttgctgcactttgttccctcttcttcttcctcagtcttcaggaaattgcacctcaagatcctaaaccacaagcacttttctccacacagagactgagaggttgtcacacagtcattgaggatagggccctgggccaaagagaaaccacagggccaagggcagctggacagtgctgctgggtccacactctgttctgaggagtcctcccctctctctgtcagggtgtgttcctgatgtttggaatactttggaaagtcccacaaacaggctaaaatcagatcccgagaaagcagagacaagttttgtcagataccctgttgctaaaacatggcttttttttgagacacagtctcactctgccgcccaggctggagtgcagtggcgcgatcttgtctcacgcagcctctgcctcccaggttcaagtgattctcctgcctcagcctcctgagtagctgggattaca

SEQ ID NO: 6706 - DNA, 1051 bp, Homo sapiens
ctcatggcttccccacaccccccactgtttctcttattccattttttttttctttttttttttttgagacagggtcttgctttgtcgcccaggctggagtacagtggtgagatcttggctcactgcaactttcgcctcctgggttcaagcaattctcccacctcagcctcccaagtagctgggattacaagcgcagccaccatgcccagctaacttgtatttttcggtagagatgcggtttcaccatgttgcccaggctggtcttaaactcctgacctcaagtgatccacccaccttggcctcccgaagtgctgagattacgggcatgagccaccgcacctggccttctcttatttcatttctaaatagctgtattcctctgtccttttcagccccattctaactcttgcatctttactactttcaaacaaccccaaatctcaaatctgcctttaaagaattacgagtcatgttctctcactggacttgtggagccaaagtttttttgcagacttctcttagcacttaatgaatacactgtgccaacagcccagcagttaggaagcacttgatttctcaggcagtggcctttgaaacagatgtcgggtccatgccagaactgccatagtgccaatgaaatgaattttcaacatgaacaaatagaaaattatccttcattacattttgagtgtttgtggttgtatagggtggaggagtgggagaggagagagggtagtagtgtaacagctgcagagagaagattacaggaagtttgggaattttgattattaccattttatttttgtcttccagctgctaggtcaggcagctcgaaacatggtactccaggaagatgccatcttgcactcagaagatgtaagaaacaacttttttttttaatgatttgggtttatgtatatggtttgtgtggccacagggaagtggaaatgttctatttctctctctcttttttatgcagagtttaaggaagatggcaataataacaacacatcttcaataccagtgagtatgccccctccagcaactattt

SEQ ID NO: 6707 - DNA, 1051 bp, Homo sapiens
tttactaaaaatacaaaaaaaaattagccgggcgtggtggcaggcacctgtagtcccagctactcaggaggctggggcaggagaatggcgtgaacccgggaggtggagcttgcagtgagccgagattgcaccactacactccagcctggggatagagcgagactccctctcaaaaaacaaaaaaacaaacacaaacaaaaaccccacacaggtaaaaacattcatcttgtaattttctattatcaggtttcaaaagatcacttctttcttgaaacatacattgtatgtcttttggtgaacaagattgttgttgtcttcctggtgctgacagtttggtgggggagatagacatgaagcaaatcatcacacgaataaactcatctgcatgtgctgtgggggagaagtacttagtgccctgagaatattggcaggtgggacgggagggaagaaagtagcttttgggtgacttgagatctgacagataagtaggcgtcaactagaggaaatttgggtgtggaaaagagactattgcagggagacatgataaggtgggaggtaacattgtacactcaaggagctgaaagatgattagtgtggctggaacacaaataatttgtgtgtgtgcatgttgaggggtaggttgggtggtacaagatgctattggcgaagtcagcagaagcaagcagggactccagcaggcagaccttgcaggccacactaagggttccaggatttcttctaagagcaacaatatgtccttgaagtattgggggtacatgagcatgacattattagagttgcattttcaaaaggtcttctgtgtggaaaatcttttgatgaggagagagaaaagatgtggagagacagagactggcatttggaggcctttgcagaagtctggtaagaaatgatgacagctgggtggttgggatggggagaggatgattgatttgaagatgccaaaaaggacaaggctttaccaacccccctttcaatgatagagagagagaggcaaaatatagatattatcttcataaccggggcccgaaaa

SEQ ID NO: 6708 - DNA, 1026 bp, Homo sapiens
ggcatgagacaccgtgcctggcctgtatttttcaatagtcatatttaataaaatttttaaaggcataattcaattaataaatgtaagatgatgagggacctgatacagtttcacctttcatgtttcctatgacatctcttcagaagcgtttgttgagccactgtatgcagtgcacaatgctgctaggcatttgtggacaatgcaaagatgatgacatcttggcctcctgggtgatccaggaatttacagcaatgcaatccaggtccaggaatttacaatccaggaattttcggggagaaagacattgccagtaatttttggataagctggttcttctggatagataaaaggacattgttaagaaccacttgctggctggaggtggggacttcaaggggacttcattttttgagaaggaccttaaaaggtggtaagattgggatctcttcaaggaaaactacaaaccactgctcaatgaaataaaagaggacacaaatagaagaacattccatgctcatggataggaagaatcaatatcgtgaaaatggcgatactgcccaaggtaatttatagattcgatgccatccccatcaagctaccaatgactttcttcacagaattgaaaaaactactttaaagttcatatggaaccaaaaaagggcccgtgttgccaagacagtcctaagcaaaaagaacaaagctggaggcgtcacactacctgacttcaaactatgctacaaggctacagtaaccaaaacagcatggtactggtgccaaaacagaggtatagaccaatggaacagaacagaggcctcagaaataacaccacacatctacaaccatctgatctttgacaaacctgacaaaagcaagaaatggggaagggattccctatttaataaatggtgctgggaaaactggctagccatatgtagaaagctgaaactggatcccttacaccttatacaaaaattaattcaaggtggattaaagacttaaatgttagacctaaaaccataaaaaccc

SEQ ID NO: 6709 - DNA, 1086 bp, Homo sapiens
cactccagcctgggcaacagagcgagactccgtctcaaaaaaataataataaataaaaaagatgataagatttcagctggtggagataggactaggagaggccatttctccttgaggggatgggaaagcaaaggtgaagatgagagaacaatgggagtggggctggaaacgtaaattggtttagaagggaaagtttttgagtgctaggataagtgatttgaactctatgcactaggtaattacattttcattaacatttatcaagaatctattaagctaagtcactgtttttaatgttaagaaatcaaagaattgtttttatagttgtccgacttttcaccaaagacagcacctttcataacctttatctcaggattccttccacgtccaaggtcctgacttttgtccttggaattaagccctaataggagagaaccatctttttaagacattgactgatttctctgtttaattttgatgcagtttaacaccatctaatataatctgccattttgagctatgttaggctggtagatcgcttacctgggcattacttgtttgcttctctggaatccttaaaaggatcacaatatagaatatagtactaaagggcagttgctgtgggagagttggaagtgctgagttgtgggatatttcagaagctctactttttcttttttctttgagatggagttttgctcttgtcgcccaggctggagtgcagtggcacgatcttggctcactgcaacctccgcctcctgggttcaagcgattttcctgcctcagcatcctgagtagctgggattacaggcatgtgccaccacacccggctaattttgtatttttagtagagacggggtttctccatgttggtcaggctgatctcgaactcccgacctcaggtgatccgcccgccttagcctcccaaagtgctgggattacaggtgtgagccactgcgcccggcctgagccactgcacctggcctgttttttctaactgtgttgaataatttgggattcctctctacccttagtttcaaaaagcaatattgtgcagaaagcaaatgaagtcaagtgaatatgatt

SEQ ID NO: 6710 - DNA, 1054 bp, Homo sapiens
ggggatctatgttgggcaaatcaagttaatctgcttaaacttcagtttcctcacctagaaaatgaaggtcataattgcagcctcactagggtatctgtgatctaggagggatttttgatagtggtaaacagtagattcctgccttactaatgtgtaggtcagtttatcatctacctagcaccatcacttttttcaaaaaaggtcttttcaaccaagaatatgtcatacatatctgtattttctgactagattgcaggttcttggtccttgtcttacttgttttcgtaactggcttatagaacttgatactcagcacatgttaattgaatgactagatgatgcatggtctcctttgagcctaccatagcatttggatttaccatcattatgtttacttatgtgcgttgagaaacttatgtgatataaggtttgctttaaactatgaggtcttaaatatttcccatggtcagagtagattattgatctagtttggctagacatgttccctaacttccttaggattgctgttagacttcctgaagctgaatttttgtgggaagaagattaagacttttgtgacttaggagaggtaagttttccctagttgtatactagcaggggctaacttacctgatttcaccctttaattggtcaaaagttttggattgcagcaacttctgtataactttttccaaagagaattctattatctgataattttggaatgttttttgttttgtctgttgccttttgcttatagtggattgtttcctcctattgtttgtgattgtggcttgtgagtaggttttttgttgtttctctctcccaagaagagctttacctgtggaatcctgtatggctttggttgaggatgtattctttgttgttaatttcttgacttaaaggtttcaggacgaccaaggtagtaaaaatttaagcttcaaacctacgtaaggtgtaggtctgtcattaaaaattttcagggtatacttttccttccttccttcccagagcctcagcagaggcaggtaagtgtccttagcagctcacctgg

SEQ ID NO: 6711 - DNA, 1045 bp, Homo sapiens
catgacttgcactgaactagatacacaccatatttatggctttatgtcagtgttcaagtgtttttgttttttttttctgtttcttgatggctctgattaagttagagttaacaaactctcttctgatgccacattagtgggcatttattttctggcttgtaaaagcaggattagtcccttagactgaagccacacttgtgtttttcttactcataatgcaaataatgacttcaggcagtggtgtgggtgttcagcgaatgcatacttctatttgcagagcagttttacctgtatctacagcagggaagcccctctgggctttatttagtaggtgacagaggaaattagaatggcctggctaagcacatcaatatgcataattgacaggctattcaatactgttaaagataagtactttccattctttaactatcaaatgcagctcaaatgtattctagattgtattattttctgagtattttgttacagatccttcacgtatatatgcgaacttaaagtaaacaaatctaaggaactagaaaaacacaggcttgtctctgggcaaggtctttaaaattatcaatgtgattataatgaatgaataacatatagcccttcgaagggataaggtaaacaccaagattggaaaggcagacataaaactttattcacaggtgacacgatcttctatatagaaaatgctgaggaatcgactacaaaactattaggtttaggccggcagggtgactcacgcctgtaatcccagctctttgggaggcaaagccagttggattgcttgagaaccaggagtttgagaccactctggccaacatggtgaaaccctgtctctactaaaagacaaacaaaaaaacctattagcattaataaatgagttcagcagggttgcagggtacaagagcaatattaaaaaatcacttatttctttttgtttgttttttgagacagggtcttattctgttgcccaggctagagtgcagtggcgcaatccgggctcactacagcctctgcttcctgggttcaagtg

SEQ ID NO: 6712 - DNA, 1226 bp, Homo sapiens
taattttcagtgtaagaagcctaattcacaggaataatttctcctagagtaaggccctttccagccaaatctgtcggtgctattgagctggtatttcaagtatgtccatctgcatttaaacgagttgctccaagacaatctgattatacggtagttactttggtgagaatagcgcctcagtggaatggaaacttcattttgagtctaatattagaccttgctttggaaaattccttttaaatgatcacaagctgggaatagcaaaagaatttaactttcgacagacagcattcaccaagaatttttaactgcttatgttgggtccttgggaaagcagatgtgagaaacctaccggaccaagtggatgagatgagaattgacttgacctgatgcagtgtttatatccattgctgataagtttccctcctcgtctcctctgctcaaaatgttttcattctttgagcgtgagcatgctagggatgaagattgtaggatgcctaattgtctaacaatctaaacttctaggcttgtagacacagctgcctagaagggggtctgaggcagagcagaagctgacttagactgccaagttaagaaagggccaacagatctgcaggaccagagccattgtctgcgtaagtgctgggagcttgatcagatgcagccctcagaatatttttaatgtggctggttgtatctgggtgaacttacccaacttaaagtgttaactaaactttatttaaagctcttgcaccccaccccccgccaccgccaccaagaaaacactctgtcattaaacaaaaattatacaaaaattagctgattaggaagtttccagataatgcctactttggcttcatttatggatatgttttagatactttgcatgctttggattgggaaaaccaatattgttgtttgagagatgctgttactattttaaaagatctttgagattgaaatgcatctttttaactttttattttatttttttatagaaatgagttcttactatgttgcccaggctggtcccaaactcctggcctcaagcgatcctcctgccttggcctcccaagatgctgggattacaggcgtgagccattgtgccctgcctgaggtgcatcttctaatcactttgtacatttaataatatagtggggttttttccctctaagttggtaataagttgatggtgccttagaatttaggaaaaacattaataaaat

SEQ ID NO: 6713 - DNA, 1050 bp, Homo sapiens
cattcggagtatccagtcaaattgccccagacattggctgctcagtcactaataacaacacacagtgccgctgggctaagccggcatttcctaggtaagaccaaaggtctcattcaggcctctcaattggctcttgaaaacaaggatggctttataggtcctcctctgctatgctaagcctgggaggaaggtcggagcaggcatggatagtcactttcaagtggaaaacatccggcctgagtgtggcgaggcgtgtgcaggtgggtcttcaggattcagtggatatcctgcattccccagtaatcggtgtgtatgatacacgttcttttccatcactactttgtcttctgttccttcttaccctcatcactcacatgagaccagtccctgaagaacttacggtggagcttcagggaccctctgtgatccattcctaaaccacatctttttggaatcccttttctctccacttttagtctctattttacattccaaagaggatcgtgctctgaaaatttagcctcttgactggtccatttatagtctccactgaatttatttaaccgtggcatttgcagtcttttacttacacttgttctgtggatggagacatttcagggaagaactgctgacagaattggctttcagacactgcctgacctaactaccgctcccatctccccaggtatcgcccaactacctgaaagtagaatgaggtgtatcttagcccagtgaaatgctgtcttcgaaccctgcttgctttcattagaagcagggcagaaagtggcagcagagctagggaaagaaatcatggtagcacattcactcccagcctcctgccttggtttgtttttcctgttttactcacttggtctagatgagcccttagctcaaatcaggaaatgctccaaggaaaatggaggcaatttttcctgctgtcaagatgagatttgcctaaaactcccccctgcatcctcagagtgcgcacacatccgctcatttctaagctttatcgtgatgcacccggggtttctatttcacaaaaattgt

SEQ ID NO: 6714 - DNA, 1025 bp, Homo sapiens
tgctaagtgctatttgaatgattctgcatttactcataaatgacttatttttgaaacactattaaatgcattagcaaaggagctatgtggaaactttattggcttatttaagggaagagaggaagtctgtggatcttgagttggaaatttgatcgtagtactaacttatccaactgcttctcttttcttctctgcctacccctcccttataatacaaaaattcctttttagacataatagaaccctggttcatcttcattgagattctgagttatgatgacaatatctgtgtataaaatagcttaagttactagtacaacctgtaattacttcatattctaaatcctgtttcctgatattttcatggatcctgaacaaaccccctcatgaaagaaacagtgaaagaaatgtggatgtaatcactggcctgctcagatgtgtcaagatgggtgtttacttcacaccgttctcatgtatacatggaaatctctgagcctgtgtaatgtcagtaatgccaactaaagagtcttagatgcttcaattctaaggggcatcctgtgacctcaaatctaaaggaagctctggtacaattacagttggtttgtgcctcttatcacaaaaaaagacattgtctttttaaacatttcaatgtagcctggtgtttttcctattctgccatcaagaatgaatagtaaatggaaaagttacataagagactgacacacatcctattctggttttacgagctgttgttctgaccttaatacaatgtcaatagtaaataaggtggcataacagtagagaaaatgtataacagtaaagctatagctacagaagttgtcaaattgtggcattatgatttgaaaatatcgggacatttcacaaaaaaatagtagatactaaatttcatctgctgtttactagggtaaaaagttcaaattagtgacaatagtggaaatatttttattttgaaaataaagcttattcttatttgtttaaaatattattagcacatattcacttta

SEQ ID NO: 6715 - DNA, 1034 bp, Homo sapiens
tgctggctagcattctgcttcttgaagaaaccacattttgcagattagcagtctgtcagatgctgatctgtaaccacgaggagataatgttaaggactttatgtcactcatttactcggaaaagaatttctcatttgaagcctcagaactagatttctggatttagtattataaaactaagtaacaatactaatggaaatcactagtctgtttatgcctatttgccatttgaaaaaaaacaagcactgaacagcctgaaatttaccaattctgttttctattttcactccattgtccactgttggtaacaacaaattcagcaatataacacttttagcagttgtctatgcaaataaaaccaaagaaaccaaattcagaaatagtatagattagtcccttcattttgtggagagtgcatagtttgattaaaaacaactttcttgctctgtcccaggtccaaagacctaatcttagattggctttcaagatctttttaagcttgttttgtcctggggttagcctgactcatctgtgtaggtcacttaaccataaaaaggctaaaaaagactgtgtgctcagataaggaccacaaatgaaaaacctggggtatagaaagtatatacatgagggcaacttaataaattaggaaactagagcacccgacaggtctaattaagggagaaagaggcctcgaaaaaagggaaaagaaaaacacatacccgcagaggaagtcaaaatgcaaagggccaaatcctgatacatatcatgtgcaaagaacgtcgctaaagtaatttggggtgaaagaggaattgtaaataggcttggcaggtattttttatataaaacatagttggccggatgcagtggctcacatctgtaatcccagcactttgggaggccaaggtgggcagatcacaaggtcaggagttcgagaccagcctcgtcaatatggtgaaaccctatctctacaaaaaatacaaaaattaacagggcgcggtggtgcatgcctgtagtcccagctactcaggaggctg

SEQ ID NO: 6716 - DNA, 1048 bp, Homo sapiens
tgagacctagtctcttcaaaaaaatgcaaaaattagctgggtgtggtagctcactcctgtaatcccagctatttgggaggctgaggctggagaatcgcttgaacctgggagatagaggttgcagtgagctgagattgcatctctgcactctagcctagatgacaagagtgagaccctgtctcaaaaaaaaaaaaaaaaaaaaagaaaatgtgtggaggcatttttggttgtcataatgactgggcggaggagcaggaatactaaatgttctaatatgtgcacctaggtagtcccactttacaaagaattatcctgcccaaaatgttaatagcacccttattgagaagcactggactaggttgtggtggaggtgaagagaagtagacaaagtcatgagacacttgatagattggctagggaggtgagggagatggagatatcattgaaatctccagttttctggccgttctagctggataggggagccaattcctgacacagaaaaccctagaagaggacttgatttgtcagccttggaataattttgagttctgatttgaatatgcctttgactcatttaagaaatgtcaagttgataggtagatgatatatgagagctcagaacagaggtagggactagaactattaattggagttgtgtgcaatattgatggatatggatgaggttgactaggggagagtatgaaataagtcagtcagtgggctaggcccaaggagctccaaatttaatggccaagtagaagagatacacaggaagaaaaccaggggagggctgagttatagaagccaagggaaaggagtatttaagaaggaggcaggctgggtgtggtagctcatgcctgtaatcccagcactttgggaggctgaggtgggcagatcacctgaggtcaggagtttgagaccagcctggccaacataacaaaaccctgtctctactaaaaatacaaaaattagccgggcgtggtggcagacacttgtaatcccagctgcttgggaggccgaggcaggagaatcacttgaatctggg

SEQ ID NO: 6717 - DNA, 1063 bp, Homo sapiens
tcctgagtagctgggattacaggcgtgcgccaccatgcccagctaattttttgtatttttagtaaagacggtgtttcaccatgttggtcaggctggtctcgaactcctgacctcgtgatctgcatgcctcggcctcccaaagtgctagaagtgtaagcgtgagcccccatgcctggcaagacctcagcttaaaaaaaaaaaaaaattgtaccagatgaactcttaggactgtgagtctcatttttcttcccctcagttaactagtaagtggggggcccactcagaactaactttttatgtggatgtttctgtatttattttgtatagatttttggcgtttcacagctatctactaattgtcatcttttgctttcaataactttataaaaggctctgggctacagaccactatcagcctttaagaatatttgccggccatcttgctgatgtgaattgtaccagattccatccaaattctaattatgttgctacgggctctgcagacagaactgtgcggctctgggacgtcctgaatggtaactgtgtaaggatcttcactggacacaaggtattttacactcttactattccagcatccaaggttgctttcaaaataaaaatattttttaaacaagtgacacataaattttaaagataccattcttactacaaaactttaaaattttgtcttattttcctagacatactttgatcttttctatgaacttttttctagggaccaattcattccttgacattttctcccaatgggagattcctggctacaggagcaacagatggcagagtgcttctttgggatattggacatggtttgatggttggagaattaaaaggccacactgatacagtctgttcacttaggtttagtagagatggtgaaattttggcatcaggtaaatgactattaatggctttacgataaatgctatgttaagaggaaacagtgttgacgactgcaatactaagtccttatgttttaggttttacttccctttagctatgattccagagtgtcatcctacatcaatcacttctcaggtta

SEQ ID NO: 6718 - DNA, 1073 bp, Homo sapiens
tagagatgtgcacctgtacatgttcatattccatttctcctggctgtgcttgggaagggttttctttcttgccagcatgcctgtggtagccctgaattttaggcaacctctgccctagtttatttaattctgtgttttctccttgtcctaggtctattattgaagctcagtaccttagatatcatgacatcgaacctggggcagtggtaaaggtaagacctcaagcatataattaggtactgcctcaccatcaggcgttctttagttcacgcacaggtgactgtcagcccgttagtcctcatgttaacacattgaatgtcatgttccttgcttctgcctgctgactagaatttctttctctttctttgggtaactcatagttaatttcaaggtaagatcttactagcaccacccagctacacaaaggcagtagatcataaatcctgagatttgggatttgatggtggttagtagacctgatcaaaagttagtcctgtgattattgatctacctgggatattagtgagaagccagttccaggtacctgtcctgtccgaccatttggctctaatcgagcagctccctttatatgtagagtttattccttaggagaccttgacatagtcccttcctttggggaatgtattttaaggcacacagaaagcacatgctcacacagaaagatgtgaaggctcccataaataaagctgacagaataatccagctcagtgtggggtgtgtgcttcacccatgtgccatctggaataacaggcacagttagcccaggaagttggctgtgaaggggaggtatgacatgccttgttgtaagaggtgggggaaaggccattcttgagacattgtggcagcttatctttggattctctagggcacagtgctaaccataaagtcatatgggatgctggtgaaggtgggcgagcagatgaggggcctggtacctcccatgcacctggctgacatcctgatgaagaatccggagaagaagtaccacatcggggatgaggtcaagtgccgggtgagcctcctgaagggtctcttggggttttggctagatg

SEQ ID NO: 6719 - DNA, 1034 bp, Homo sapiens
atagcaggttcttggggaatggccccgtggcttttgggtttaagaggttgcagagaccagctcagtggctctcatgataacagataacttgatgacagcctgtgtccctcccctaggttttgctttgtgaccctgaagccaagaagctgatgatgaccctgaaaaaaaccctgattgagtccaaactacctgtcattacctgctatgccgatgccaagcctggtctgcagacacatggcttcatcatcagggtcaaggactatggctgcattgtgaagttctacaacaatgtgcagggactggtgcccaagcatgagctcagtactgagtatatccctgacccggagagagttttttacactggccaggtaacccttcccctagacaggtcccctttacccttggtgaccccacaaacacaaatatgaaggagcagtaagtagtggggctgcctttaggaggctgaggaagagagcacatggggcagtgggtgtgagccggctaaatggaggagacggggaacagaacagagagaaagcctcagcggggttcagcagaagctggcaagctgatggatctcaggcacgcatggaagaggtcagtctttacttgtaataaacctgtgcctctcatatcggaaattgttttgaggtcactgtcaccacatgggggcagtgctgtaaaactagtaagtcttggtatcactaggaaaagcatttttttattcctttaaacgactttaaacagatagataataattgtacatatttatggggtacaatatgatatttcttttttcttttcctttttttttttgagacagagtttcctctgtcacccaggctggagtgcaatggcgtgatctcagctcactgcaacctccacctcccaggctcaagtgattctcgtgcttcagccacccaagtagctgggactacaggcatgtgccggcatacccggctaatttttgtatttttagtagagatgggattttgccatgttggccaggctggtctcgaactccctggcttcaa

SEQ ID NO: 6720 - DNA, 1049 bp, Homo sapiens
ggctatcaccagcctcctcctcctgaatcagtgcctggaggagctgcagggcgtgcgcagccttatgagcaaccgaggtggggcacctgtggggcaggggaggtgggccaggggtgggagtatgtgttgtaaattacacctgttgttaggtgagttgttgggcttcccagaacataagaaaaaaaaatttggggccgggcgcggtggctcacgcctgtaatcccagcactttgggaggccgaggcgggtggatcatgaggtcaggagatcgagaccatcctggctaacaaggtgaaaccccgtctctactaaaaatacaaaaaaaaattagccgggcgcggtggcgggcgcctgtagtcccagctactcgggaggctgaggcaggagaatggcgtgaacccgggaagcggagcttgcagtgagccgagattgcgtcactgcagcccgcagtccggcctgggtgacagagtgagactccgtctcaaaaaaaaaaaaaaaaaaagaaaaaaaaaattgggttaactttttttttaatggaagtatgacctgcataaagtgcacaattttattattattattattattattattattattattattattattgagaccaagttgcactctgtcgcctgggatggagtgtggtggtgcgatcttggccactgcaacttccaccccccaggttcaagcgattctccttcctcagcctccggagtagctaggattacaggcatctgccaccatgtctggctaatttttgtatttttagagaagacagggtttcgccatgttggccaggctggtctcgaactcctgacctcaagtgatccacccgccctggcctcccaaagtgctgggattacaggcgtgagccactgcgcccggccaaagtgcacagttattatgtgtgcagctcaataaatgtttatattacacccctttaagataaaggtcattacgagcatcctagatgtcctcttctccccactgccagtccagagtcaaaatttcccttagttctgtggctttatatttgcatttgctgt

SEQ ID NO: 6721 - DNA, 1048 bp, Homo sapiens
gaaagagaggctaggtgccttgcacacaataagctctcagtaatgactctattcattgcttgggttgaagagtgattaattgggggtgggggagctgcaggacagattcaggaaccacagtgtctctaagctgagagagctgttagaggttgcaaggctgtgcatcagaattatctcaataacttgtaaaattcagatttactagatctaggatagggtcttgcaatttaaattcaaagcaaagcaaaaaccaagccaaggtaattcagaggcagccccatgagtttagtgtacaggagaggaaagctaggtccagggagtgaaggctagtctgttccagctcagaccagccttgagttccctagccttgggaccccagagggtttcctcagccacaccctgcccagtggggccatgagtgagtgaccatgctgtgtaaggaaagcagggatggtggcttttctctcttctagctgaggaaaggcagcgaacaccaggcgattgtgcagcacttggagaagtcctttgccattgcctccttggtagagacgggccacctggcagctttctccctgacctctcacctcaacgacaccttccgctttgactcagagaaattgcaggtgggacagggtgtctccctaaccctcaagaccacagaaccaggagtgactggccttcttttggctgtggaggggccggctgccaagaggaccatgaggccgacccagaaggactctgagacagttgatgaggatgaagaagtggatccagctctgactgtagggaccataaagaagcacaccctctccatcggggacatggtcacagggactgtcaagtccattaagcctacccatgtggttgtgactctggaagatggcattattggctgtatccatgcctcccacattctagatgatgttccagagggcacctctcctactaccaagctgaaggttgggaagacggtcactgcccgagtgattggcgggcgagacatgaagacattcaagtatggaggctctgggggtgggctggcttcgag

SEQ ID NO: 6722 - DNA, 1005 bp, Homo sapiens
aattcaaagtctggccaataatttgcatattaatttcagtagctaactgtggggtcttcagtaagtcaattatcctctaaataaagacctcagtttccttatttttagaatgaaagaattggagtatatagactgtaaggaaaattgttttcaggatctgatatgacaatcctaaaagatcaggccaggcacggtggctcacgcctgtaattccagcacttttgggaggctgaggtgggtggatcacctgagatcaggagttcaagactagcctggccaacatggtgaaaccccgtctactgaaaaaacaaaaattagccgggcacagtgcctgtagtcccagctactcgggaagctgaggcaggagaatcacttgaactcaggaggcagaggttgcagtgagctgagattgtgccattgcactctagcctgggcaagagagtgagactccgtttcaaaaaaaaaaaaaaaatcaggtgaggctgggtgtagtggctgaaccctgtaatcccagcactttgggacgatgagggaggtggaaaacctgagcccaggagttcaagacctgcctgggcaacatggtgagaccccatctctacaaaaaaaaaaataaataaataaaaataaaaattagctgggcatggtggcatacacctatagtcccagctacttgggaggctgagctgggaggattgcttgagcccaggagattgaggctacagtgagccatgattgcgccactgcattccagcttgggtgacagagtgagaccttgtcccagaaaaaaaaaaaattcagatgagcctgctccttactaataactgcaaaggttgggaatggaaaccttcagcctgacacatctgtcttcagtggtggtgtgacagtggaacagggtgcttttgtgagcttggtttggtggagagtagggagaaatcctgacctacagattactgtgttacagagatgaagagaaatgattcagcttatttgtttctccaggtatct

SEQ ID NO: 6723 - DNA, 1103 bp, Homo sapiens
agagacggggtttcaccatgtttgccagggtggtctttcctgacctcaggtgatccgcctgccttggcctcccaaagtgttgggattagaggcatgagccactgcccctcaccccctgctggatttctcttgtttttaacagaaaaaaaagaatgacataagattatgaattgaattgcatttctagaaagctattttatctattaaaccagttgaaactaaactcttggctgtgtgctggatgaaagtagtttttatatgacaactgatggctgtgtgccttttaaaaaatagtaaaatatataatctttgtattaaaaagtatggaaacatatacatttagcagataataaagtgaattattattaacaactgtcagtgtcaaggaattctgctaacatccgagaatccctcttgcctcctttctgtatctaatatcttctctctccctaaaggaaaccactatcctatctttaagttattcatttatttgcttttcttaatcatttactatctaggattatatccctaaatgttataaatttagttttgtatgcacttgaactttatatgaatggaatcatattgaacatattcttttgtgtcttgcctctttcaaagtcagtattgtgtttgtgaggttcatctttatcacatagagctgtagttctttttcgttgtagcattgtattctattatatgatgatatcaccaattatttactattgtacaattaatggatatattggttgcttccagtttttggctcttacacaaaacggtagttgcacatatacatgagtttcactaagagttaatccaggaatggaattgctaggttatagggtagtgtatctttaattttaccagatgatgccaaactaattatacaagtttacattcccaccagcagttgaagaatttccttgccctgccaggcgcggtggctcatgcctgtattcccagcactttgggaggccgaggcgggcggatcacgaagtcaggagatcgagaccatcctggctaacacggtgaaaccccgtctctactaaaaatacaaaaaattagccgggcgtggtggcaggagcctgtagtcccagcta

SEQ ID NO: 6724 - DNA, 1029 bp, Homo sapiens
ggctgtggaggatattaatgaacatattaccgatgctcagttagaagcaatgactgaactccatgacagaacagcagtaatcaaggagaatgaaagagagaagaggcccaagcttgaaaatctgcctgacacagaagaccaagaaactgtggacattaattcagtcagtgaaggaaaagagaataatataatgataaccttagaaacaaatattgaacataatctaaaatctgaggaagaaaaggatcaggaaaagcaacagatgtttgaaaataagcttataaaatctgaagaaattaaagatactattttgcaaacagtagatttagtttctcaagagactggagaaaaagaggcaaatattcaggcagttgatagtgaagttgggcttacaaaggaagacacccaagagaaattgggggaagacgacaaaactcaaaaagatgtgatcagcaatacaagtgatgtgataggaacatgtgaggcagcagatgtggctcagaaagtggatgaagacagtgctgaggatacgcagagtaatgatgggaaagaagtggtcgaagtaggccagaaattaattaataagcccatggtgggtcctgaggctggtggtactaaggaagttcctattaaagaaatagttgaaatgaatgaaatagaagaaggtaaaaataaggaacaagcaataaacagttcagagaacataatggacatcaatgaggaaccaggaacaactgaaggtgaagaaatcactgagtcaagtagcactgaagaaatggaggtcagaagtgtggtggctgatactgaccaaaaggctttaggaagtgaagttcaggatgcttctaaagtcactactcagatagataaagagaaaaaagaaattccagtgtcaattaaaaaagagcctgaagttactgtagtttcacagcccactgaacctcagcctgttctaatacccagtattaatatcaactctgacagtggagaaaataaagaagaaataggttctttatcaaaaactgaaactat

SEQ ID NO: 6725 - DNA, 1097 bp, Homo sapiens
ttcgagaccaacctggcaaacatggtaaaaccccgtctctactaaaaatacagaaaaattagctaggcaggatgtcacatgcctgtaattccagctactcaggcggctgaggcatgagaatcatttgaatctgggaggcggaggttgtagtgagcagagattgtgccactgcactccagcctgggcgacagagggagatcctgtctcaaaaagaaaaaacaaacaaaaacagaaaagaaaaaaaaaaagaccaggcccagtggttcatgcctgtaataccagtattttgggaggccgaagcaggaggattgcttgagcgcagaagtttaagaccagcctaggcaacatagtgatagccctatctctccaaataaataaataaataaataaataaataaaaagataagttggtcatggtggcatgcactgtagtcccagctacttgggaggctgaagcaggaggatagtttgagcccaggaggccgaggctgcagtgaactgtgattgtgcaactgcactccagcctgggtgacagagtgagaccctgtctctaataaataaaatagaaaaaaaatttccatgttagaaaaaaagaactcatttttttgagaattttcataacatattttagtgcatttgactttttcagtattgtgaaggttatagtacattactaaatttaaatactagttatgttctcttaggaaacatctttactataaggtattaatatgggtgatggaaaagttatcatcttgagctatattgttttacagagtaaaaagcgacaatatgaccaggaaattgagaatctagaaaaacagcagaaacagactatcgaacgcctggaacaagagcacacaaatcgcttgcgagatgaagccaaacgcatcaaaggagaacaagagaaagagttgtccaaatttcagaatatgctgaagaaccgaaagaaggaggtaagtgtaaactactgtttttaattactaaagctttttttttaaaaaaattgttttaagactatctaaggatttaggaatactaataatacttgagagttaaatagcacctattcattctttcattcggtcttctcaaca

SEQ ID NO: 6726 - DNA, 1121 bp, Homo sapiens
agttattctatggcaattgaccccttttatagcagcgatgaccacaatttactaagcagctattacgtgtttggagctccatagattctgaatgctcccaccaactatgctacataggaacctgtggctcagagagatgagtgagactcaagattacacatttagttagtaggcagagttggattcaatcatgggttcacctgcccctgaagtctgcatttatttttattttttttttgtagagatggggtcttgctatgttgcccaagctggtcttgaactcctggtctcaagcaatattcccaccctggccacccgaagtgctgggattacaagtgtgagccactgcgtctggcctaaagtctacgtcttctgcacagtttttctctctgctctgccgccgcatccacgcatgtttgtataataatagctaacttatattaagccactcctctgtgcctggcattgtacatccttataaaacctgtattatttaatccttattgtagagacaggaaagatgagtctcagaaagttaagattttttgcccaacatctcacaagtttcaaatgaacttgaattcaggtagttaattgtctgaaaataactcttctttccagcagacttgtaaatttcaaagtaaattggacatttagtttaaattttgcatttttctggaaaaagagaggaaaaataggaaatccttcataatttccaaaagttttagaataaataatatgggaagaggctacattgttatggatatcctgggccacttagtgaaaatggctgaatgttattatttggtgcgtttaatctacaaattcagacttcattttcaagcttcaaatattttcgagatatctgtggagtatagctttatgactaaattttgtgtcccaagatgcttcctttactcttgatgctgaaataactacactaggttaaatacagaaagggtttgtaggtcaacattcaggaaaatagcacactgaacatgtggttttaaataatgttttaatgaagaagaatgagaaggttattttgcaagacagaggggattgtcacattacgcttacctagaattctaaggcaagaatattaatggagactcataaat

SEQ ID NO: 6727 - DNA, 1045 bp, Homo sapiens
gaaatcagaaaaattttcttccctagctctttgcagttggggccaagttttgtgacctaggctcttcctgtcagacacacacatagagttcaaatcagaaacgagcaaggtaaggaaacaggcttggtgggatatctgcttaagatattcagctctccactggttttcctggtgagagcagcggcagagcttctgggtttcagcagtgtgggttacaagataaaattccagagtagaaatggcatcagtgccagtggtgttagcagttatctcagactctactttctggcagcctcacaaactgaagcatctggtgctcagcttggactggcagcagtgagtgcttcccattaggccatttctcagcatgaatttgggatgttctgtcttaattccaagcctgtttgttccgcctcccaataattctatgagccactcagtctcctttaaagaaagttgtgttggccgggcgtggtggctcaagcctgtaatcccagcactttgggaggctgaggcagatggatcacctgaggtcaggagttttcagaccagcctggccaatatggtgaatccccatctctactaaaaatacaaaaattagcctggcgtggtggcgcacgcccataatctcagctactaaggaggcggagacaggagaattgcttgagcccgggcagtggaggttgcagtgagctgagatcgtgccactgcattccagcctgggtgatagagcatgactccatttcaaaaaagaaagaaagttgtttcttaaacgtgccagggtagcttctgttatttgtaatttataaaatcctgaccaagccagcattttaggccacaaaactgttcctaagaccagtccattacctctgtgagcgcaggaacttgatgcacccttggtgtttctagaacaccttgacaccaggactgtaagggttctaccatatttttatgtgagggggccgatacagttagccataaactgataaactaagaaattattctctgtctaggtgccatccttggtaggaagctttattagaag

SEQ ID NO: 6728 - DNA, 1049 bp, Homo sapiens
gaagagagaaagataaacctgtttgctttctgaaacaacaagtagtaaaacaggttgtttagggtaaagtcccttgaactagataattgattttaaatacatttgcctataataataccttatatttacatagtgctttgaaaagttcaaagcatttttacatttattatctcatttgaacttcactacaaccctatgaagtaggtacagcacgtattataatccaccgccaccaccacttaaaagacagctatactgaggcacaagcatgtcgagaaacttgtttaaggtcatataaccagttggtgttacatctagaactggaacaccagaactctgaaactgaagcctgtgttttcttggcagaaagtgcctctgctactgcttgatctacccagagttcctgttgagatttgtggctacaatttaattggagaatacaaatcaggcacgtctaaagagctctacagaaaagagattgtttcttttagatcatgactgtgttaggaaagggaggtagagaatggagtcagttgttttggacaatgcaaattaaaaacaaacaaaaacactttgtagtcagtttctggatatgttgggagcaattcattcattaaatcgtgtattcattttttaaagtatccgttaagtgcctttatataagagactgtgctgagcactttgggaagaggtaaagaaatgcattcaatttgcggggaggggatgtgggggaatgctttgaattatacaaataatcaccattttattcattgttcaatactacctggtagatgaaataaaaagccctccttgcagagaagcaaggaaaacaaaaacagatgaaggaaactgggcaactaatttcttttaattctctccctgtaggaggcattaaaaaaaaaaattgaggccgggtgcggtggctcacgcctgtaatcccagcactttgggaggccgagacaggcggatcacaaggtcaggagatcgagaccatcctggctaacactgtgaaaccctgtctctactaaaaatacataaaattagctggg

SEQ ID NO: 6729 - DNA, 1049 bp, Homo sapiens
tattttcctttgcttaaatggagcagattaactttatggaaggaggaccaggataaaataaaggcagctacatttaactcttcatctttctgaagagttcagtctgtgataacacttaaggtgcccagaagtgctggcatgttggtaatagtttttaaagaagaaacgggtgtatctattttgaatgttaaacataatttgaaggagttcttgagatagttggttatgagacattcaatgtattgctacattttacatatatgatatcaggaaatgtttggtgaacatttgacatagttgatcatatgacacttgggaaatattttgcatgatagaaggatagtattttcgtaatgtaagtttcaagcattgactgaaagggagaaaattacacactttgctgtctcacccctttcttcaatattatgctggcatgaatgtgaattctgcctaattatgtttaaagtgtagatctggcctttgtaaaaccagaatgtcttttgagaccaagagaacataacatcagcaacagcccaactcctacacacaatcctaaaacctagatacagggtggtgcccaacttctgaggttttgaggcttcctgaagtaggcctatcatgtctgagtgcttttgtcacatgtaagcctacaggtggttagctggttaatctctcccatttcaaagcagttggttagcagtactgggtggcatgtatgcatgtcatcagagtataagaagtgtttgagggaagaaatcacataaaagcatagaaacctggctctgaacaaactgtgtagcgtgttggggaacagtcacatcagaactttagcttaaccgagttgttatatgtaaagtgcttagaatggggtttgtattcagtgctttttgtgtttatcattatcagtatgtaaagtgacatatctttttgaaggctgttaggtcatgctacccagcatgtgaagactcagcaaatatttgtaatagccaatatttatttgcctaacctctgtgccaggcactaagagttttatatgatttaatttactt

SEQ ID NO: 6730 - DNA, 2343 bp, Homo sapiens
gcacccaccaccatgctcggctaattttttatattttagtggagacagggttttaccatgttagcccggatggtctcgatctcctgacctcgtgatccgtccgcctcggcctcccaaagttctgggattacaggtgtgagccactgcgcctggcagaatgtttgattttttttttaagtggacatcaaatttattttcagttaaaaatgctgaaagtaatacatttttacttcatctgtcatagtgaatgttgataatgataaaatcttatttctctaagcactttgccatagctaaataccttagtaaaacatgcgatagacaagggtccggtcactagccacagaaaggctgtcactgttatagcagaatgtaatagggaaggaacattttatgcctcaataagaacagtgtatttgcttgagatagtaataacctctgagaagctgattaattggtaatcacttaagttagatgattttatattgtttgatgtcttataatctaaacgtccctgtgctcttttagagtgtctgccttgaccagtcagcatttcaggagggattgtgactgtcagttaagtgctttgaagagagaacccctgctttgtgtcacacctgaatgtaacaggacatacttcttggggctgtttaatttgggctcaaagggaagagtgccatctactgaatggccagcatcaagttgagcagctcctgttttccttacagaactcagccagttcctggagaaaccaggcccagcttcatttggaggatttgacaggatcttagtaccaagtggaattgttgcctgcttaattttaattatgcttcccagcaggaggcctaaacacatgatgaagaactaattcagtacttgttggaatgcatgggaaaagagaaacctgaagaagttgttgagccttatgttaaaaacagccgagtagtggtgaaattaaattaagtggtaaagaaaattattttaatgagagcagtctttcaatagcaggtctggttggttattgatggctcctgcagacaataatgatgttaaaatctgcttgggcttagaatcagcaaacaaatcatttgcctaactggaggtaagggttttaagaatacttgaatacttcgattgtttttttctcctgccctttttgtctcattttgtaaggcaatgattcctacttgagtgaattcactgtttcaaagtagattttgttgttgttttggtgtatggtagtggtttcctggtttttgtttgttttttctttccctattttccaaaaacttactgtggtagcagccatgggtagaactggaggtagtagaactagttacaggtcagtggaggtttaaggtatctggaataggcttgtcaaagccagacaagaaggaactttgaaaatatgaattgaaaggaagctttgaaattgttgctataaaaatacacttgattgttacatatttatatatattatatgtaattacttaattagtaatcatttttgttagcctttaaaacctgccaaggatcattttaagcacttcacataaattatccaaagtttagtgaagtaacttgcccaagatcgtaccgttaacaaagggcagagccaagatttgaggtcagggctaatacccttaagcactatgctatatactgctgatttatttatgtttatttttgttggtgactgcacagaagagttgaaccaagattagaatgatatttctgccttggctggaaaatactgatgctggggttcttggtttctgttgttgtttttaaggaagtggtaacatgggtaaatacgattgagaattcactagaatcaggacgtatacatgagatgaacttccaaatgttttctatttgattttgtctatgttaacttttgttccttctgctatatttaaaaccacaagaaaagtttactgaaacatgaagtgaattgtttcaccctggggcgtgtgcttaaaatatacccttcatgggaagagttactgaagaggttttggctgggtttattttttgtaggggagtggggatttgttttttgtatgtataatatatacatatttagtttgcttccttctaaatatttttatgtggtagtacttttcaatatggcaataatcatgtccacagtacaataaaattaaaccatgtgccatcctgaggtcctaggggaaaccaagtttttgtgcataccaagtacgttctgtatactgaataagtaccataccttacgtgtatgtactaaaacttcattgaatccatgtattttttaaattaagagatatttaatacctgactactattatgagtaatggtcttgtt

SEQ ID NO: 6731 - DNA, 1068 bp, Homo sapiens
ccagcacaatgcttacttcctgggtgataggatcaattgtaccccaaacctcagcatcacacaatatacccgtgtaataagcctgcagaggtacaccctgaatctaaaataaaagttgaaattataaacagaacttttgtgcaatggaataacaaaagaattgaaggcattgggctttgcaatatcaggtattgcatgttgtcattacaggaagtcattgtgccatcttggtttccccttaataacatatggtggtttatcttgaaacttcaaaagtaaacatagcgtaagcacctataataaattattgccaaaaaaaatcacatgcagaattatttttgctatgtgaatttagtggagaatccaatccagtaagactttttgcacatttgaatggtgaaacaagatgatttggctcctctagtagctttgttgcatgcacagttgaccatttttgtttgtagctccttgtaataagatatttaacacagggctttatattgggacatagtgattttataaatgggtgggagaaaacactgaatttgacagaactaacttctagattatttcaatgtaaaattttcatgcttaaaatttttaagtgttagatgtttaaaataacttactcaaaagtaattcttagtaaaatgaaaatcagtgaaaagcactcagttttttaaaagcaagaatgattttattggtttcaaagttaaacttactatttgaatcaaatttttataaaatccatttattttttaaatacttgaaattttgagtaagaaatataaggacatggaacaaaataaggcacaaaagcgtatacagtgaaaagtaagttgtcacccccaaaccactcaagtttcctcctcttttcttttttttttttttggagacagagtctcactccatcacccaggcaggagtgcattgggttcaagtgggttcttgtgcctcagcctcctgaatagctggagttacaggcgtgcgccaccatgcctggctaatttttttgtatttttaatagcgtcggggttttgccatgttggccaggctgctcttaaactc

SEQ ID NO: 6732 - DNA, 1045 bp, Homo sapiens
gaaaggaatgtatttaaatgagaaacagttccacccctccaatgaaaaggaatagttttaggtcatttgagtgaaatagattatagaacttatgaccccagttttcttgttttttttttttttttgaaacggagtttcactcttgttgcccaggctagagtgcagtggcgtgatctcggctcactgcaacctcagcctcccggttcaagcaattctcctgcctcagcctcctgagtagctgggattacaggcacgtgccaccacgcctggctaattttgtatttttagtagagatggggtgtctccatgttggtcaggctggtcttgaactcccgacctcaggtgatccgcccacctcggcctcccaaagtgctgggattacagacgtgagccaccacacccggctgattgtacttttaagtcagttttaataggacccaggtacaaggtcaaggtacttgagaatttttggatttaatgttttacattggtttaaactggttggagtctggctgtgtttcctggtgacaatattcatattaaaaatcttataggtcagtttttataaaaactatgtaatatttcttttaagttaatgattgattttttttttttttaacttctggtgcctttgcctgagattttggtttgtagagaataatatgtcagttaagcagaaatttcagtgacctgaaagtttgggttcttcattttaatgagggccaaatgattaagaataccattggatttcagtaatgtattcgaagtagtatcttctggctgggtcccaaaatcatcagatgctaactataccttttctagtcttctgtacttagaatcaatatttagaatgaagatcctaatatcttgcataattcttaaacagtaaagataaatatgttcatgaaagtatatgaaaccaaaaattggaaagatggcttttaagatgggggaatgaggtagaagactacattagtttggcttattactgtaagaatttgtttgccatttctgatgagagtaataatgtgggttcctcccaaaa

SEQ ID NO: 6733 - DNA, 1047 bp, Homo sapiens
gcacaaatgaaagaaatgtaaattctagagaattatctgtgggaaaaagaaattgtttaatatatatcctcagaatatcttgggagtgtcttcagctggtaaggtaaaatgagtatgtttaaaatccagctcaactaatgagaaccactatcccattagaaacaaacatattattactatactttaaaaagatttagctaagtgtaatatgaaatgtatcctttctcaagtgatatggtgtggctgtgtccccacccaaatcccatattgaattgtggctcccataattcccatgtgttgtgagagggtcccagtgggagatagttaaatcgtgggggcagtttccctcatcctgttcttgtggttgtccttaagtctcacgagatgtgatgattttataaggggtttcccctttcgcttgatcattctctcttgtctgccaccatgtaagacatgcctttccccttccaccatgattgtgaggcctcccctccccagccacgtggaactgtgagtccataaatctctttttctttatgaactatccagccttgggtatgtctttatcagcagcatgaaaatggactaatactgtaaattggcaccaggagtggggtgctgctgtaaagatgcccaaaaatgtggaagctcctttggaactgggtaacaggcagaggttggaaccatttggagggctcagaagaagacaggaaaatataggaaagtttggaacttcctagagacttgttgaatggctttgaccaaaatgctgacaatcatatggacaatgaaatttaggctgaggtggtcttagatggagattaggaacttggtgggaactggagtaaaggtgactcttctgtgttttagcaaagagactgccagcattttgcccctgccccagagatctgtggaactttgaacttgagaaagataacttagggtatctggcagaagaaatttctaaataacaaagcattcaagaggtgacttgggtgctgttaaaagcattcagttttgaaagggaaatagagcataaaggtttgg

SEQ ID NO: 6734 - DNA, 1050 bp, Homo sapiens
tttctattacactgagaattcagaaaattctcttaggacaagattggatagggcaagattgtgtaaccctgaaatgtgttagtcttgaacagatatttcgggatctgttctgattatctctccccagcagaaagattgtgattaagggaaaaaataattcttaattatttgttgtgggttagtggttacatgcaggtttttgttttcattttgcataatttagtttcgaacaatgtcttcattttttttaacgactagaaggcctaatttagattttaagtgttttgtgaatgtgttgttaatgtttcttatcactgaaaaatggcatcaggagctgaagatgggagaagctgttgaattcagacaacagaatgcattaatactgtaacactgctgttggccacagtgattgaacattgtgataatttatgctgcactatgtatttaaatccattatattgttgaggtggagaagcggagttaagtagtgtactgatttcagacctaaattttcttgaatttctttatttattatgcctccttgctaagtagttgatattacatggatcacttacattttgtataggagtatatatagagctcatataggagaacttagattacttcttataagaaattggatacgaaaatgctttggttttgtgagaaagaggatttaacagtgtctccagagagctaagctaaccaacagaaaaaatggcatcaagttataaattcttgctatagaaagaggggaggcttttctttcttttaaatcacttaattttttcagataaacttttaaatgcaagtttaacatatatatagaaaagtacagaaatcataacagtacagcttgatgaatatgaatatatatattcattatatatatatatatatatatatatatatatatatatatatatataaagtgaacaccgtgtgtaacctacctaagtcaagaactagaatgctagcaacaccctgctctgggttctcaggcatttctcctctctctgcaaggcagccataatcctgacataatttagt

SEQ ID NO: 6735 - DNA, 1069 bp, Homo sapiens
cttccaaagtgctgggattacaggtgtgagccaccatgcccagcccctacttgacatttttttacttactgttctgcacctacattatgaacaatgtgtgtgttatgactacatctaactgctttgttccaattgtacaatcacaaggagactcatgtttgccaagagtttatattaattcatattatatttttatttgtaaaacaaaatttgaaactgaaacaccctcttagctgtggcctccaattgacacatattttatcttttttaaatgactgcttagtcagacatcaacttccattaagtacagaacatttagtaccgcagtgggttgctgttactattttattttattttgttattgttgtgggggttttttcccttgactttaagttggattttaaactaaggctcagtcctaacttttactaaacaactatagatttattatttcctggactttatattgaggtttagaatttagttttattttaaagataacaagtcatttcaaaagaacaaaaacggggttcaggaatttaagaataatacggatcaatctgacaattccagcagtaggccagagaggtaggtaggtttccacatgtgtaggtttgatagccatggaagactttgtgcaaattttattgctacttttagaatatttactatttccactttggtattgagtattgtgatcatataatattttcatcccccctcccccaaataaagtcagtgatctaatggctggatatatctttaggaaatgatagtcctttgagccatctcatattttttggctaactccaccatgcctgttaagatctataaccatgagtaatttccttatttgtgagaagaacctttggtaatctgagacaaatttattaaacctcagtttttatactacaagactacagtaactaaaacagcctggtactggttcaaaaacagacacatagaccaatggaacaggttagagaacccagaaataaagccacacacatacaaccatctgatctttgacaaagtcaacaataacaagcaacggggaaaggattcccta

SEQ ID NO: 6736 - DNA, 1066 bp, Homo sapiens
aagcaacccagattgtaagataggcaagaatggcactagcagtgctggtgagctcagaattgaacataggggtatttttctcagtctgtgaacactttgggttaatttgataatgaacagctttacaaaatacatggtatgagcatatgtcagatactgtttaagtatattaacagttatacaatgttactacctctgttactttgagttttgagggttcttatattaatctaagtggattgggaatatagctttcatatgtatgactgtttttgtttaatagctcaggtattgtttgggggttttctttttgtaagtgtgttttgtatcctatcttacctgtgagcaaacttttaaaaattctttggtgaggaaagaacatggtatactataaaattcaggagggccctgaaaattgtggtattaatattttcctttgactgtgttgagattggatttgtcttatattggattaatgtttatgtatatattttggattttttgtgctttgttttgaaattatttcagacttacaaaagagttggcaaaaatagtgaaagaattcctgtttgtcctttacccagattccctaaatgataatatcttccataaccatgttgtaattatcagtttcaggaaattaacattgatgtaaatactattatcaaatttacagattctatttaaatttcaccaattgtctcactgatgtccttttcctggtctaggatctgatccaagattacatgttgcatttaattgtcacgtcttagtctcctttgtcttctttaatctggaacagttccttacagttccttagtctttgtttttctttttttttttttttgagatagagtctcgctctgtcacccaggctggagtgcagtggtgtgatctcggctcactgcaagctccacctcccaggttcacaccattctcctgcctcagcctcctgagtagctgggactacaggcgcctgccaccacgcctggctaatttttttgtatttttaatagagacagagtttcaccgtgttggccaggatggtctcgatctcctgacctca

SEQ ID NO: 6737 - DNA, 1032 bp, Homo sapiens
ttatgtccatactttatgaattcaaagtttatagcctcactccctcgacattgatagatatataaaataaaagggtgtgagattcagataaggcttttaaggcaccctgtctctaacttaaacattttgcttttcacctagtgatttttttaccatactttttggacctatgtttgaagagctgttcaaactataatgttctgggggcaaattaagttttcaagtaggattttgtttgagttgaagaattaaatggctttttaaaagtttataacattcaatgaggatgaatttcttatttaaagaaaataaatcttacctagtagattatgggtaggcctaattagacagcagggatttctcattcaagtaatagactgataagactgttttctagctaataacctatgaaatggatatttgctacgttaactgggtcaagattgagatcagattcttcactttctttatatctaggaaaatgaaaagaaactcttaacttagtattaattgagcactgaactacacactcagggagaatctagaaatgtgaaagacacagtttcagtcctcagataatatggtatagtagagcaggaaaatagttaaacaatcacagtcatacactaggtaccctaagtatagtatagggaaagttcacagtgaagtgtagaagagaagaaatacagagatccctcctaacttggatgattaggtgacttcaaggagaaggtagcatttgtaatgtgttgaataaaggaaagaattcattaggaagaagaacagtggaagtcaatacttccattggatgaagtagatcgagcagggctagagaagtgcaagttgtgatcagagaatgctgcaagaacctcataggctaaagcatgaggtagtaatggcagataaagcaaaaaaaattacatagcagcagactatggaaattttgcagtaccaagccattttgacctaagttaggagtcagtacattttctcatcattgcccattttgtttacacaattttttataaaagt

SEQ ID NO: 6738 - DNA, 1026 bp, Homo sapiens
cacatcctcctcctcccgagttcaagctattctcctgcctcagcctcctgagtagctgggattacaggcatgcaccaccacgctgggctaattttgtatttttagtaaagacgaggattctccatgttggtcaagctggtctccaactccccacctcaggtgatccacccgccttggcctcccaaagtgctgagattataggcgtgagccaccacgcctgaccagggactctgtcttagctaagcaaggagtgggtcacctttttttttacaatggtttcttggtgcttgagttgtatattaataagaggagttttatctgtgcctgtctagtgtagatattataatatctcattttctttgacatgaagaatgcctagtggttttcccccctaaaagcaagcatcttgctgcttcttgcagtgctttgattttattattttgtgttttatatttgtttttaaatagtacaggtaaaagctattcagaaaagggatggggtaaagattgattgtatcggaacaagttacttttgggccattcagtcttgcttgctcagtctttatttttgtgtattacaggcctttcgggaagacttggaatgccttattcaagaacagatgaagaaaggccacaacccaactggattactagcattacagcagattgcagattacatcatggccaattctttctcgggtttttcttcacctcctctcagtatgtcagttttggagagttttaaacattataattttacttccactttggaccactatacatctctagcagcatattctgctcgggttcagtccttaagtttataacatctaatacttagagtaacatagtgttagaccctcctaccttttcatatcaaccaggcatttactacactttgtacagattataagatgatataagacatgattctgggctgggacttgtggcatgtgtcagtagtcccagccacatgggaggctgaggtgggagaaatgcttgagcccaggagttcgagaccagccta

SEQ ID NO: 6739 - DNA, 1030 bp, Homo sapiens
agaattccgtggcttaaaatatgttaagaggtatggctctaatgtgttttccatcagggaggatcagagtcttggaaggtttctttttcagataggtggaaaagatacttcagctgtctgctggcacaagagtgtcatcttgtctttgttgttagtagcctgagcaagtattatagatatttgccaaattgaaattgtgcctttttgaaagtaaaatactcattacagtctttatagttttgtgtctctgtatattttaccattgattacaggtgcaggccctagcaggtgcaggtggagtagacaatctccatgtactggactttcagaagtataaagctttcacttacactgtagcagcgtctggtggaggaggtgtgaatatgggttcccatcaaaaatggaaggttggcgaaattgagtttgaagggcttatgaggactctggacaacttggtaggttgcaaaattgaagtaaaacttggatttaatgtcttcagattcaagagcagatgcttccatttttgtagaacatgctccatactcttccagaagctgagtttggccctaggaaagcatttcattgttatttaaccacacctttgagaattaaacagaacttacaaatgtcgtgttttttttttaagattacaatatattgttattaactgtagtcaccatagtacaatatatctcttgaactttttcctcctaactgaaattttgtatcctttgatcaacatctccccacccccacctccttgtaaccactattctactctacttttatgagttcaacttttttttttttcttggaggcaggatcttgcttggagtgccgtgacacaatcagggctcacttgcagtctcaacctgctgggctcaaaccattcttccacctcagcctcctgtgtatctgggacataacgtgtgtgccaccgtgcctggctaatttatttttttttttttactttttgtagagatagggtttctccatgttgcccaggctggtcttgaattcctgggctcaa

SEQ ID NO: 6740 - DNA, 1043 bp, Homo sapiens
cagagcgagactccgtctcaaaaaataagaataacataaaatctgtcctaatattattttccacagggtgaaagtcaacaggtaatctctctgttccagccccccttcattctgatccaaatctaaattggttgctctcaggccagctgcacaggttcatctggaggattcctgtgctgctgatctatattgtattccgtttcctgtatcttgtgtcttctgctttcttgatttcctcctttactgtagaacgcaccctctaatagctttccgagaaaaggatacataggtggtaacagtctgaaatgcctttattctatcttcaaatgtgcatataatggatatagaatagtttagaaataattttcccctgaaataagaaaagcatcattctgttccctattttattgttgaagtaggaaggcattggaattcctgaacctttgtttaggattttttttttttttttttttttgcttttagaccctttctgcatccctgctgttctgaaattttatgattgtgtgctgatctctttttagtcttttttctaagtaattagtaacccttttcaatctccagagtcatatccttcagttctggaagttttttaaaagtgtttcttcaagagtgttttcttcccatttctttttctgtcagtatattatgttagtttggatgttgggcctctttgagcctctgatttttttcttttctctcctacttgccatctctttatctttgtatcctactttctgggagaatgttttctaacccttttaattttttattttgatgttaacttttttaatttattttattttatttattttttttgagatggagtctcgcactgttgcccaggctagagtgcagtggcgcgatcttggctcactgcaagctccgccttcctgggtgcacgccattctctgcctcagcctcccaagtagctgggactacaggcgcctgtcaccgtgcccgactaattttttttgtatttttagtagagacagggtttcaccgcgttagccaggatggtttca

SEQ ID NO: 6741 - DNA, 1040 bp, Homo sapiens
tctgtcttcattggaatcaaagtaatgccttattacattgctaaaacatttcagttttgtaaagtagagcaaaaatgttaagtatgtaaaataacccccaaaaaaccctcccctttcgtagaaaaccatgagctgttttccaagagcttcatctccatggaagtgcctgtcatggtagtaaatggcaaggatgatatgcatgatgttgaagatgagcttgctaagcgagtgagtaggttaagcacaagtacaaccatagaaaacatcgagattactattaagtctccagagaaaatcgaagaagtcctgtcacctgaaggctccccttcaaaatcgccatccaagaaaaagaagaaattccgcactccttcttttctgaaaaagaacaaaaaaaaggagaaagttgaggcctaaataaagtctttttataattattattataacaatgtgacattgcacatctaaataccacatttaagttgatcattaatatgcaatggtagatcagattgggggatgtagcaaactggactttaagaactggaaagaggttttacaaaagaaaaactttcagattcatctctcattttatatgtccagaaatggctttgaattttaagcaattactagttttaattagctctgccctcatgaagtattattataattcaccataaacagctatctgtctgaattacttcaggccttctccataatatctgttagaaagaaattgccagtgagcaagtgagaatttttatttctcaatacctgcttcacttgataatcatattataattttttatcatgattattgactatatttttggagtcccattgtttcagtgggcattaacagaatgctttaaaaacttctaagacaagaatctatagcattagtatacactggcacataattttttaaaaagttttaagaaaagattcatttggaattttattcacagtataaaatttcctcacctgaagtaactttgtttgccaaaaaagttgttttaataaactataatttttgaaaactt

SEQ ID NO: 6742 - DNA, 1028 bp, Homo sapiens
cattttgatttagttatctggtaaagtctaggtatcctatagtggaagaatgaaagacaagcaggttccaatgaaggaccatgcttccaaaggcatcagccagtggatcgtttgtggggccaggcgggggttagatctattattgttggacaggggtattagagttttgaaagactacttgaaaaacataatcaaatgatacttggagtttgttccgaaagggtattctttcctctctcttcccacaacagtgtgcgcttcctattatagttgatatacctgtgctttaaaatagcacagctactagtagaggccattttataccaaaatcatttcccttcatgttctgtggtacatcagtttggcagtagaggttacagagtttgaaatcaaaaggagcattggttccttcagggaaaaatgataccaatctaccaaaataaaagccaaacagactctcattgttctttatcccacaaggggcttgccctttttgaaggtgtggttaattttgataggactcttctctctaacagggttagtggctgggaattaccttttcccctgggcaaaacccactttaaaatctcattttaaaacagaactcaaagtgtctttgaaaataaaagtactttgggaactcttcattgtgtaaccccatccctctcagcaaggggactccagttttctcacagggcacttcctgctgcagtacctaattctaactttgttttactataactcatgctaaaataggaaaggtttcagctttacagtttttattagctgttcatgtgtttttaaaaagtatgtgttaaataaaaataaagtaaatgtccaccaaggagctaaatttttaaaaatcagtttccattaagtctagttctataaatgtttcagtaccaggttttttctacttgctgtttgtctaatgttcatcataatattcagaagagcagccttaactttccccaaccttctttcccttcttttactagaggtgcaggaccatgcctttcatgaatcgt

SEQ ID NO: 6743 - DNA, 1131 bp, Homo sapiens
aggcgcctgtagtcctagctactcgggaggctgaggcaggagaatggcgtgaacccgggaggcggagcttgcagtgagccgagatcatgccactgcgctccagcctgggcaacagagtgaggttccgtctcaaaaaaaaaaaaaagaaaagaaatgatgttgtgcctttctcaatccattgtgtcaggaagatacacgatgtcgaagtttttactactggtgatgtgaatttttatatgtagattttaaagtacaacaccctttatttctctttccatctatcctagaatatttatctttgacagagttaaagaacagaagtcaaccaaaaaagaatggtttgaattttactgattgttcttcccaaagcttccaccacatcaggcttcatatcacattaaaagatcccagaggtgaacactggtgatttgaagtcttacatttggagaaaggagctcatgagctctttaggattctaaaacatgagacaagtgacagagtttttttgtttgtttgtttttaggactctgattttgttttttgtttttgacttttttaagtggaaattttcaaacatacttagaatagaataatgaactcctgtatacccaccattcagtttgaatagctgtcaacttgtttcatctgttcttcactacgctcaccctcaatattttttctggaatgctttaactcaaatcccagataacatcattttgcccctaaatactttagtatgtatcttgaataaataggatttttaaaaatgtaattataatgctattataataccccacaaaattaattcagataatcttttttaatatcatctaatacccagtctgtgatacattttctccagttgtctcaaaaatggcattttaccattggtatgtttaaatcaggatccaaaggccacattgcatttgtttgatgtgccttttaagatattaatctataataattttttctcttccccctacaccgttttggtagaaacaaaaactgatttctacataacatctcaaaaagacttctttggcagagaaaacatgaaggaatatataggtatagatctgtgtgttgtatatatgtacatatttttttaaacatcaagagactgagtcattt

SEQ ID NO: 6744 - DNA, 1044 bp, Homo sapiens
aagcttatccataaaaaaaaatagatgtcttttatagtggaaaaacacatggggaaaaaaatcatctattttgatgcagcatttgataatgataaaacacctcacacctcactctttatagtgcacaaaatgaatgaggtctgggctaggtagaaaaagggtcaatgctatttttgtttttagaatcattaccttttaccagcttttaaccatctgatatctatagtagacacactatcatagttaacatagtaagttcagcacttgtctcattttaatgtaaagatttgcttccattttcctacaggcagtctctctcttcctcacagtcccactgtgcaggtgctattgttactcttacgaatattttcagtaatgttattttcttctaagtgaaatttctagcctgcactttgatgtcatgtgttccctttgtctttcaaactccaaggttcccttgtggccctctcccttaccctgggaaggcctcttggagaccttacccctggctgtttggactttgtatactttaaataatttaactacccttaattacttaaaaaaaaaaaaaagctttatgattttcataacttattgctgattttaatggattgttaatttcagtcctgtagttttattttatgtttagatagggctgggcaaggaaaaagaaaataaagacaaccatatttagcagtgcagttgagttgtgtgttaatgttagactatccctttgtgagtgacactttaacagcattcactgcttctatatatagtgtaccatcttggtcatacattacgcctcaacatatacttgtgctcttcctttgcctccagaagaagtttttccttgattgtgctatgtttcagtggaagaaattctttgaagtagatgtgagtgaaaaactgcatgcctttagaagcccagtatcagaacttgctacgtttcaggtgctagggacttaatgaaaaacaggacaaaacaattcctttttgtggcccaggtaaattatttctggtttcacttataattactaatggctg

SEQ ID NO: 6745 - DNA, 1040 bp, Homo sapiens
cacagacctcatgaatcagatcctctgcacagatgattccatatttaccaagagatcaagccatcaaagtgttatctgtcaagacaatttgcttcatattgattttgctgtaaccacacttggagactagttcatttactgaattcaggttcggagactctcatgcaatatatggttctacaatcctcagcatgtaaattgaagcactgttgaacttaacaaagtttctgatgaagatctgacaaggcaaagaagctgccacacctttcggacccttgggctgccaccactgagacctctgatcctaatgatcaatgccaatttgggttctgcaggtacacagaagttgccagcttttcttgccattctagccattcatatctcagttctatacatctgtctatattcctagtgatagtgtttagcttcttcatagataagcttccttccttcctttcgaagcatcctttgggcaaacttttttctctggcacttgatcttcagctctgcaaaatgccttcacttttacttaaaggtttctggcacagcaggagccttctttttcttctcttcaacactctccctggttccacccagaaaactgaagattttaaaattataaactaaaaaaaattagtttttacaaaaacattatatgtaataagtaaaaacaacaaaatatcaaaagaaataaatgcttttgttttctcagatttttacatgcctttggctttcagttgaccgactaaccttaaagtaccacacactgtagcatggtcctgctgccacacagctcatggccagcacctgaactggtctatcccttgttcagtgagacaggttccctaatgcacttgaatgtaaaactgctataaaggtttctaaatgcctgctttcaattaggtactgctctcctcatgaactggtaacaaacagtttgtggactacagggttctatggagcacaatttgaatagtgctgacaagaagacctaagtggtgagtaagtgctggatcacctttctcttagtctaatgccct

SEQ ID NO: 6746 - DNA, 1019 bp, Homo sapiens
atgcatttctatagctaatgttcacctggatatctggcccagggctgataagttctgtgtggcttccttttctgggatgtacaaatgcagggatgaaggcaaattcagtgccctgggcaacaaaaggcaaggtcaggtaggtataaatttcaaagcacttaaacatgtctttcttccttttctgcagaaccataattaccactttgtcaaaaatgaaaaataaccaacaaatgtataagtcactatgtaattccaagggactgtatgatataccttagactagccaacagtctaacctttaaggtgtgtgaaatccaggtgaggagacaagacaaaagtatgaggaagcattcaaaagcactggtagtctaaagaacagcaaaggaagggctacacacaagccctcagcacaacaggctgtggatactttcatgcatgttaacagactccctgcccaagtgctatgccacctacctgattttctgcctccattccttctctgaggccaaggaaatcggcacagccaagcagaggtgcaatgacctctgagggcaacctccagtcattgggagatgagaactggtggacgagagcctctgtgtccctgtgctttggtgggacaattctgaagtatttatatggtttggctgtgtccccacccaaatctcatcttgaattgtagctcccataattcccatgtgttatgggagggacctggtgggagataattgaatcatggggggtggtttcccccatactgttctcacggtagtaagtctcacgagatctgatgattttacaaggggcttccccttttgcttggctgtcattctctcttgtctgccgccatgtaagacatgccttttgccttccaccatgattgtaaggactccccaaccatgtggaactgtgagtccattaaacttctttttctttataaattacccagtcttgggtatatctttgtcagcagcgtgaaaatggatgaatacaggtatgctattgacatttcctcagaa

SEQ ID NO: 6747 - DNA, 1050 bp, Homo sapiens
caaagttttctacatctggcattgatgcctccaagcttttggattgtggtgctctgggaactaacacccggaagtagtcagggagttatagcctcctttccatgttcacaattcaggagtacctgaatgtactcccaaggtagcttgaatctaccagaggtattaggagactgagcttttccattgattggcagccaaggcctgggttgagaaaggtgaatctggggccacatataaactgtgtttacctcagtacgtttttagtctttgtatacatctttttaatatatatttaaataaaaatgggttcatttttaaataaaaatgggttcatttttaaataaaaaatgggttcatcatataacttactggtaatctgttattctccttcaggataaatcttgaaatatctttattaaatattcagcatcctttaaaattgctatatagtgttccactctagcagtaattcttaaaaggaaattcttaaaatttcagttatttatagatggattgtggtttgaaatatttattcatttaatgataaattgtcatcttaaacttttatttagaaatagtttcaaatttacagaaaaatttccccaataagaactgttcagagactactcataaaccctttacctagattcacctgttgttaacattttccccacttgctgtatcatttccactttttacacacctttttccttaaagttatttacaccatggtcctttacctctgactttaatgtgtactttctaagaggagggatgttctctttcataatcacagtacaatttacaacttaagtaaatttaatacatagtaatctgtccattttccagttatgttgactgacccagaagtgttcttgatagcatttttccccctccagtacaggatctaatttaggagcaggtattgcatagttgtcatgcttctttagtctcctttaatctggatcatttccacagccttcctttgtcttttataacattgttatttttgagaattaagacataagtgatgttgtgtccctctcagga

SEQ ID NO: 6748 - DNA, 1414 bp, Homo sapiens
agatcacagctcactgcagccttgatctctcaagctcaagtgatcctcccacctcagcctcctatttttgttattttttgaagagatggaatctcagtatgttgcccaggctggttttgaactcctgggttcaaggagtcctcccacctgggcctcccaaagtgctgagtttacaggcatgagcaaccatgtccagccatcgtatgtttttgaccatagtaaacccttttgtaccagaattatggaatgattacacaagggagagttagaggaattgaatattgaaaggacagagtattactaaacattaagtgaaagagaattaatggtgtcacaattctgctattgtacttctaattgccttattttctgtttaatacttttgaataggatatcgaacgccaagttagagaattgaaaacaaaaatttcagctatgaaagaagaaaaagaacagcttagtgctgaaagacaagagcagattaagcagaggactaagttggagcttaaagccaaggatttacaagatgaactagcaggcaatagtgaacaaagggtaagttaaaatgctaaaaatgaaagatgtgaatgttcaggtgagtagcaactgtagaagacagccctttctgtgactggtgtgtgttggaatttttttttaagctttgctacgttagcataatttgtactcaagtaacaacttggtactgtccctttgtttcttacattaaaaaagagtttcatgttacaggtgggttttctcatgaagtttttttcctgagaaaacatttatgctagacctaaattatgcaaaaaatttaaagcagtttgcatttttactttgtttacagaaacgtttattaaaagagaggcagaagctgcttgaaaaaatagaagaaaagcagaaagaactggcagaaacagaacccaaattcaacagtgtgaaagagaaagaagaacgaggaattgctaggtctgagaactttcaccaacactttaactttctacatcatattatgtaaaactaggttgtccgaggagctcaattatatagtagctgctttttacacttaattctttttgtatctttttgaaaaatggctttatgtttctgtgtgcagttgacattattggttgcaattaaacttggttattattctccttttcatcccatttgcttctattttgtgtagattggctcaagctacccaggaaagaacggatctttatgcaaagcagggtcgaggaagccagtttacatcaaaagaagaaagggataagtggattaaaaaggaactcaagtctttagatcaggctattaatgacaagaaaagacagattgctgctatacataaggatttggaagacactgaagcaaataaagagaaaaatctggagcagtataatgtaagaacttc

SEQ ID NO: 6749 - DNA, 1033 bp, Homo sapiens
ctcagcactttgggaggccgagacgggcggatcatgaggtcaggagatcgagaccatcctggctaacacggtgaaactccgtctctactaaaaatacaaaaaacaaaaaaaacaaactgaaattggatttttcaacagcatcattgaggtataattcacatacagtaaattgtacatatttagtgtacatcatttttcctagtcaggaaagtggcaaaaataaagtatataatttgatgagttttgacatacgtatacatctgtaaaacaccacacagttaagacaccacacaccacagttaagacaataaacacgtttattacccaaaagcgttttccatacccctttgtaattcctccctcaccttttgtccgcctcccccatccatctgcaaccactgatctgctttctatcagtgtagattagtttcatgaaattgaattttaaatttatttttatttccatagaaactggaccaggatcttaatgaagtcaaagctcgagtagaagaactggacagaaaatattacgaagtaaaaaataagaaagatgaactacaaagtgaaagaaagttagtatagactaaaatgtgcattaatgttttcagtaatgttcgttactagctgttatgtggtctttaagttacaagttaaccggtcaggcttgttttctgtattttgattctaaactgtatactgttaatgcatcctcatatgtgtttaaaattaaagacagtctactttttatttattagctacttgtggagagaagagaatgcagaacagcaagcacttgctgctaaaagagaagatcttgaaaagaagcaacaacttcttagagcagcaacaggaaaggtgggcaggttcttttcatcacctctgtttacactgagtcattgagttaatcgttatgtaataattttttacctttcaaggtgtaggtcatgggttccaagtgataaataggagtccaaattatcttctaaatatgaaatgatagagattaaatagttttattactacacatactatt

SEQ ID NO: 6750 - DNA, 1030 bp, Homo sapiens
tagcccttttatgtgagagatactatcgtaagttttgcatatattaactcatttagtcttcacaactttataaggaaggtatgtattgtctacgattttgtagataaagtaactattatctgaggaagttaagcaacttgtccacagtacacatctgataaatggtgaaacgagtgtttgaatttgggcagtctagcttcagaaccactaaactctttagcactattaggctctactattgaaaaccttgattacaagagcaaaattaccaggatattctagtggaatgagtcttctaactacttcagggaaaacgccaatcgttttgaaatataatggtgtttatggtttatttgtatttcataaagatgtaatttcataattctaagttcttagttaactgtgttgtgatctctctgttgacaaaatttcatttttaggatgctattcctatgatcagcaaactgaggtacaatcccagatttgacaaagctttcaaacatgtgtttggaaagactcttatttgtcgtagcatggaagtttcaacccagctggcccgtgctttcactatggactgtattactttggaaggtttgtaatactaattcttagctttaaacagataaattctaacaaatcatttaaaacatataatctggctgggcgcagtggctcatgcctgtaatcccagcactttgggaggctgaggcgggtggatcacctgaagtcaggagttcaagaccagcctggctaacgaggcgaaaccctgtctccattaaaaatacaaagattagctgggtgtggtggtgtgcacctgtagtcccagctactcaggaggctggggcaggagaattgcttgaacctgggaggcagtggttgcagtgagccgagatcacgccactgcactccagcttgggtgacagagcgagactctgtctcaaaaaacaaagagacatataatctgtataatatgtcagttgagctgtatgcatgtctgattaatatatcttacagtattttggagacattc

SEQ ID NO: 6751 - DNA, 1049 bp, Homo sapiens
acacaaagagcgtatggggaaatactgaggaaaaggaggatgttgacagtgtataccagctgtcttcctgtgtttgataatccagctagattgaattattccacacatggcaagaactcttcatacataaacccttaacatagtgccttaagcatagtaacagtaaacatttgttgaatgaaaagatatttaaaagtatgtaatattgttagatttcacctaacctcctttatggttttccaagaatttgttttgtataacttttagtaaaacagtatacatgttattctgagagtgaaatggggtgaaatgtttcaagcttctttatgattgaatgcattttgggtaatatagttcagcattgttttggtccataaatttgaggacataaatgttatttgggggtaaagaaaaggaagggatacatggtgttgtgtctaaaaagaattaagaacatacgatatatttacaacctggagataattttccttagccttgtatatggattaataatgaaattgatcagttgatgaaccaaatgcaacagatcgagacccagcaaaggaaatttaaagcatctagagatagcatattatcagaaatgaagatgctaaaagagaagaggcagcagtcagagaaaaccttcatgcctaaggttcgtaagtatatctttggttatagatcgattgttacagattaataatatggaaatatgaatcatacattatatgggttatccttgaattttatgtttcatttttgtttggacccatactttttttttttgaagacagagtctctttctgtctcacccaggctggagtgcagtggtgcgttctcagctcactgcagcctccacctcctgggttcaagcgattttcctgtctcagcctcctgagtagctgggactacagacatacgccaccacatccggctaattttgtgtttttagtagacatggggtttcaccatgttgtccaggcttgtctcaaactcctgacctcagatgatccacctgccttgccctcccgaagtgctgggattacaag

SEQ ID NO: 6752 - DNA, 1189 bp, Homo sapiens
gcctccacacccagctaatttttgtattttcagtatagacgggtttcaccatgttggccaggctcgtctcgaactcctgacctcgtgatccacccaccttggcctcccaaagtgctggggttacaggcgtgagccactgcgcccggcaactttttgttcttataatatgcctgaagatttttgtatagtttaatcatggaatatgatctgccccaccctgccccacctatactattacatcatatttttcttgttgctagagtcctaattaccaaattaataggcacctaatatttgagttgatatgtctatatatttagctcaatcaaatatagattgttttaaaattttcactataagtaatacagtggctaataccttactaataaatggataatgtcatatagcaacgtagcttacagagtttggaggcaagcttgcatgctatggagtctaccagagagtcattgaaagcagaactgggaactgatttgctttctcaactgagtttggaagatcagaagagagtagatgcactgaatgatgagattcgtcaacttcagcaggtaagtagacagctgactggaaaaagaattcgttagtaattggctattgtgaaaagggcctttcttgctaactagggcaatatgaaagaaaagaactgagaaaatattaaaatgaggcttggacttttaatatacataggagtaaataagattttgtttttctaaaccaatctagctaggttaggattatacaagaaattttcatttccttaaaatttagttaattagcattacttattagttgtaagtattgctatgagtttgagcttgttagccttaccatatttatcttactgcctttacatatttaatgttttgatcaagcattttaattgatttttaaaactgcatagatgtaaactaccaacaccgattctaaaaaatgaaaagcatttaaagaaactgtttttgacagcatgcgttataaaaagggccagccacaaaaatttaacattatgaattgataagagaaaaatgaagaaagtatagggcttttttgaagaatataacatattaaacttcatttcagctcacatgagcacaagtactagagaggacagcaaatgagcaccattcctgtgtgtgaaatgtacatgcttatatagacaactttttcttaattc

SEQ ID NO: 6753 - DNA, 2071 bp, Homo sapiens
tccttggtggccatgacctattgcaagtggttatatcagaggctctgattgaaagcatgggctttggggacagaaagcttagtgtcttgtgggccttgggttggaattctgccacctagtgtgtgattttggacaagtcactatttctaagcctcagtttcttgtgtgaattaagcattatcatacttgttttatataattgctatcctgacacattctaagtactttgttaatattttttcagtggtggttagatgcttagaaattttctagtaattgtgtcttttttttcttccctttaatggatacttctaagtatttgtaattatatgatgtatttatatttttttgttttcttgaatgtttattcagacaatagccatagaaaatgttggcagtcataacatttgaaactaatggaatttgtattttttgttacaggaacttaatgagctgagagagacagaagggggtactgttctcacagccacaacatcagaacttgaagccatcaataaaagagtaaaagacactatggcacgatcagaaggtgaatttttatgtagtaaaattttgtttatatgcatgttttataaaattgtttactacagaatgaaatgtccaaataggcagaagcatatgctaatgattttttgttttccattataaacaatgtatagcaaatggaatttaggaagttgactataaatagtaacttttgttttactgaaatgtttatgacaattttgagaccataaatgattcattttgttgataaaatatgaaatacctgacgaaagtttctcatcacttagttgttagaaaataactatagtttataagcattaacattgaataatgaaaattatatatttgagtgactcatatatacttctaattttgtactgacttaacatggttcataaattttcacagaaaattttaaacacaaaacctaaaacctattttggtaggtttgatcataaaaatctatactcaacatataacactggctttataggtattatagcctaattttgtttccccccatcttagatttggacaattccattgataaaacagaagctggaattaaggagcttcagaagagtatggagcgctggaaaaatatggaaaaagaacatatggatgctataaatcatgatactaaagaactggaaaagatgacaaatcggcaaggcatgctattgaagaagaaagaagagtgtatgaagaaaattcgagaacttggatcacttccccaggaagcatttgaaaagtaccagacactgagcctcaaacaggttggttttaaatttgaagtcttgttacaaattgctcagtatataaatttatttatatgaatacatattttctctttatagttgtttcgaaaacttgagcagtgcaacacagaattaaagaagtacagccatgttaacaaaaaggctttggatcagtttgtaaatttctccgagcagaaagaaaagttaataaagcgtcaagaagagttagataggggttacaaatcaatcatggaactgatgaatgtacttgaacttcggaaatatgaagctattcagttaactttcaaacaggtatgtttcgctttgtagttaaaacatacacacagaggacaaaagcttccagctcttttcagtttgtaaagattttaaagctgttttcctcattaccaggtgaatctaatacatgtgaacaaacctagcatataggtttacagtaacttgaatgttttacacagcccttagaaggatctagtctgttatccttgttcttaagattaaaaaataattggttgcttttaaatattttacttaagtgttatatataattctaagcaaaatttatatttcaatctgcttttgttttaaggtatctaagaacttcagtgaagtattccagaagttagtacctggtggcaaagctactttggtgatgaagaaaggagatgtggagggcagtcagtctcaagatgaaggagaagggagtggtgagagtgagaggggttctggctcacaaagcagtgtcccatcagttgaccagtttactg

SEQ ID NO: 6754 - DNA, 1050 bp, Homo sapiens
atttttagcttccattaagaatcatccataccttttctgctcttgtttactgtaaagattatcagccatgtatagacacagataattaatattttataagatttttattttaaatatgcattctccaaattggctaatatagaggcattattgtatataaaacacgatttaggctatttaggaaacaagaaatataaataataccctaagaggagatttgggataagttaggaaatcagaataatttgagaacttaacaaatatatattttttccatactagcagaaataagaaaacattgacattctggtgaatgttttataaggatttatctcctccaacatttacaatgttttatttttaaaattattttgttttaatcgtgagctttaaagtcaaacctaatcctttatttataagaagttatttattaaccttgatgaacgtcagaaatttaagttttaggttgccagttttaaagcactcattagaatgaaaacagagccactcaattccgtgtgaaatgttgaagttagctgtcagatggaaccacgaagtataccactagccatggaggaaagaaaccaaacacgtgcacccctcttatgaagtgaatgtagaggtgattttcctaacttatttgatttgcagcaaaatattcctgggtaatgcgtggcatcaggttgcatatttaatttgagtatagatgacacttttttctgtattattttttaagcagtgaataaaaataattataaacaatagaaaaagttttggtttagcatttgatggctagtgttacctgcgtgtaaatgcttgtagttaatgaaaacatgaatccagctttgatctctttgatctatagtcttccgtatagcattagaacactggctgtctatattttcagagcaaagtgctcccctcactcggaatagaaaatgttgtaagtagcaactccgatttacagactctaattttacagacattctgcagaaggatctccgtgtaactgttagggagtcattcgcaggcaagttgtgtatgatgttc

SEQ ID NO: 6755 - DNA, 1055 bp, Homo sapiens
ccttgacctcccaaggtgctgggattacaggcatgagccaccatgcccggcctgttcttttttttttttaatggccatcctagtgggtgtatgaagtactatctcaatgtggttttgatttgtatttcagtaatgactaatgatattgagcttcttttcatgttggcttgttggccatttgtatatcttcttttgaggaatgtctactcaaatctatcatccattttaaaactgggttttttacattcttgttttggaatggtaagagtctttgaaaattctggagagtaggcccttatcaggtgtataatttgcaaatatgttctcctattttatgggtttgcttagcataatgattttgaggttcatctatgttgtttcttgtatcaaaactttgggccttttactttgctaagtagtattctgttttgtggatatagtgcaaactctttatccatctgttgatggacatttaggttgtttccaggttttggctattacaaatgaagctcgtatgaacattcctttgcaagtctttatctggacatatctttcagcttctcttgggtaaatttctaggccaatgatattttaaccttttaggatcacaaatattgtacataagaatcattgtttgggtgaaacgtcttcaaatttttattagtatgtcattgaatggagcatgttaatgtaaccctttaaggtgtttaaagaatatacactttttcatctttgttttcagaatcaatcactcattagtttttttttcttctgttgatgaatcttccttcaatagtttttcatttggcaagtaattatgaccatggaagtcgggacacaagatgaaaaagacaacaaaactgcagaacttcaaactgaaagaaaccctaaaaatcacctgagtcagctcttttattttacagaaaaggtgatgaggtccagaaaggagactggatttaccaaaggccagccgagtattagagcagttcggtggagcaggggaaacttacacacctgtgagggtaatttgacgtctcctagccatgatgcaacag

SEQ ID NO: 6756 - DNA, 1029 bp, Homo sapiens
ctgaaagggctagacagacatttatgttcagagaggccatataagaagaatataaatgcggaaagtcataaacttcagctctgctctgggctccactctcaagccactgtgtgaccagaggtagcacttagcttcttagagtccacatgggttaaagggggaccagggtatggggcttgttcaaacagtcaatgagatgacaggtgaacatgccttggtaggaaagcagtactgaatacatgtgtcctcatgtaagccagctttttgtctcatgctgtcatctccagccagaggccagattgtgtgcaggcaatttccaggctgaatttctgagagatttgatccaaataggataaatggtggaaatgaccactaggaacactccttaaaacctgcttgcatcaatgctttcaatgatacatttctgcatctcaaaaaaaagtttctaagccctaagctagcatctgcctatttcaagcaatttctgttcttttttttcttttcttttctttcctttcctcttcctcttcttcttcctcttcctcttcttcctcttcctcctcctcttcctcccgttccccttccccttcctcttcttcctcttcctcttccacttcttcttcttcttcctcttcttttttttttaattttttttttgacagggccttactctcacccagactagagtgcatactgatcctcccacctcaacctcccaaggagctggggctacaggtgtgcaccaccatgcctggctaattttttttgtatttttttgtagagtccggttttcaccatgttgctcagtctggtctcaaacttctgggctcaagcgatcattctgcctcagcctcctaatgtgctgggattataggtgtgagtgaccatgcttggcctcaagcaatttctaaaataacacaaatcaagacaacagcaacaccaagatactgctttattattgccttgacatttgcaataatgacagtttaactatagcagtaataatgacagtcgacttgtggcagctta

SEQ ID NO: 6757 - DNA, 1587 bp, Homo sapiens
gagtgccagagaaaccttttagaaaccctcttaaattccctctttgaaatctttttcatgtctgctctttgaggactgtgaagagaggggagggtagaggcagagttgatcccaactcttaagattctttggcctaatgtttcacttgaaggcagagactgacgaagttcttttttgaacttcttaggacagttccctgtggttacttttttagtataacaattaaaaaaaaaaaaaccaaaaaacctactgatcattttaagtcctggcccttgctttgttttgtttgaaaagtgacttttaaaatggtgacttttatggaaaacatatttacagtttgttaaagttgtgtcatttctctttgcatgtttacatgtatgtgtatttaacttagttgtcttgaacctcataaaggtgttgtggtttttaagcagaggaaaatcttccttcgttttttctggaatagcagcaaagccatgatggagaataagcagaagattaatttaaaatactggttactttggctaatccactgacggtgagcttgcttatggctggagaactatgaaagtgtttccagatagcctgagagggaagcactgggaaggagtgtggcaagtctgtatgcgtgtggcggggtaggggggacagggttgtcttttggggaataggaatgatatttaaacgaccagctcctccatgtattatttggattttctgttaaaagcaataaacttgaagtaagacgtgtttacaggccactacaatctatctgaaaagcctcttatggttttttgcctcccattcaaaaaccacttacgtgattgtatgtgcctttcaacaaaactttggattcaattacaacacttgtaggctcagaagattgctttcaaatctgaaaactttgcaccttcacttggttacagtactttttaaaaaatggagatacggtcttgctgtgttgctcagactggtgtccaaaccctgggctcaagcggtcctccagctttggcctcccaaagtgttgggattacaggcatgagccactgtatctggcctggttgtagtacatttcaagggactggctttcccagccaaactgacatttttgggtctgtccagttagtaaaaggtagggattggggtggcaagagttgtacattgacacagttcttaagcacacagtgactaaaaggtactctactggcttttggagaaggcttagaacttggtcaatcgacaaactcctgattaaaggttgctgaattaaaaataatatgccatttctttgaaaccattcgatttcaccctatttagttgttccagaaatgtttgctttggttttaaccatgacccaactttatttagtaagtctaataattcatctctttgaaaccttttagtttccaccttattttttttttgaagagtgatttttttagatggtgatttttgtgtgaaataatatttacagtttgttaaagtggtatcatctctctttgcacgtttacatgaatgtgtattcaatgcatgttgtcttgagttgagaatttttgtcttgatttttccttgcttcaacttgatttc

SEQ ID NO: 6758 - DNA, 1048 bp, Homo sapiens
tattgaaactggaggaatgaggtttacttgtgtttcagggattgaagtggtactagaggttgtgttggattgctaagttcagagagccatcagaaattgttatgagcttgagtcacataaaaatggaatatcctttactgtgggtggcatagctttttagggttggcttcctaaacattttggggagaatgaatctaccagcagagaagctttcctttggcagtctgagggtgtatcttcctgaggcaaggccagacttgaggatattctaatcctccttcctgcatttttatattgcaatttcttgccaaacttgctgcctgaagagagacgatatctctttaagggtgcattttagttcatttgtgtgtcaggtgggtgggaagtaatataaaactcatttatggctactcagtctgcaaacatattggaaggaagggctgggctttaatatctgtgtaggatggaagtcatttttgagttatagtcaattcttatgttctgtaaaatccattagaaaacctgtacccgtatcagttcacatattctgcacctggctctcctgttcatggggaattgcttacaacagggaactcttaaaaccaagactgctgtttttgccccactactttcaggttagagcaggattccagtgtcctgaagtttaaacacattctgagcatcctctgagaatcattcccaattccaagcccatttccagacgatgagcagacttgaattacataacctgtagctgcacatttttgtcgtgaccacgcaagctcaataatgtctcccaagtcttgtagatcactttgaagctcactggattaatggtgttgaatctgtttaatccaaataatttgaattgcatcaggaaacctgcatattaacaagctggtaataagtgcaggcgttaagattgatcactgcttaagtcttcaagatcacatacaaggtctggtgtttttgaggctgtcgatgtactatattttttagattctttcttgatttcattctgcactcttgacatttaaaataatttaaa

SEQ ID NO: 6759 - DNA, 1008 bp, Homo sapiens
actgactgcatttccttttgtcttctaaaacccagagggtgaaaccaggacatttccattgtactgaaatttggcataaaatctggtgccaattgtacatcccaggggctgaaatcaggatatgctgaaattcccagtgtcctcgctctgctggttcccacttcctgacggcgctgacagataagtgccctgcatctcacagagagagaaaaatagatatttggaagtggtatcttttattgcctataaagttaaacaatgcacgaaacaattataaccaaggcagagacgtttagacaacatgcataaaaggaaaaaaacagtggaagagaaactttgctctaagatgaaatgctaattctaactatcgctctcagaatttatggggcaacatcacttagtacttcttacacttgcgttcctgcacatttcaaactgttcatatggtagtttttcttctgtatgacattctgcaattgtagagtttttctttatattacttcattcacaaatttcaaaattcacaaagtgtctatcaattaggaagaacaacttcttgtacttttctgatttgcagtctccttggttgtgacaaacctatttgttcttgtccctgtatcgttgatataatccaacttggcttctttggaagcaacaaatgctattttttttgcttcaaatccaatattggtttttaaatttgtggatgcaagaggctataaagaggtttaaaatatatgtagcttgaaaatattaatgtttttaaaaaatctcagagtcactttagaattttaaaattttcaagtaaggctgcaatcagatagatacttgtagactgtcttaggctgttttctgttgcttttaacagaattcctaaaacaggataatttttaaagaaaccaaaatttatttattatagttatgggggctgagaagtccaaggtcaaggggctgcatctggtaagggccttcttgctggtgggaactctgtagaatcccgaggtggca

SEQ ID NO: 6760 - DNA, 1060 bp, Homo sapiens
tagccaggatagtctcgatctcctgacctcatgatccgcccacctcggcctcccaaagtgctgggattacaggcgtgagccaccgcgcccggcccttgtttcttatattagttatcacaggccctatgggcaaagacttcccctatacttcccagcattgctccagcatgccctgcacagttctgagcttatggcagatacccaggacacacaggaggtgggctgggaagggcaggggagcaccggaaaaagaggctgtgatggcggcccctggggaggccagaaggagagcaccaggagttgccctcgctggcaggagcctggcaggaaccctgcctgtccttgagggcccatcttccttgcaagagtgttgacaccctgtgaggagggtgcagaaactccagccacagggccacagacgttctggacagtgtcatgtgaggtggcattggagcttctcctcttacagcctgacagagtgtcccttggggtggcaggttcattgaagacagcgtggaactggatacagaaggtgtcattttgatggccattccttcagctttatgccatgctccatagacagcctagggtacccctctctgtcccacttttagttcctcagtgatacagattgctaaaggcaactcaattgcaaatagccccgcaccatgtgacactgcctccttgaaaagtacttcagatgctggcagaggatggtgacctttcagtggtatatgcctgctctcagcccagccagacagaccactgccacagaggtgggagaggcaagaagagcctttaacttaagggcacttggcaaagggctgtctcatttgctagggttctgttatatgtcacttggtgtgcaagcttccaagaactacttggcttcctgacagggaacatgatagaatgtcaggacctaagctaatgtaaaatatgctttggccagccaagtcatgcacaggcaatgcaagaagccattggtcgttcacacgtctgcgccatgttagacgggggctccactgatggacttaacctttccagacccacgtgatga

SEQ ID NO: 6761 - DNA, 1025 bp, Homo sapiens
accaaacaaacaaacaaacaaacaaatttgctgagtgagatggtacacacctgtagtcccagctagtctggaggctgaggcaggaagattacttgagcccaggagtttggggctgtaatgggctcggatggcgaccgtgcactgcagcccggggcgacacaatgaggccctgtctctaaaaaatacataaatgaagttgaaagcatgtgaagtttatgattggctttgtgatcggaaggatgtgtcatgctttcccctgggtgttgggaaccttctgaaagaactgctgtcggaattcagggtcttctgtgcctgtccacccactagccctcatgggcgtaatgcagagatctcagaagggagagctctggatccagactgcttatgttggaatcatcttccacccacttactcactgtgtgccctttggacagttatttaaccactctgcacctcagtttcttcatctgtaaaatggaaattatggtacataccacatatgattgttagaaggagtcaatgagttaacctttaagtacttaaaatggtatctggcaattagtgagcaccatgtaagtgtttgcttaataaatattaagagtttggggtttggggtgggttttttttcttgtttttttttttgtttttttttttggttggcttaatacctttctaactgaaatttttgttgagataattgtagattcagatgcacttgtaggaaataatttaggccaggtatggtggctcatgcctgcaataaagcctcactttgggaggccaaggcgggtggatcacctgaggtcaggagttcgagaccagcctggtcaacatggtgaaacaccatctctactaaaaatacaaaaaatgagccaggcatggtggcaggcacctgtaattccagctactcgggaggctgaggcaggacaatcgcttgaccccaggaggcggaggttgcagtgagctcagattgcgccattgcactctagcctggacaacaacggtgaaactctgtctcaaaaaaa

SEQ ID NO: 6762 - DNA, 1044 bp, Homo sapiens
acgtttttgggctagttgggaacagtaagaaatacttcattgtgaagactgataatattcagatgtattaatccctagaagatacatggcccaaaggatcatcacccaggaatgttattagaatgaagcttacccatctcctgtgaggacctggctaagcagatctgtgcctggagttacagtcatggcagtgctcctgattctgaagatgggctatgggaagaggactttgggacatgctaagcctcctgagtagacacttgagccttggcatagttgggattagggaatggtaggagaccctcttaagaaagaaaagagtgttccctgactcaagagcctcatgaacctgggtcttgcccatgctgggtagctagaaatgtaaccatatctgcagttcttggaggtcaatgaaaaggttgtgtaaaggagtattgtttggcagatgtctctagtaccattgctgcaacaaataaagctggcttagcactggcctgtctgaagctgtgctctgcagtggttgtagtcatactgagctgaccacctgaccatctaggctcctaggaactgctagaagggccagacaatgaggacccaagagcttccaacccaaggtactcctagaagatcccattacttgacagcagcaacttctgcttctagaacttgctgagagacctgctgatgagagcagctgctgtcagctgtcaggaggagctgctgccccaagagagcaggaacagcctctgggagctgtgggtggcccatgcccaacaggagtcaccagtaggagcagcagatagagtaccaggtgaggcagtccttcctggttgtcctcagccccttagaattgttgagaaggggcaacatggtccatcttccaagaagaatccttccctagtagttgacctggttggagacccagcagctcagggtggaggctccagctggcttgaattgtctcctggtcttcaagtcacttgttggaggggtggcccagggaaaaaggattgccttcccaaatgatgttgatgaaaataatat

SEQ ID NO: 6763 - DNA, 1812 bp, Homo sapiens
tccggcacctactgtaagtgtaccaggtttcttgaggcagtgcctggaaaccttgatcctggtctgcctgcatccccctcaggaacttgactgcttgggctctgactgcatgcctaccatgtgtcaggtcttcgaggaggagtcccagtcctcaaggagtttaaagttttgggtagagaaacgtgtggattgccaagttactgcaaagtggactgtgataaacactgtcactgagctctattaagcaagtgacaccactccatgaacttggatgatcatagctctttcccatctacacagcaggttaatcattctcaccctgtgtaattcacaagaatgactcgggagtaaatgagaccaagaatgtgccagagttgagtgtactagtggtgctaacattttggaatcagagatccctttcaaaggctgatgaaagctttggactttcacctcagaaaaattactctggagcgtgcgcttatatgactttgcaaacagtttcaatttcatggtttttatgaacatcctgaaacccatccatggacccttgtgggggacctgtaggtcaataacgcctgtttcggtgcttgttccctgaaggatgttttaaaagtcccagataaattcacattactattattaggaatcctatgtttctcagttacttctatgttaaaaatctttctcctaaacaattatttgctaaatatcccttataactaggtattatttagattgatgaactttaaggataaagcaaaagcaagacaatctgattggccagatttgtcttctgttttgtgtacatgtataacataaaatggaaaacaattgcagaggtgcaggctttaaaaaaatacagaaacagagcacatcaacctggattttaggtgtgacatcttgcttggttgtgtatttcaggggctgcagagctcacaaagctattgcggggaggcagcgttaaatctgttgctcttgtaaaaccaattgtatggcatatagctggggtggcgtgtgtataggaagctgagagcattggtcacgccagttctctgagacgggaggcaggattgacagccacagcttggcctctgtgctgggggtggaatctgctgcgtgtgcagcctccttcctgcccccctcccccgaccccatcctggcaggcagtggtgctgagcagatggaccccatccccatcttgggggcagatgtgctgctgactgccccatctgcccactcctgctttacctctccctctctctgggcacctgcctccttgctcccctgacgcagcccctctgccggcctctccctctcagtggaatgttctgtcccaggaggcattgcatcactgctgaccagcctcctgctcctgatgactggtttggctctgaccacgaaagggctcaggtttgggtttcagggctgctgtgggtgtctctgtcctaggtggcctgtctcagagttggagatggtaaggtcatgataccacccagcatctctacagcatcatattttctccgtactagagcactttctaaggtctcccctatcctctcatggcatgggttactgttccaagcatcagcaatgagtgaggccctctattcacttgcctgtcactctcagggtagcagatggaggcagtattactctgcacccaatgagagtttcactggtgcatagcttggtgattaaccccagttcctctacccactggatatgggatcatgatcaagtgatggccctctaagctactcagtgtctttgtctgtgaggtgggactaacacccgcttctttggtttttgagg

SEQ ID NO: 6764 - DNA, 1056 bp, Homo sapiens
ctcataaatctgccttagttacaattctgtcattttctacgtgtgctgccatctttaaaaaataatttttcagaagccttttatactgtaatttgtagaaattatcatttctccctcttgttatctaggctaattcaccttagaattttctgagagtgtgctaatgaaaatagacattcttatgttagaatggctcctaaaggcaaaagctgcatttttttgtccacttcagagtttaggcttcttcaggcattttccttagttgtatgctgagagtgttctcttcagcttaatttgcaaaatgtccttttttgtgttaagtttactgttgtagtaagattcgaggtataaagctggtcttttaaaatccttacccttgcatttggcattagatgcctctgaatctcacattcatggaccttcaggtccatcttctccatgtgcaccttcagcacctctagagctctttcttgtctcctcaatcttctcacctatgtttttctaaaaggactgtgcatctcaaacaatgccactttttatcttaataaccatacttctgatagtgacatttttccctcccctgctttttgccttttctcgagagtatttcttatacatagcatccttcaatattcccatgttgcagttctcgttggtttatctgtttcatggtcatctccacttttttctattcccctgtcccctcgcccctgctatttctatggagaggttggtattgattttctttctctgacgcgctgtcagtcatggttatttctcagttcctccatgctctttcctatgagaattattttttatgaaaatgggcatcccttctccagcttcctctcagattccttttaaggatttaggggaaatgtttcctttctccttcagatgatttcaattgcccaccaatcctgacttctgacaaaggcaaaaccaggtttccaagggcaaattcaattcactgctctgtctccagcagttagggttcattcttaggttctgaaatcattccctaaatttcttttatttctcaaactccggttttgc

SEQ ID NO: 6765 - DNA, 1052 bp, Homo sapiens
gtgtctgcagagctgcgctccatctgcaggttctaggggggaatcttttcttttcccagcattgcgatgctgcattccttgcattgcttgattcatggcccccttctccatcctcaaagacagcagccattgtagcatctccaaatctctctcctgtcacatcaccttctctgtgtcaaatccctctttggcctgtataacacttctgactgcacttagggcccacccaaatctacccatctaggttatgagatctaaattctgagatcctcaacttaatcacacctgcaaagtcttttttgccatatgaggtaacactcacagcttccagggactatgacctgaatatctttgggggtcattcatctttcctcatcagaattatagatttgtcattattttctttcagcgtattaaagatattattccactgtcttttggcttccatttttgatgttgagatattttttagtctaagtatgatcccttttaagataatctgtatatttttttctctaagcttttctcttggttttaatcactgtgatcactggtaactacgatgggtctaggtgtacattccttaacatttactttgcttgggattctctggtcttttgaccacttagtgtctttcaatagtcctggaaaattctcagcttttatcttttccatattacctcattcccatccccattgtcctcttttgggactccagtcaaatatatgttgggccttctgacttatcccctatagtctaaatccactcttctgtgctttccatatttttgcttttgatgctgtattttgaacaatttcctgtgatctaacctctggtccttaattctctcttctattgtttttaatcttttgccaaacacttcaataagattttcatttgtttttaaatttttcctttctagaagttctgtttgattcttttccaaatctactaagtcagtttttacagtttttggtgctctgcagatatttgcaagcttgtttactttttcatgtggttagcaaatataaacttactgagtttgcatctg

SEQ ID NO: 6766 - DNA, 1049 bp, Homo sapiens
tctacctcctgggcaagaattgggctatttgaagcagccactggctagtcccagcaggggcagagggaggggcaatggcagggaccggctctgtccatccagcatggatggagattcggctccagcaagattgccaggcgaaaacagagatgaggttgccaatgctggctcagtgtgctgaggattagaggaggctcagctgcagagtctgtaatcctggactagcctggatttgtcattggtttaatgatgaatctactactctctttgtacttacatagcccaagaaaaaacaatgacctagtaccaccctgaaaggtgtaagaaacaaagcaaaggcaatccaaatgttaaattggaggccacagagccaagcccacctccatggttgagcagttactctgcctccttcctttggtcttacctgactgtctgcaattagctcagtggtggtggggggcacaggggaaggctgtgagcttcaagccgtggcatgtaccaagaagctatcttgatgttgatgaccttggtccctctgatggacaagtttgagatcataaaatgagtacctgtgatgactgaacaatgtgctggcgtgttccatccccttttgcaaagaaccttcccagaacataagtgtgaaaacccacctgaatcgggtgctttggcttcatgtgtaaacgtggcagtgcttcacgaagatccctcccatgcacatgtgcattgcccttactcttagcacctggttctccaggagaggaaatcccttctcccttcttgggaaaggggctgtgttagacactttcatctgaggggttcattggaagacactataagctacatgggtcaatattagcccagctgaattccatcatcttttttttttttttttttttttttttttggagacagggtatctgttgtccaggctggagtacagtggcgtgatctcaggatctcagctcactgcaatctctgcctcctgggttcaagcaattctcctgcctcagcctctcaagtagctgggattacaggcactaaccaccacg

SEQ ID NO: 6767 - DNA, 1070 bp, Homo sapiens
aaaacctcccacacatctagtgtcagaagtggttcgtgttgtgagagtataggagacgctgaatttgtttgtgcctatattcagacaggaagacaattcatgttacttttggatgtgaaatgaggacaaggatgaaaatgtgtttggcacaaatgtaaacacgattcactctgtaggcaattgttaagcctgcctttttcacttaacattagagcatatagattttctcatgtcattaaagtggttttgtttttgtttttttgtaacagagactttggcaaattcaagataatgtttaccattggcaatcacggggaagggtgaggtggggggagcacgtaaccaagggagatttatcgtattggaatgctctctgtcttaagcttggtgctgtgtactcttttttgaatgtcctaaatgttacataataaagtagaaatttgaacaccaatagtaatggttacttaatattttattatgttggtgtatcataatttcctcagttcaaatcccatctcgctattgttggatatttgtaattttcaactttggactcttaaatagtatagtattaagcatctttgggtatcaaattttgtctgcatttgagctcattttctcagttttgatttatataattgaattccagggtcaaagaatatggctataataaatgcattttgttagactatcttttaacaaagctgtatgcgttgattatcattgacattgtgcctattctactctctctccaacacggagtgccattttaaaaaattgctattttgctaggcaaatatttgttttgaatggttttagtttatgtttctacttactagtgagattgaacgttctgtcatataatttttccattggagtttttttttttttttttaatgtgtatgtgtgagcacaggtttttgcagattcacttgtatgtgggaccagtgtgggaaggtcttgtttatgtgggaggggggaccacagataacaaagaacagccccttgcccccctcattgaaaaccagctgtgcatctagacctctgtcttcccacagtgccgccaagct

SEQ ID NO: 6768 - DNA, 1034 bp, Homo sapiens
ccccccaaaaaatgtattgcagatgcagtgaaatattttgaagcaataacaattataacaaataccatatattaaaccctttctgtgtgccagcagtaactcttatgaggtagatattattatgattttcattttacagatgagaaaactgaggcccagagagatgagatgacttactcagccccttctccccgccacctccccagcttgaaagtggcagagtggagattcaaatgtggccctgaccctttcagagcctgcaccatttaaacactgggctgtcctgcctcccatctctcatcctgtccaaaagcataataatgtccttgcagagtgtgagtcacactgcagcatgtcattcacctctgtttgggtcacaccatccaagtgcatccctgtgacccagataggacatgccctctgacctctagtcttgggaggggactagctgacacggggaggtgctcaaggattttgtctctcatgaaccttttctaaggctttgtaagtcactgtgagtctacctgccagattctcccaactggatatgaaataggtggggtcttcctgggggaaaggagaaggggtgggaggtgggaggtaggtggtgggggcaagggtccattgagaggggtagagggaatccaatttgtgagtctgggctcctgttcaagatgggcatgagatgtatggatgaggagctgatggagcaaaggctggatggggaggcaggaacagtgggaggagcctgggagggagagaggaagggtggagggatgtgtctgcaggggtggtccagcctctgggcgctctgtgctccctgcctgaccagtgtctctgtgctcatcctttgccttcccatggactcagttctactttggtcacttttctttccttctgacctaggactgggagctgcatgtgaaagggaagctgcacgctcagaaatgcctggtcttctctgaaaagtaagtgctgttcaggaggacaggctcatgcgtaggctcaacacatattcactgagcatttactgt

SEQ ID NO: 6769 - DNA, 1544 bp, Homo sapiens
tcttggctcactgcaacctccacctcctgggttcaagtgattctcctgcctcagcctccggagtagctgggattacaggcacctgccaccacgcctggctagtttttggtctttttttagtagagataaggttccaccatgttggccttgaactgttggggtcttgaactcctgacctcaggtgatccacctgcctcagcctcccaaagtgctaggattacaggtgtgagccaccgtgcccggccagtctgtttctttttattgttgaggagtattgcgttgcatatatggatacatcacattctgtttatttattcatctgttgacaaatatttgggttgttttcagttcggggcctttacagattgtatttgttaatagtcttcagttagctttgagattcattatctcattggtccccgaaggaagagtatggtatgaggttctgcatttgacaggtgaggaaactgaagtccagagacttacccaggatgacatagcaaacgcaggttagaactcaggatttctcagcctgggcaacatagggagaccctgtctctgcaaaaaaataaaataaaataaaactagccaggagttgtggtgtaaatctgcagtcccagctacttgggaggctgagggaggaggattgcttgaacctgggaggagatccaggctgcagtgagccattattgtgccactgcactccagcctgggcagcagagtgagtgagaccctgtctcagaaaaaaaggaaaagaaacaaaaaaaaaaactcaggatttccgatctcagatcactctgttctccaggttcttccagttcaggcagcaacacagtgtaggaaaggctacatttgtgcagaaactatgaacacagtctgtggaatctgattccctgagtttaaatcccctgtctactacctactggctggatgacaaagagcaacttatttaacctctgcttggatttcttcatctgtgaatcagccatagtaataggaggctactacgcagagttatttcgaggattaagtgaacaaatactggtaaggtcttagtggcttccagtgggaggtacttaataagggttgtctattattattattcactcatgaaatatttaagacctattatggctcctctcaccggggctgcataaccctttagcctgcaggactggtcactactggcatggagacttctagggaggtgagagacaattttttggctttgtcccatggaaagcatagagctgaaataagggatgtcaaggactgggctcccagatgggaggaaagggaggccagtcgcgttgctcggggactgggggtgggcatggctggggaagtacactgcactctgcacttgagatccaggccagttctgcatgaccctggccagcgcgagcctgccaaggcttgctctcagtagaaacaaacagcatcgcctgcaaagtgcaagctccctcctctatccatcccagctttactaggatgacagagttataattacccgtgccatgagctgttattagaagccaaatgca

SEQ ID NO: 6770 - DNA, 1049 bp, Homo sapiens
tcttggggtttctcctcccccaggcttctctccccctagtgctgcctggtagctgcctggtactgcctgaacttgcagagcaggggccagggaagaaagttgccaccaaactgtggagccgggttccccaggtggccttggggagaggttggggttcaagtgagaaagccaacatttaggcagttattaacagcttctgtgatgaaatatttaacacgtgtctccaaaccagtatttttgagcaacaggcaaaatgataggtgattcccctaaacatcacttacagcactattattcctatttcacagatgaggaaactaatctcagagagggtaaacagtgtgcctgaggtcacacagcataagtaaaagagttgggtttgcctctacattctattttctctccatgacactgtggcttccaaggtttttttttgtttgtttgctttttgttttttgtttgtttgtttgtttttttgacagtagaagtctttgttcaagtgaaatcggttccagaactgacagaagatagctctagctacactgctgggggctttggctaccagctcaatccctgcttcagggtctgtggtagctcctagggcatctgtaccccttctggggatcccaggacagggactcagaggactcaacagggggcttaataaaaaccccagggcttctttcctggtaccacccagctggttcatcctccagaggctgggacgggactgagagtgtggctctgatcaaagctctccttttttcccagctgcccctctcctatactgcgggggtctcggctccctgcagagcagcagcagagggaaaactattttgtaacaacgcaggaaggaggcagaccttgctgaatgcgcctctgccagcaccaacagccaggagccaggacctgtttgtgaggtggaggggagaactggcccccacagcccaagctggggccacttttccatcctttgcagagaggaagggaaggacactcaacctccctccgggcacctgggcctgagtgaggccctctcacttctgggg

SEQ ID NO: 6771 - DNA, 1029 bp, Homo sapiens
tcacgaaaaaaagaggacagagaattgtaattagggtatgactaaaatggcccccccaaaagaggcctacatataggttaattatgtggaagaaaatatttggattggagtgactctgggtgattttttccttccttttatttacttttttttctgtaaagaacataattctaaaataaacaaacaaaaacgagagaattcttcgagagtcccggtcacagcagctgcagagagaggtacagtgtgaagaaatgaaatccaacaagtgaaatatcagaaatgtcagaaatcaccttcattgttcttggaaggaggctgatagtaggagaacaggccagcggcaggccatggaatggctaagtgcttaccacaccgccgagtccatcccttacattcacaacaacctgtgaatgaagtgggtgtgagtctctttgtgactgttctgcaagtgaggaaactgaggcttggagaagctcagtaaccagccaaggtcaacagcaagtgaggggtggagctcgtggctcccatttctacctgatggctgccaggacacaggggcctgcctcccatgccatcctaaccctgcgtgtctatcccccatcgtttcccaggggtggagttcgtggttcccaggactggcttttattgcaagctgtgtgggctgttctacacgagcgaggagacagcaaagatgagccactgccgcagcgctgtccactacaggaacttacaggtaaaaatccactctccttgcccagcatgccaggggctccccagtctccataaccgagccaggtgtctggcgtccttggccttgcttgcctctgagtctagctcctacctgcaaggcctactccaggccacaggttacttgccattccccaagcacaccaggctgttttctgcttctgtgtctgtctccttccactacatggaaaacccctaatcttcccatagacttgattccatcaggctgctctcgacatggtggctacctcctgtgttgctcctagcacatgtctctacttt

SEQ ID NO: 6772 - DNA, 1099 bp, Homo sapiens
gactgtatgtgcagactttgataccaaaatgttatgaaaagtcgtgattcccgctgctctttctggtactggagggtgggtaccttcaggctgtggggtctctagcctgatattccattgaaagggtgtgggataaaggtgctgggggaaatgaggctctgccacagccatagagaggccctcgggcagttaagaagggagcctggagctgttttcatgagcagagatactctcctgaaagcacccttcatagcttagcccaggaaaaataaaacaaggaagacaggtcactctcccctaggcagttcctgttgtttctgttcctgaccttgggcaggcagactgagaagggactgtgtagggttttgttttgttttttttcattttcctttttatggcatgtgagagcatactgtacattctgtcctctgtactaatggaggaagggcagagagattagttcaaggctaacattttatatcaggtaactgaggcacacaaagggaacaaatgaagaacataaaatgatcagtgtaaacctgaaagcacgcagtcattggcaagggacaggctcatgggagctggtgagagagagcagttaaggcaagcaccaggggaaagcagaccaacttgaacagatgtgatgcggagaggttggaagaagcaagaaacctgaactcatcatcaggctattaaataaaatttataggaggctgttggtttggactgagctcctgcaataggcccaacagaccaaaacaaaagggagtcactcatgttgaagttctgtcttccaggaaatcaggagagagagagagagaaagaatagccaaatccccaaacaggccagttttaaccagcatgatgaagtgtccttggttttaacctttataaggaaagcagctttgagatgaccagtctggtttttgttctttgtgtctgctttcctcagcccttttctgtctataaagccaacctcctccgctcagctcatgggaacactcattctattttatagaatgacatgttgcccaattctagaatcaaaaataaaggccaactaagatcttcaaagtaaatttgttgtaattttatcttt

SEQ ID NO: 6773 - DNA, 1036 bp, Homo sapiens
tactaatgtgaaaggaaaaaatattaggactgcaaaaataaatgccgcttgaatattatctgtagtgcttgcttttgcattactgtagtagaatgcttttagctggttttaagctgctaattagccgttcgtagccgaagaatgaatacaagtaatcctagttaataaatggccaaagcttgactccccaaaatgccagagcaatttatgaggtatatttcaggaaatacatatgtatatatttcgtgggggagtggagggtctgtctcttagggaatgtcttggcagttgaatacttctgattgtatatttcgtgtaacacactggagaaaagaacagtgtttaatgtcagccttcattttcttctaacttgtatgtatagttttctcatcgaaaattcatttttgtaggttagtatgaaggaaatagcgtttggattttttgctttatattttcttgtttgggccaattaagggttgttaaataaattggaaaaaatcctactactttaaagagcgtaaaaacgtggaacatgtcttatctaaactcttaaaacgtgtttgttgctgtcaaatatgacttgagttcctgatcgggttatcattgcctaaagacacaggactattttttttattaagataactttgtttttatcttaataaaagagatgatagtcatttcctgacagttttgtctgacggaatgccttctgtataatagtttaaaataattatttttagtgtttggaaaacagcatttaaaagtttgaacagcagaagtctgttttaagaagcttctgttaacccttgaaaagaatcttcctgtgggatattaaaattttggattgaacttgtgcaaacagtactggatttggaaggtctggattctcatcctggctgttccactaagcagctgtctgtccttggacatatcacctaccctctctgaatctgtttagttgtgtgtaaggtggaatacctacccgaaggtttttctgtaaggtacattaaataatacatgtacaattctttttgaa

SEQ ID NO: 6774 - DNA, 2754 bp, Homo sapiens
aagaattgtaaagatttaaacacatgtatgctttttataggttggtgaaaatttttggtttcaacatgtcttaaaacatattaaagcccatgcacatagacctgacatgttataattatctttaggcatatagaaaatgatttgagtgattcagctctgatttgcgttaacaataatgaacaaaactgtggcccagtggtagctaattcagtagcctttctgacttaaagagctttcagggcaaagccaagtgcctccacttgatctccatggaatttgagtatgaaggacactctgctaggtgatggggatacaaagaaggacatacagtctagttgtggtttctcctttgaagcttatgacttagttggaagaaaaagactgctatataaaaagaaagtgatttccatgacgtgttgaatgaatagtatgtgagcaattagtgttcctgtacctagagttgtaagggaagttttaatgcagggagtaagacttgggctatatcctaaaggattttgataactgaaaataacagtgagggcgacattctactgggaactccagtatgttgatctctttcagaagaatcaattttatataggctggaagatttacaggatggtaagtaataggagaaaagtttagggagatgaattaggactttgagatgttggcttttcttgaaagcaaactttgtcttgaggcagtaaagcatcagcagttcagctcaacaatcatatgcgattatttgctaaatgcctttcattctcttttggattactaatagttcttaagtgtttatacctagttatgggacgtttggcaaatcatttaaacattctcagccttagtttccttatctgtcttcaatgttataataattaactgccaaacttgtgcataaataaatgatagagtgtctagcacagtgcctaatagtaggcattctataaatattagtttatctctcttctcaagatgctttgtcttttcttaatatctccaattagctcataaaagtctaagggttttatatttggtgttgctgttagcatagattttatgatctaaacgtgaaataacatgcttcttttggtaaaaacaaacaaatttggtttgtttttggtaagaaacaaacatgctttgttaaaattcagtgccttggtttactttccttgataatgtgaaaagtaatcttatttagttgtttattagattgaagtagatgaaattcccaatatgtgactgtaatttacctacaaaaatggtaatgtcatgtgattcaacctaatctaacttaccactatatctataaaacagtagatacttaaaatacttagaatttttttcttcatttttctctttaagatcctgataacttaagtgactctctcttttccggtgatgaagaaaatgctgggactgaggaaataaagaatgaaataaatggaaattggatttcagcatcctccattaacgaagctagaattaatgccaaggcaaaaaggcgactaaggaaaaactcatcccgggactctggcagaggcgattcggtcagcgacagtgggagtgacgcccttagaagtggattaactgtgccaaccagtccaaagggaaggttgctggataggcgatccagatctgggaaaggaaggggactaccaaagaaaggttggtatatatcatgtccaacaaatggaagataaacaagtggaaaaaaattgtctggttcttgtactacactttccttgttctaggaatgagagagattcaaaaagtgaaaatgtaaggctttacagtttgtatatatttttacttagtaataatgtgagaaccatctcactttttctttaggttgatgttttttcttgtttgagtagatttaattttcttgagcagaatgttaacgatttatttccagcaaaatatacactgatgtttttcactgttacgagttttacgtatattctctaagtttgaaaggagtcagaaatccatcatacttatttaatataattatgtccattactactactaataaatatacatttgattgataacgtctagatctgaattttaatgttttcctagatctcacggtgagttctctttagctctttattttgggttctgtagtagattggtctgtttcactgctgtttctctagtacccgaaatagtgactagtacactgtaggcaaatatttgttgaataagagttttctgacgatttcatcaccttctgaatggtgggaacttcaatttatagcctaggtttcttgtaaaatgtttttgtgatctgtcaaaaattagttttgttaaatgcctctgcaatcatgttttatatcaaaatgaaacctggttgtcagattctgttttggtctgatggcaaggatatacttggtacaaaataaaaacctccaaaaacagaaatgttggtgacattgtaaaggttctttaaaaaatagtgtagtacattagtccttaaaacatttcagtaagttgatgtagaaaagcaactttgaaaattggaattgttaagcttcttttggttgttttgtatttagaaaacagaattttcagggctgttaatgcttaaaagcagttagaattcttttctatatttataacatattgctagttgtatggtttaatgtgtactttaatatttaaagagtactgtatttgaccttaaaatatttgatggtggttactgtccttttttgttaaataatttttcccttgttgagtttt

SEQ ID NO: 6775 - DNA, 1069 bp, Homo sapiens
gatattagattccttttaaatattactgtttagaatggtaactatataatacattttgttttggggacatgcgcatctttcttttagggataatgctgaaaatgtaaatttttaatagattgtgaagtgaattttttattttttttaatggaaaaaatttaaagtagaatagtataatctgcttgtactcctctcttagctttacaaacttaaataattacaaactcataggcagtcttgtttaattccatttactctccgtcttctattggcccctttgccccaccctgttttggattattttgaagcaaatcccaaatgttttgattatgttttttgaaaatttgtctttgcacaaggtgagacacggtgatggaaattttagacaggaaaacgttaagagtatgtgttaggttgtttttattgtgtgttgtatgtatgtatttaagtgttttaactaatagatatggaaatatttctaagagaacatgaaaaatatgaaactagtaggattcaagtactgtagaatctttgctaaaaatgtattaatctttcaagtatatgtttttaggctgaagccagtcacaagttgtaaatatagcagtcccctcttatccgtggtttcactttccgcagtttcagttacccatggtccaatgtggtttgaaaatattgagtggaaactttcagaagtaattcataagttttaaattgcatgccattctgagtagtgtgatgagatctcctgctgtccagcttcatccacctcatcctgcccaggatgtgagccattccgttgtccagcgtgtatccgcaatgtatacactactcgtgcattcgtcacatggtagctgtctaggttatcggattgagaaaacagtatttattgggttcggtactatctgtggtttaaggcatcctcggacggggcttggaacataccccttgtagataagggggcactacatttcagagcttttttagcatggggagagaggaatggtttgatgatggatgttaattttctttttgaaatttcaattgaacagtgcttttttccttagagatt

SEQ ID NO: 6776 - DNA, 1053 bp, Homo sapiens
atttttcaactcttgtcctctttcctacctccccacttttgaaattcccaatgtttattgttcccatcttcatgtctgtgtgtacccaatgtttagctctcacttacaagtgagaccatgcattatttggttttatgtttgtgataattttcttaggataatggcctccagctgcatccacgttgctgcaaaggacatgattttgttcttttttatggctatgtagcattccatgggcgtatatgtaccacattttctttgtctaatccaccattgatgggcacttggattgatgccatgtctttgctgttgtgaatagtacccgataaatatacaaatgcaggtgtcattttggtagaatgatttattttcctttgggtatacacccagtaatgggattgtcgggttgaacggtaattctatgttgagttctttgagaaatctccgaaccactttctacaggggctgaactaatttgcattcccaccaacagcgtataaaccttcccttttctcctcaaccttgccaatgtctgttatttcctgactctaataaaagagaacagttgtaaaacactgtaacaaatctactttctgtgcttctcacgattcaaatctgacttcagtttaaccatttgaatatttggccttaaatacaaattgatgacatagtgatggattgtgttttatgacatttattttatatgggctaacaattctgcatgtaatttcattgttgtagggttatgagagaatttacaatgaaattccggacattaatctggatgtcccacattcatactctgtgctggagcggtttgtagaagaatgttttcaggctggaataatttccaaacaactcagagatctttgtccttcaaggtactttatttaaatactactttctcaatgtaaaatagtggatgagatctttgggaaggttaactgctaagttagtttatcgttccctgaagtcactgaagaacgtgactcttgtgagttcatggagaaagaagggcgaagcttgttttagcccccttgtaaatctgtacag

SEQ ID NO: 6777 - DNA, 1029 bp, Homo sapiens
ttgagatactgtgctttgggagtaaaaaaagaaagttatttctttgtcttaaagaatttttaaaaaattagtcatgagacttattcatctttccagggaacatactgattggtcttaaaagactagacagttaagtaaaaggtggctggaacatctatttttctacaaaactggaaaaatgaacctggttctagaagaatgtacaccaaaataaaacatgtgaagcagtattgattctttattgggagtacatttttttaggtctcttaaactttaatttcacacagtaaattttgaatctcataaggaagcatatttgaacctagtcaatttaatcttagtgttcccttgaaaactttttttccctacaaaattttaagtgaaaaatacaatagtaaattaagattacactggggaaaaaaatgcaggtatcactttactccattgttatctgacctagagcttaattaagttttagaaatatgtaataccttccatcattccatcatccttaaattctgttaccaaataatggctaatgttacaaaaagttatactccagagacccaaagcttgacatttacctaatgtatgagaaaatattaccaattaacaataaagaatgatcatatttttaacctcttttacatagcctaataactcagcaaggcctcaacgtctgtgctaatttaaactgccaaatattgactgcagcaaacaagaattatattcagaatttatgagggtactgttaggagtatactgcttacaggtttagatatagtctgttagaattaaaaccaagtttagtgttcatatttacctcatgggctttatcaagcccatattacctcagcttatatatagttaccatttttaggtttttaattgtttgacacttggatgataaatgcagtcattttattctcaagtgcttaaaattaatgtaattaaaagcttagctgactacagaataggtgagggtttcttaaaaatgagatttaagggctgggcacggtggctcatgcc

SEQ ID NO: 6778 - DNA, 1021 bp, Homo sapiens
caaaatgaattacacattgataaagcaattgttgaacataaaagttattggccatatatctgttaataagaagacagctttattttctcaattagttcacgtatatacatggctgaaatttacttattgctacaattctattcttcttccttttttttgagatggagtcttgctctgttgcccaggctggggtgcagtggcacgatctcggctcactgcaacctccgccacctggattcaagcaattctcctgcctgagactcccgagtagctgggattacaggcgcatgccaccatgcccggctaatttttgtattttcagtagagacagggtttcaccatgttggccaggctggtctcgaacttctgacctcaagtgatccgcccccgttggcctcccaaagtgctgggattacaggcgtgagccactgtgcccagccctattcttcatttttgtagatgtaaacactgagatgaaaatgggaaaatttttttcaatctttgaacttacgttatatgctaacaatcacgtagtgacctatcatcaagaaataattttaaatgaccagcagactactcaattaggtattccttcagtattgttgaaagctgagaacagtctcttgacttgcagaagcactacttacttaataattagcgaagcccttagtctttcttgagttaccagtgtttccttgtctctgtgtgtagctcctaagagatgtttattttctggagcatttttgtcatagtaagattctaccaggctagagagatgcctttccttcatacatccttagaaaaataattgggggactggtgcggtggctcgcatctggaatcccagcactttggaaggccaaagtgggaggatcgcttgagcccagttcaagaccagcctagacaacaaagcaagacctcatctctacaaaaaattaacaaaaattattcgggcatgatggagtgtgcctgttagtctcagctactcgggaggctgaggtgagggtactgcttgagcctg

SEQ ID NO: 6779 - DNA, 1081 bp, Homo sapiens
agaatatttttaagtcctttagcttaatgaatgttagttctggaataatctggtattctgaatggcatcttgtttttcaagggtagtgtccatttattttcctcacttaattggtcctatatgttaaaagaaatatgtttgaaaaattttgatagctagtgggcaagccttcttctgttctctgatttgaacatattcttatattcatttgcctgagtttcattttacctgtggcacctgagagaagctaagtattttttccaccccatttcttttatgtgactgactgtatatttcttagtctcaaatataaaaacacatctaacagcttcacagaaaattttaatgcttggtagattattggagctttcaatttttagcctttgttactctagttattgatcatttcagtatttttaaaatctcaattacatttttaataatttataataataaaatttgatcaatgttttaatttgataatagtgcctatgtttactactaaataagtgtactttgagcagttgaaacactgtgagatattgatagatatttcccaaaaagggttttgtgatccaaataaatttgggatatcttctatgtaatataataatgtactttgcgaagaacgtatagaacactaataatttctacttaaaggaagagtataattagattggaagcacttcttattccaaacctatttgatagtggaactaaatgttgtagaaatacattttgggaaatgctgagaatatattatagaatattttcagatcagtgtgttgttaacggtattccagtacatgtatttgcatgtcagttgctttttaatagggataaatgataattgctgtcccaggatgtaaatataatcagaacatttaactgtggtagtatgttttctataaatctgagagttttttgacatggaaattttgttaccattgattttccagactaaaagtaatttttgagtgcctcctatgtattaaacatcaaaaattgatcttctttggaactactttctgttaagtcttagcaggaggaattttggaaatcttgtagccctcccgactta

SEQ ID NO: 6780 - DNA, 1023 bp, Homo sapiens
gtttgttttgtactttgaagggttctttacccacgtgtgattttgattcatcatacattggtcttctggctctttgagttacgcagattttctaaatgttgacacattttatcatacagtattaaataaagacatttgttaataattccactgatttcgtcaggaaggtctttaaatattgggttgctttaaagttcatggtggtgaatgcatgctttctaaagttctaatttttatttagggtctaactttatcactggcaacaaatattctgttattttgtttttgtttttgtttttgagacagggtcttgctctgttgcctagactggagtgtagtggctcagtcgtagctcactacagcctctaactcctgagctcaagcaagtctcccgcctcagccccacaaggtgctaggattataggcatgagccactgtacccagctcatttgtttttgaattaacaggctcatttcctttattttcaagaaaatgtctgccaaatactagagactgaagagccgcacgttctcctcaactggctcaggttttgataatccataccaggctacctctctgtaataacatcctcttggtctactcggactctttcatgtatatttgaattactttctagtgtccttccatttcaacccaaagtactcactttatttctaatagggcaggtctgttagcaatgaattcttctggtaatgctttcattttaccttcatttttgaaggatagtttttatggatatagaattcttgttagacagtttaaaaaaattcttttagaactttgagtatgtcctcccactgccttctggcctctatattttctgatgagaaattaaatgttaatacttagtatctcttgtacatgatgagtcacatctcttgttgcctttgttttgagttttttcatcctcagttttctaagatgaagaattctttctgtctgtcagcagtttgataatcatctgccttcatgtggattctctttgaatttatcttcctcgga

SEQ ID NO: 6781 - DNA, 1029 bp, Homo sapiens
caccatgtacaaaaatcaactcaaaatagattaaagacttaaagagcgaaaactgtaaaattaccagaagaaaacaaagggaaaagtttcttgacattggttggggcaatgattttttggatatgaccccaaaagcataaggaataaaagcgaaaatagagaaatggtattgcatcaactgaataagcttcggcacagcaaaggaaatgatcaacagagtgaacaataattgacagaataggagaaaatatttgcaaaccatacatttaataaaggcttaatatccaaaatatatttaagaactcaatgatacaaaaacaacccaagtttttaagatgaacaaaggacttgcattgatggtcttcaaaagacaacatacagtgtacatcaggtatgtgaaaaaatgctcaacgtcattaatcatcagggaaatgcaaataaaaaccacaatgagatgtcacctcacacctgttagatgtcacctcatacctattatccaaaagacgataataagactgtaagtgttggtggggatatagagagaatagaactcttttacactgttgtaaattggtacagccatgtactgaaaaatagtatggagtttcataaaaaaattaaaaagagaactaccatatatgatccatcaatctcatttctttgacttcttggtacgtatctagaggaaatgaaattattatattgtgaaatgtctacgttcccatgttcattgcagcattgtttacaataaccaagatatgaaatcaacctatgtcttcattgatggaagaatacacacagaaaatgtgacgttcagccttcaaatctaggaaatcctgatattggtgacatgatctgatcttggcccactgcaacctctgcctcccaggttcaagcgatcctcccacctcagcctcccaggtaactaggattatagccatgtctggccaatttttctgtatttttggtagaggtgggatttcaccatgttggccaagctggtcttgaactcctgacctcaagtgatcc

SEQ ID NO: 6782 - DNA, 1033 bp, Homo sapiens
acctaagaccaaagggaaagatgccaaagatggaaagaaggactccagtgctgcccaaccaggggtggcattttcagttgacaatacgatcaaacggccaaacccagcacctgggactagaaaaaaatccagcaatgcagaggtgattaaagagctcaacaaatgccgggaagagaattcaatgcgtttggacttatccaagagatctatacacatattgccatcatcaatcaaagagttgactcaattaacagaactttatttatacagtaacaaattgcagtccctcccagcagaggtgggatgtttagtaaatctcatgacactggctctaagtgaaaattcacttaccagtttgcctgactctcttgataacttgaagaagctgcggatgcttgatttacggcataataaactgagagaaattccttcagtggtgtataggctggattctctcaccactctttaccttcgctttaatcgtataactactgtggaaaaggacatcaaaaacttgtcaaaactcagcatgcttagcattcgagagaacaaaattaaacaactacctgctgaaattggtaagaggccttggattattattatttgtagtatttgttatgctaaataattttgagtgctttctcatatcaaaaaatgcctgatacttgcctaaaaacagcttatttctaaattacaacttttttatggtttactttattccattttcagcactgttaatagtacatggcttgaaattgtttcatagacttaaaaagtgagttagaaaatagatgtaattagatctttcccacacaaacctaatctttaactttcattggagaataagtaaatttaaagaagaaaagatgtttgcctaattttcaagttgttgctgtgtttaaagtatctgttgatacaattttattagatatatgaaaactacattttctcattctctgacttttccacctttatctgaaagatgtttaaattcacatcactttctacctaatttaccacaaaaggttgacaa

SEQ ID NO: 6783 - DNA, 1042 bp, Homo sapiens
taaaggctggtagtaggagaaaaaaatagggaatataaacgcgtgaacatgtcagtaaaaaattaaaaattagttctggcatttttaattatggaaaaacattctgaaacatttggaatatagtaatccattgacatcagttttgaaaaattgataaaggtattgcctctgtgggccctttttataagatttgtaaaaattgtcataagaagttgattatgaagctttttaaaggatgttttctttttgtattaaaggcaatttattctgagaaaaataaagattatatttttgttgctttcagcattggtcttataatgagtgataaactttctgatttttaggttttgcagcttttcaaagatatgatattctgtgggtgttttaatattttgtttagctttgaaaaaagatgtggtttaaattttaggtatgacttgttacatttaactcttaactagacaatccaaatattaattaaattttggtttaatttaatgtgtttagaaaatttatgataggttttctcaagtaatatactgtagagtatgacttactcacgagatattaaaatattcccaggaatttctgggtgaaaatgttccattccatgtcttcagataggaatgtggttgttgaatgacttgttttagtgtcatatttagtcaaaatttgacctgcatgttatggctcattgtggaatagaattataggcaattggagaaataaatgctgaatttctacatagaaatataaaagttacttcctgtctttgttcttgttgttttgtgtatgtgttacactcagtcctaaaagtctagctttaattcacaagtctctaaggactttttccatagcaatgctatcaaattacctaggaattaagaatatacatatatgttcttgagcatatagatagcatttttactaaaaagtgaatgtatcttttaaaattggcatattttaagtaattatgtggcttatatttgtggctacctaatcttttgacctttattcctaaattgtaattttaaaaacagcc

SEQ ID NO: 6784 - DNA, 1111 bp, Homo sapiens
ttagattgtttgcccatttttaaatcacataatgatgattattgttttgctgttgagttcttgtatattaatctattgtcagatgagtagtttgcatatattttctttcattctgcaggttgtctcttcagtctttgtttcctttgctctgcagaagtttttagtttgaaataattccatttgtctatttttgcttgggtttgccctacttttgaggttttacccataaaatctttgcccagaccattgtcctgaagtgtttcccctatgtttcttgtagtagttttatatttttggttcttgacatttaagtcttcaattcattctgagttagttttttgtatatagtgagagataggggtctagtttcattcttctgcatatatatatatccagctttctcagtaccatttcttgaagggtctgtcctttcttcaatgtatattgttggctcctttatcaagtatcagttggctgtaaatatgtggatttatttctgggttctctactctattcaattgatctattgtcttgtttttatgccagtactgtgcattttggttactctaactttgtgtatactttgaggtcaggtagtgtgatgcctccaattttgtcctttttgcccagtattgctttggctatttagagtcttctatggttccacatgaactttaggatttttttttcttttaagaatgtcattggcattttgatagagattgcattgaatctgtagatcactttgggtagtatggatattgtaacaatattaatccttttaattcatgagcatggaatgtctttccattttttggtccctttgaatttctttcattgttttacagttttcatcatagagctttttcacctccttaaatttacatttaagaatcagcattttaaaaattacctatttgactcatcaacatttattgaaagcaaaatcagtttcttactattgtgcaatatggaggtgttatatttgattataagtcaaatgatgtacatataactgacacatacatgtgtatataattaatatctatatataaaagcatattgaacagagtcagcaactttttcaaaaagttgaccttaagagatttaa

SEQ ID NO: 6785 - DNA, 1035 bp, Homo sapiens
gactagggttttttttgtgtgtatggacaagttttgaatttcgaattcagtttatttaatagacacatagttattcaggttttctatttgttctctattgaaattttgtagtttgatctgtcagggcgtttgtctattttgtacagtttgttgattttgttggcttaaagttcacatttttattatgcttttaatgttccatatatatatatacactatatatatatatagtggtgttcccctttcattcttgaaattggtaatttgggccttctctctttgcttatcagtttggcttgatgtgtatcaattttactgatcttttaaaaattcttttgtttgtgtgttttctttgtttctggtctttattttcaaattccttattactttgggtttaatacgcttttctttgttttcttaagttggtcaattagattgatttcaggcctttattctttcattatataactatttcatagctagaaatttccctcaaagtacttttttagcagcacacaaattttggcaggttatcttttcattattcaaaatattttctaaatatccctttttatatcttctctgatccatggattattaagaagttaattgttcagtttccaaatatatgagagagattttcagattttttttttgctttgatttataaaatagggcttgtcttgataagtgttctaaatgcagttgaaaagactatattctgttgttttttggaggattgtaaaaatatcagcaaggtcaaggtggttgataatgttttacattcaacagtgtcatacagtgcttgcattgtatacctttttctatctttttaaaatgggttttgtaaacagcatatagttaggtcttgtgtttctatcctgcctgacagccacttgttccttttttcccttcctctcttttcttatggattaagtattttttaaataaaagtttcatttatctcaacttttggcatattagttacacatctttgtggcgttttttttagtgtttcctctagtgtttacaata

SEQ ID NO: 6786 - DNA, 1111 bp, Homo sapiens
ttggttaatgcttctccacagcttctccacagcttctgctgtgcttctccactttaaagttaatatttttttctttttaatttatcttgggagatgtttttagactatgcagataccttgtttttccctaatcttttgctcactaattttagcactcgttgctggatcttctcttcttcttttttttttgtgagatggagttttgctcttgttgccaaggctggagtgcaatggcgcagtcttggctcattgcaacctctgcctcacgggttcaagtgattctcctgcttcagcctcccaagtagctggaattacaggtgtacactaccatacccggctaatttttgtatttttagtagagacggggtttcaccatgttagccaggctggtctcaaattctgtcctcaggtgatccgcctgcctcggcctctcaaagtgttgggattacaggcgtgagctaccacacccagcctcaaatcattttcttttgcccaaagaacgtccgttaacatattgtagtacaggtctgctcaaaatgaattcactcagctttgtttattttaaaatctttattttgcctttttttttttttgaggcaggatctcactctgttacccaggcttgagtgcagtggtgtgattatggctcactgcagcctcgacctcctgggctctagtgatccttcctcctcagcctcccgagtcgctgggactacaggtgtgtgcaccacacccagctagtttttgtatcttttgtagaggcagggtcttaccatattgcccagagtggtctttaaactcctgggctcaagcaatccatccacctcagcctcccagaatgttgggattaagggtatgagccactacaccttgctgccttcgtttttgaaagctgtttttcctaatatagcaatgctagtttgaaagtttccttttttcccccctcagtattttagagacacctctgcattttcttatagcttgcctagtttttgacaagaagtctgctgttattctgatcttggagtttataagcctcttggatctgtgggtttatggttttcatcaaaattagaaaaattttggccattatttcttgtaacttttccct

SEQ ID NO: 6787 - DNA, 1028 bp, Homo sapiens
attcttgattggctagtataaatagctaatactgtaactcctgtggattccattatcctctgaaaagtgttacattttgttctgctaggcggttaaattgctgttgagtcaccttgaccgtagagacttagatttagctcttgtaagggtgatgctatttggttatagccttaaacctagggtaaattccttagttttgagatgtgatctttactctcctatgttatagcccttttggaattttgtttattactctccagcaacttgacaagactgaaaatccaaactcttaaagaccacagttggcaactgttgaaatctctgctcagctcctttagccttctagctgtggttctccccttgggctccttgcagtctcctctcccacatgtattttcggagtcagcaagaatttgaggagtgtgtatttgaagattttagggctctgctctttgtgatttcctcctttacagagtatccaaccttgaattccagtcactcttataaccctgaactctgtcctttggcttcttaggcagtaggactctggccttcgacttgagatttacttttcacctgcagattttttagttacttcatggtaaaagctttataaaaaggcatttatgaaagtaaatctcatgtgattgctgtattagttatctattgttgtgtaacaaattactctaaaagataactcttataacaacaatcatttgttatcttatagtttctttgttttgggtatcaggcacaacttaactggaccttctgatttagtgtctctcacaaggtttttcagttatagtgttagccagggcttgggaagactcatctgggaaaggatacacatcccaactcatgtagtttttgttaggacttagttcctagcaggttgctggagagagggcttcaatttcttgctgttggctggagactgctcttagttccttttcacatgggtcttttcaacatggcagcttgccttatcaaagcgtgtaagctaagacatcaataaagtgctagca

SEQ ID NO: 6788 - DNA, 1049 bp, Homo sapiens
tcaatgagaactgaaacattaacaacaagaaaattttaaataacattgcatttacttttatatgctttgatggttgtcaccaagtatagtacagctgttactctgagtaaatggcaaagtaaattagtaatatttattgaaactttttatgatattgtagtcatttatcgattaccatgtttattaaaataattactttatctttctccatcctttccagtcctagtattttgatgatgtagcagaagattgaggtttggtgggaaactttgacgtttgggtcttggtctgttaaaaatttcaacagttttaattgacctttgagattttcactctcatttattgaagatgaagaatttaccctaagtagtggaaacttaattgaattatggttctcctgatacttctccttttttaaatcctactctagttctgagaaagtataacttaaaatgaaaaacaaacagaaagcccaacacctgttctgcagagttgatgctagtctggaagcagctgcccactctcttttccttggactaaagaatcttgccctaaacttgtaactgaaaatcaaatcttgtattgtcttaaaatcacttcccagaaatcactgtatttacttgccttttcctttttttcttttttcttataagtagaccagaatgttttttacttttttctttatttaacatgaacattcctggagtaactatcactcccctgtgataattactgccatttacttccaggctgagaagctagtatcgctgacaactcataggatgtgaggaagagacagaaggaaatgggttggggattaccaagttgcagttaagtaagagagtgcttaaatacatatttatagtttctctgatttaactgttagtctgccttgttgaataaaaaaagtattattttatatgaatattttctcattcagaaattagctatgaacagaagaaaatattaagctttattccaacagttattttgttttaaagtatgaacctgatgttttttaaagccttctggtacctctggtagtttta

SEQ ID NO: 6789 - DNA, 1047 bp, Homo sapiens
ggatctttgaaatctccagtgtttctctgtatactgtgtttttctatttccattataatcacataaggaacaaacttccagtttaactcccaaataaaagcctcattactgtataaaaaactttggaggcttagagttttctgttgctgattttttttctttctatatttaaatatcaaaaaggggaataagattttgtttaattaagaattctctttccgaagtgacaggtatatatagaactttgtttttgtgattctaccttggatgcttctttttgtctttgccaggacaatcagttaacatcacttcccttggattttggaacttggaccagtatggtagaattgaatttagccactaatcagctcacaaagatccctgaggatgtgtctggtctcgtttctcttgaggttagtataaatgagcaattagagaacttcagaaccttccatacgtatctcatttaaaaatttcaaatttaaataagcaatttctatttgggtgaatgtcataattagaaatgttagaactcacttaaacatacaaccctaataggataatgaagtgttgacttaggtagtctagattcagtgcttttgaatttctcttgcctactacaagttggtgtctttgagtgccataaagtattaatatctctaaaagaaaagttctgtaaaagcatcttttagaacaatttttttctttattctgtttaaaaactacaccattgtctaccaaaataattatcgattctcagactgtcatttagaatgctttatcatactttttcatcctaattaccgacctgctattttatttactcattgattattgtctttgttgtaaatctggtatgcctatttctagccctctaattttagtcctattgttttctgtatctagaatgccctcttctcatccccttagtttttttcttttagtatgtttttccataattaaagatccatcttattttcacctcttcagttaaggatgatttctcctgcttctgagttcctagagttttcatccctttgatgaaaa

SEQ ID NO: 6790 - DNA, 1039 bp, Homo sapiens
ggtacactggagaacctagaagaactgtatttgaatgacaaccccaacctgcatagccttccctttgagctggcactctgcagcaagctttcaatcatgagtattgagaactgtccactcagtcaccttccacctcagattgttgctggggggccttctttcatcattcagttcttaaagatgcagggtccatatcgtgccatggtctgatataaatctgctggtcccacacactgttcaaaaatagactgccattaatgtttcttatctatatctgtatctatttatgtagatattggtatatggcagatttataaaaattgcattatgtgtttctgctaatagaggaatcatagccatttagaattttttttaaattctgtacaaaaggcttatataagttttctttgctgaatttgatggatgtttttctgttgtgtaatctgatatgccagtttgcttaaaacatttgccaacacattatgaagttattaaatttaagggacagaggtagtatagttagatatactttctcttaggaaaaataatgggcaaaaatttttgttgcaacttttcatatatattttccccttaccaattgttttatccttatagtattgtaggccctgaaagtagaatttttctttaacttattttgagatttgagatttaaattttatgtattgtttacagtcagagtaaatcactggatttcttttgtttgttttgatttgctctgttttattcagtcaaatctagagtttgaatcctctgctaaagaatttgcatccactggtgtaaacagtgaaaggtatttgcttgttgaaaaaaaaaactggcaaagtgaaaagatacagtcaaaaatctagaatttctttaattttgcttctctgacgagttgtgaagcaaaatacctgaagtgagtctttgggtaggggaagggtattgagaccttttctagtatgaatattttttaagtttgggggaagagaaacttgcagtgaaaaggagttttttcattcctgaaagttgcagatcc

SEQ ID NO: 6791 - DNA, 1183 bp, Homo sapiens
gaggagtctcagagcaaggtgcgttctagatgtcatcctaaaaaacacttcatatataattaatcactattttgtataattacatattgctgcttgtgtgtttttttttttttccatttagttgggcgttgtgttttacacaaaaccatttttgaattaaggctatgatattaagatagaaatttggactgttgttctgcttttcctggcactcaaattcatgactagttttgaggtcaaacctatgttcgtaatgagagattttataaggatcaactaagaaatggaaggcaggtgaagatataaaaccctagaatgcttaaatgtgctgtaaaactattgtagatgtcactggattttaccaagtaatatcctttcttttttttttccccccatctgctgtggcttttcagttaaaattttgtttataaaaggaatttgtttattacagctctacctagagcttgtgtgtttgtgtggttttttaaatctcgtatccaggtgtgtttatatattaagatgttgggacttgaactttaaaggtagtaactaaatgtcttttcttaaaaaaaatggttattgtttcttaaaatgaaaatatggtttttaaagcatttttgttccacctttatgttaatctgtaacagtaatgtaaaacgatcagtcttacatgtagaagtcatgctgtgtgtaaacaatataatgacaagttataaaaaattttaaagaagtataaaatgtatatcctctgtaggctgtcaccttgtgagagcccacaaatttcattatttcccaagaaactaaaatggactctgattaagatatccctgtgaaatcaagatatttaatatttaaatagtttgaatataataagggatattgttgaagactacatatgagctaatactttttcctgaaactgcaatgggactaattggcatatccaaaaattttcctttcctttaaagaaattatatttagtctctccatgagactcagcaaataaaataagaatgtccgaggatgttacattataaaaacattgctctaaactttgctttttgttaatatgtagcagaaaaatggcaatggtaatgccaagctgtccttttctgagtttaatactttctaaatcccacatgattattttatacagaaaggaggaagtgctaaataatttatg

SEQ ID NO: 6792 - DNA, 1092 bp, Homo sapiens
gaagggatggttccagtcctgattcaggaactcactgctacaatagtttgttccttgttaggattcaggctacctcaaaatctgcttcatgagctgctgggcaaggtcccagctttttcaattgagcatacagggaagatagtctttagcagttactgatggcccagttatgtctcataaaaaatttaagcatttagggccgggcgcggtggctcacactgtaatctcagcactttgggaggccaaggcgggcagatcacgagctcaggaaatcgagaccatcctggccaacatggagaaaccccgtctctactagaaatacaaaaattagctgggtgtagtggcacgtgcctctaatcctagctactcaggaggctgaggcaggagaattacttgaaccagggagtcagaggttgcagtgagccaagattgcgccactgcactccagcctagtgacacagtgagactctgtctcaaaaaaaaaaaaaaaaattaagcttttatggggttgtattcatctttgaataatatacattcatataaacaattgtgtgtgtgtatgcatctatagatctatatatctgtatgttgtctatatattggtcaatttagtcaacctaagtaatggcttcagtcttttgtttttgttttttttttttaaataaactttttattttagaacagtctgaaatttacagaaaaatcacaaagatagtacggagaatcccatataccccatgcccagttttctctgtgattaacatcatgttaatatggtacatttgttacagctagtgagcccatattgatacattattattaactaaaggtcatactttattcagatttcgttttgttctgtttgttctttttacctaatgtcctttaactattccaggatccaatctgggacactgtaaaacatttagtactcatggatttttaggcccctcatggctatgacagtttctcaaactgtccttgtttctgatgactttacagtttagaagagtactggtcagatattttctagaaggttccctcaactgggatttgctcaatgtttttctcatgattagattggagttctgg

SEQ ID NO: 6793 - DNA, 1029 bp, Homo sapiens
tggttagtagcatagcttcttttgcaaattcttgctgtgtcctgcattatgtatttaacttactttcattttttgaaaactgattgtgtatgccaagctcagtatagtgtaggactataaagatgactgagacatggttcttgtcttcccagagcctctaagttgaaaggttgttcatgtgagggataaatcattaggattacataagagttatagatattttatgtacaagggggtgattaactcttatgttgggttaggaaagccttcaaagaagtgatgatttctgaagagagttttgaatagaggtttgccaggtgggcctggtggagatgggcattgggattaaaggattgaaggcctggaaatatatcagcgttagagataaagatttaggatcataaatacataatatgatagttttaaaatggatgaaattgcccagggacatagacgatagtcataagaaaggcaaggactgaactccaaggaacatcagcagttgaaagatggcctgaaaaatacaatgcctaacagaggaccgtgagacaggagtgagccttcaggagaatgaccagatcagggtgccatgggagccagtagaggagaaagttacaggacgggaggagcaaagtgtaagaaaccacaagattaaataaaaacaggacctaagaatgtctattagtttgggcaaaggaagggttattaatctagtgagagtaatttcagtggaatggtgggggcaggagttagtttacagggagtggatgggaagatgaggaagggaaacagagtctgtacccttgctttcaagaaaattgactggtgatgaaaggagaggaatattagcaaaggggaatacaggtcaagggaggcttctttctttgttttattttgctaatgagaaaaactgatgcttattagtcctggaggtccacggcatggactttcctatcaactgaataccttaaagagaacaggatgttcctcctgatacgtaaatacaccatctcagttttgatccaagat

SEQ ID NO: 6794 - DNA, 1086 bp, Homo sapiens
tttacatctctgtttaccagggatactggtctggagttttcctgtcgtatctttatctgacatttgcatcacggtaatgctagtctcatagaacaagttaggaagtgtttcttcctctgttttctaaatgatgattttgtgtagggttgtttatttcttccttaaatgtttgatagaaaattcatcagtgaagccacttgagtctgagctttctgtgtgaaaagattgttttactaatttaattttgttacttcttatattctattatcttttgagtctatttttataatttatagatttctagcaatttgtgcccttcatctaagttctctgatttattgacaataaattcttcataatatttgtttataatcttttttatttctgtagtgtctgtaacaaatgtctcctcttctgttcatggttttgtaatttttgtgtcttaaaaacaacttttggtttcttttattttattatttatctgttttctgttttgttgattttgactctgatttttatttcctttttctacctactccaggtttcatttgctcttctttttctagcttcttttctagaagtgagattgattttagacttcccttcccctgccctcctttcctcttcctttcctccttctttcctcctcctttcctcgctccgttgccaaggctggaatgcagtggcgccatctcagctcactgcaacctccgcctcccaggttcaagtgattctcctgcctcagcctcccgagtagctgggattacaggtgcatgccacaacacccagctaatttttgtatttttaatagagacagtgtttcaccatgttggccaggacaggatggtcttgaactcctgaactcaagtgatacacctgcctcagcctcccaaggtgctgggattacaggcatgagccaccgcacccagccagatctttctttctttcttaagacaagtgtttaaagctctaaattttcccctaccagctagctgcttttaaaatttaaacctgtggacattttctatattattacccagattaatgttaatattgggctataataaaatttgaaaacaggcttgg

SEQ ID NO: 6795 - DNA, 1058 bp, Homo sapiens
gaatttgaacccaggctcatcagttgcccaaatccgaggcctttctactttataatattgtttcttctaaaggcaagaaaataccagccaagaaaacaaatttaaaggagtggtagaaagtagccccaaaactcaattaaaaattaaggtgcatttacaatgtgaaatataattagagcaaaaataagaaaaagaaaaaagaatgacctcttccagtttacatatcaggcgttaagattgaatgccctgtggttcatgtgagactctggaagagtttactaatgttcatctctgggtctaactggggctaccatgcccaaagataattcagagaaaattctggggagtgcctgtcagaggagttggaaaattagatggatgaagaaaagtcctgggatcattttccctggttggagagttgtagagttgttaagagtcctcacgtctgtgaagagctattatgccaaatatggtcagcagctgtttattgatctctactgcatgtgcaactgcagaacataggtttaagtttaatttggaaaaatcattcctgccagtaaccagtgatggttggtaagcttctttgtgaaaggtaagggacctccttcctgaggtctttttaagatacattcagtgtaagatgctgtgagggagcaaggcaccctaaaggacctctcaaggtcccttctagccctaaggtcccattattattgcatatttatagaacgccaaaatcttctgtgttctttgcaaggactagaattacattcaatccctgtccagtgctatcacagtcaaaattagacagatcagcaatatcttagttgccaaatcgagttaaagtttactgggcacatgtctacctgaaagtgtgtattctcttcaagaacatttgacaatgacctaagagcacggtaaaagatctttggttagtgctgaagcattccagtgagatttgcattaagttcctctaggcatttttgtataaacatcaatctggcatttattcttatctgttaagcaatctaatttagaattgttgtcccaaaaacttttta

SEQ ID NO: 6796 - DNA, 1107 bp, Homo sapiens
catttgcttatttatttatttaatctgtacaaatgtatgggatacatgtgaggtttttttttttttttctttttcagagtcttgctctgtcaccaggctggagtgcagtggcatgatctcggctcactgcaacctccgcctcctgggttcaagtgattcccctgcctcagcctcccaagtagctgggactacaggcgtgtaccaccacgcccagctgattttttgtattttagtagaaacagggtttcaccatgttggccaaggatggtctagatctccaacctcatgatctgcccacctcggcctcccaaagtgctgggattacaggcatgagccaccgtgcctggctcatgtgagattttttacatatttgtataatgcatagtgttcaattcaggttatttacggtgctaccacccaagttaagtatattcactctactctgctgtcagatgttgaatttgttccatcttactgaatgtttgcaccctttaacctgcttctcttcatcctccctcctcctcctcctaattcaactttcccagaccctgttacctatatttccaccgtctacctccatgtgatcaaattttttagttcccacatataagtgagaacatgtaatatttgtctttttgtgcctggcttactttgctttagagaaccacctccagttccatcctgttgctgcagatgacatattttcaattgttttatgcctggataggatttcattctgtatatgtaccacattttctttatccattcatttgttgatgaacacttaggttgatgccatatctttgcttgtgagtagtgctacaataaacatgctagtgcaggtatctctttgatatattgatttcttttcctttgggtagatactccgtagtgggattgctggatcgaatggtacttctatttttagtttgttgagaaatctccatactgtttttcacagtggctgtactggtttacattcccaccaacactgttcacttttctcagcatcctcaccaacatctgttacctttcattcataatagccattctgactagggtaagagaatatttcattgtggttttgatttgcatttctttgataat

SEQ ID NO: 6797 - DNA, 1020 bp, Homo sapiens
aaggtcttcacctcaaacacatgtaaaaggaataaaaaagtacataatacagctttgataataatgcagtataattaaatcaacacttgcagcaaaacaaatgaaagtaagctttcaaaattcaacagggcagcccaatctcctattgtgtggcttcttaaaaatacattcaccaaaatgcaaattggaagcaccagtgtggaacttggatacccatacagaggaactgcttctgtcaaataatagtcataataataataataataataataataataataggataagtctttttgcagtttaagatctgcgtaggccaaaaaataagatacagtttcttcttaaaagagctttacaacttggctgtcggttctcattggatcataccgtagtgtcatgagtctaattaatgtcccgcctctttctttgaattaatactacagacttcattaattcatgtagatactatatacaactttaaaaaaagttttaagaacctcattgtagaaatgactttaaaaatgcctcaaaaaagccctaatgactgattttctttgacacttttaaagaaaatacatgatagggaccttcagaaacaagacctgaacatggttactaatgccactttggcaagtagtataaaagtctctactctgcctaaatgaaaatgaacataaatcagtcactgagtaaaccaaaattttaataggatagtgaaacctaatatattgatacatattataaaaattgcataattgtatttaccatctcaaatagatgatattataggtccatatatgctaatagtatttgctatctattatactataatctgtaacagggatgttgtttgtgtgattaaggactctactcacccacccccaaaaaagagagaagaatgactgagctgattatgtttgtttttggaaagatgtcacctcctccactatttggatgttatcagcttgagttcagacatgtgaacacgttcagatttgacttgggatttcagcttccctg

SEQ ID NO: 6798 - DNA, 1031 bp, Homo sapiens
tttctattaagacataatggcctatattgcaatttaaaaattgtctaattgcttatagtatagagtagtatgaattacttttgagtttaatttgactgcattgattgagaattctctagaattttttttattggtatgtcatcattctctaggtgatacagatgttaatttagaagcttctagatagtgtttttcaacaactctttgaatttaagatgcattactgatgtcctccctcagaaaaagtaataatgatatataaaatgaaggggaaaaatatacaaaaaccctcgccctccaacctttttgtgttttttatcttccctacaggggagcagttgtatatatacactaaatgaatataatcagttgcagttttgatgtataagattattcttgaggtgagggataacataaatattatttttctgcaagatagagtatgtgcttgttgtatttgcatatattcatgtttaggtgaagaatctgaattttcaaatgttaatggaactaacaattgacttgaaaacctctatacgaagaaactacgtgaagcccttgcccctgaatttaagcaatgagtattgtttatgtattaaattgtggcttattgcaatcaacatttttgacagaagatttatttttgttaagcctaattgtgtcaaattagaagtcttaattccaaaaacttaaagcatcacgtctgcatttcttttaaaatattttttatttttgtttgatggcttatttcttttcttatgcctgtagcagcagtttcatcagttatgattctggaattcatgtttctgaaactgtaacatgtaattgaattataattggaaaaattagattaatcaactaacagaataatatactctgaaatattcttttaacagtctttgatatagatctagcattgatatttatagactagattacagtgatgatgctgcattggtatatggcttgctgaggagtgattatttctcagttgggattctaatagtaatcatagagagaatgttaccccc

SEQ ID NO: 6799 - DNA, 1034 bp, Homo sapiens
cacttacactgcagactgtcacagcccagaggaacttaaggaaacttaacataatgcaagttctggatggaatcctggaacagaaaaaggacattgtgcaaaaaccaaggacatatgaataaagttattgattttagttaataataatgtatcaatattggtttgttaattgtgacacatgtaccataataatgtaagtgataatgggggaaactggatgtagagtaaatggaaactctgtgccatgagcataatttttttgtaaatctaaagctattctgaaattaaaagtttatttcaacaaaaggacattgcaatcacagtagtcttcatatttattgagtacccatcatgtaatatcatcattgttgcaaacctgacttctcttttttaattttttattaaaattatagataatttgtcctttccagtaactatgaggcctcatgtctatttaaaagcaccttggccaggtttgggtactagtaaatgctctaagaatatttgcctcttctttctttcctcccactctctacctctccctaagtgcttctagtaattacaaaaacaacaatatgaacttttacttcactgttgaaagggtcaggctaatcaatcatttaatttgatgagtccaggaagtattcgatgtatatggggacatggtcccaacgttcatgtggtctatccccacatgcccatcttcaagatgcataagaatgaatagaccattttacttattagaagaatgagagttaatatttttttctttttcaatctagaaaaacaagagtgtattatgataataatagaaatggtaacataagaataatgagattatagattttttccctattctgaattttctaacatgttactatttaattttacaattaaaaaagaattttctctatatttaaagtgcctaaaatctattcttgaaaaattatttcacatcatagtttttcaaatatatatgcatacacacacaacatacacagagatacagagtgcgagtggggagagattccata

SEQ ID NO: 6800 - DNA, 1027 bp, Homo sapiens
aatatatttaattgtacttgatttactgttgttattaatgtttgagaaacaattttaagtaatctatagctcatggcaagaatattctgacatgtatatatgagaaatgaaaaggaagttaaattggaaacaagtggtctgaaaagagattaataatgttttgcttttctgtgtataaatggaaataatctgtgtagattgaggtttcgcatacacttttcatgtggataaacatttaaagcttttaggtaaggacttcttatgtgagtctgaatcgtagaagcctatgattctaaagttttattaagtgtttaagtattggtagagaagtcgcttttcacatcatcgttgttttgtatattaacatggaaatgtcaagttttgcataacttgaaatgtctcagaattgcctattgctgaaattcaaatgtcagaacaatgcttctgcaaatatatgactctgatatttcaactctaaaaacctcataaatgattcagtatcagtttggccttgttatgatataacttttaaaagaggcagagtgatttaaatctgttctagaaaatggtggtctcattcagtgtagacatcaaacacaaatctctcaacccattaatgctcattaatttttttattatgttaccattttggcaaagaatttaagttttcatgaggactctttaagtatatttcaccattgtaaaaatgaagctatttctttgtgagcaacaggattggcttatatcttatcctaatttgtggcattaattgttttagagggctcaatactttttgtaaaagaaaattttttttgtttttcaagcgatgaatgccttctaggacataaatgatatatagagaccaaaaggcctgtagaaataaaccttctactattaatttactcttccaaattttgcatggcatctaaatatttaaaattaaaagttttacagctggcataagccttggagataagaaacctgactttgtcattttatacagaaaactgagtcttgatgtctagtc

SEQ ID NO: 6801 - DNA, 1044 bp, Homo sapiens
taattttgttcagcgcgttgttgatttctttataacaaaagcaatagaaagaaaagatgaagtaatagtgaaccaaacagaaataattttccgtgtattgtgcttgtcttcactgtgagtttagttttctatagtcaatgtcaaattgatcagacttctactgtgtgattgaagtacttctttaaaaaaaaaaaaacactcatattgtgaagttaaaacagttaagttgtagtgtcactgaaacagtttttctgattacatttcgctttgcaacagagcctgagtttttgcacttcttccttgtttaaacagcttaagtaaatttacagggttacccccctttttttaaataatggagaaatggaatgggtgcaaattttgaatatggttcttttctctgttagaattagcagccaactctgcatgaggagagaaaagttgagagtatataaaaaagatttccctgtatgatggctcctggctttttaaaggagatacaaaaataacaataaagttgactgtgtacaatggaatgctggctttcattgcagatcttaaaaaaaatggttttactgacttttgctcaaactttagtagtagcaatgagtgtttgccaataatttttgttttctttccttttttaggagatgggctagcttaaaatttcaaatatacatatacttacatgtatatttacctcattgaatgctaatgttaaaaaaagtggtgggagctgatcacctatgctgccgtaaaatgaaacagctccccctcttatatttgaccagagacccatagtattgaaggagatttatggaagtgaatgtatttatcaagttcatatatgaggcagcagaacaggctttatttagccttcctatcacttgtaccataaaacagtgggcctctgtttagttggcctaatacagttgttaaattggaataatttttctgatttaaaatttgtagtgtatttatttgttgtttttcagggaaaaactattttaaagagattaccaaccacaatgtcatatgttaacctga

SEQ ID NO: 6802 - DNA, 1050 bp, Homo sapiens
ctatctgcaaagtctgtttttctctagagaaatgtcttttctatgcaaagtgtgcattcagtaccaccaattccctgcattttggtgctcagaccctcaaagacataattaaggggatttcttctttaaaagcctactgtgtggcatctcatacaattatatggcccttgctttttgttggtcttttttcaaatataacatgcagtgttgccaggaacaccatcatattaaaatataaaattaccttttgtgaaaaatggagtcagggcatacatctgggaatccaacaaactctaaactggctgtgtacaaaatttttttttttaagtttggaaactgatagctgcctgaaggttgcatatttaaagtcattttccctgcttccttcattttccccctgtggcaaagcaaagcagcacttcttatggggaaaaaaaaattgaaagaaagaaaagaaaacctaatattggcattctagtagtaaaataatggtaaagattgagcctggattttgtaatactttggatattggaatatcctaatttccagttggaaaaattagtatcaaatgtattttagatgaaaagttcagtgaatgctgacccatattttgagatataaacaaaaaacaattaaaagatagctattttaatgaaggaaaatataatatttaaataaagtgtttagacttcaaagtagagtgttgctcacgtaatagccagaatacctctgtgcatacatctcggaagaggctaaaatgccagatgtatttttgtgctaattttctcaccagcttctggagccagtagaggaattcagcacataatatctcatagaaggtatccctctcagcattttcccacgttcctccttctgattcattgctgaaagcagagataagagagttaacaaataactagactaataataaccataataacaaacatttattgagtggttactgtgtgcctggcaccatgttaaagagtttacatagattatttcatttaataaccatgtaagtcctatcatccccactttacaaatgag

SEQ ID NO: 6803 - DNA, 1044 bp, Homo sapiens
gttcgctgtttaagtttcagcaaatcatttacccattttctattctcatttcttcttttgaatggggttaataacgcttatccgacctcatagacttgctgagaaaatcaaatgaaaaaagtccggaaatactatgtaaatgtgaagtaactttcttattgttttgtttgaacctttttgagcccaagaagtgacctggtgataacgatgctttaggagacgaatctggccagtggcatataggacagctcagaggagaagaaaccctaaggaaagcatttcagacagtatggcagcaggtcatagaagaaataactgaggctcgaattagggctgtgagagcaggaatgaagaagagaggatggatgccagagacatcactgaggaagaatcaacagacgcagcaatttggctctgaggataggaggtggggggcagggatgaagggagagttaggagaaaccctatcagaaatccacggtttctggttgagtaaaaggtatatattgattgagtaaacagtaaaggaaaatcaggaggaagaataggtttggagggcagaaaatactgaatttaagatattaacaaagtgcccaagtgttttcattgagtagccagtcaaacctctgggattgaagcttaggaatgaagttatagttagacatgtagacataaatcattcttgaactgatagtcatttaaatctatatatttcaaactttatccatatgagtgcaacttgtaagctttttgtcatatttgcatgatacttttacttaatattttcaaatctattttaagttagctcactttttgaaagcgtagccccattctaaacaataatatcttgaatttgatgtgatggatatagtttttaagatacccattagatgtataattaccatattgcatgattgtaagatgtgtatctttttacaatttaacatttctgtaattagagtgttttacaattaatggcatcttacaaactctgcaggccagcaacagtggtgatatacttgtcattgtcagcacatgagccaa

SEQ ID NO: 6804 - DNA, 1122 bp, Homo sapiens
tattactgcatgcacaagaattaagtcagaagagagaatattttatgttaagaaagcctgaatttatttcatgggaattgcaatgtgcatttccttaaagttgatgatttatagttttcttcctttttatagatttaatttgtatagggtttgaagggccaaaccttaatgttagggtgctatttaagtgcagatttctcgttttcatgacacaatatttttgtactcagaagatgaactcagtaactgaacatggtttactcttctacccagatgtttttaccctgatctctattagggatattttgagtcctagctaggacctagaggtggaagttggtagctactcaaaagtttagttgatattaagaaaattttattactcagagatgataatgaaaatgtatacttagtgaatcagagaatgttataaagaagaaagtggagtattggttgtatggatgaatgtatagatagatagatagacagacagacagacagatgggcagatagaatatcctctctatatatgtttgtgtatgtgggaaagagatgtataaatttatttattgcaggctgggcacagtgacttacacttgcaatcccagcaatttgggaggctgaggtgggaggatcccttgagcccaggagttcaagattagcctagccaacatggtgagaccccttcttaaaattttccagacatggtggcatgcatgcctataatcccagctactcaggaggctgaggtgggaggattgtttgagcctaggaggtcgaggctacagtgagctgtggtcacgccactgcactccagcatgggtgacagagcgagaccctgtctaaacaataataatattaataaaaataaaataaatttatttatttcattagcccagagattggaaacgagaacagaaggtatatgcccaagataataattaatgtatagtgagataaccacaactcaagaaagaaatatggccaggcatggtggctcacatctgtaatcccagcactttggaaggccaaggcgggcagattacttgaggccaggagtttgagaccagcctggcaaacatggcaaaatcctgtctgtacaaaacatacaaaaattagctg

SEQ ID NO: 6805 - DNA, 1030 bp, Homo sapiens
cctctgcctcccaaagtgctgggattacaggcatgagccaccgcgcccggccaagagaccttgtctcttaagaaacaaaacagaatgaaacaacctatgagggatacctggtgtcatagaaagtactgagcatgaggcctggtgcatagtaaatgctcaaaaaaaataaaagcagttttatctagcttcgttcttcagagtaacatgagactagcacttgaagatccaagaccattctgagtcagttttcttgcagtaaactcttgggcaccttgatttttggctgtcttcagcttaacccctttcacttgtaagtctctaattatctaaagcgtatggttgtgttttcacttatgcaggtagtttatgtaccatttattgaaagacctcttcctttccttctgaaccattgttttccttctgttcagtctccaaatgtacctttctctcctctttagcctttgactgacatttctgtgaagcattttgtgatgtgcatttagaacactacgtaaaaataaactgcattgtgttatttaaatatttagaggcctttgtagccttgcaggctatttttaaaatgacctttaaaaccatttgcaaagaagacaaaagtaatggggggaaagcataaccttttaatgtttccttcattagtggcgttccctaccttggatgcattgccttgctttgatagttcataatgtaggatacatcaaagacccaaataatggagaacaatggggaccaatttttttaaagctgattttgcattattgctgctgccattaggtgtcagatggaaaagatccctttcttttaaataagctggactcatgattgattttctacgtgtggtagacccccttggtaatgctggtgtgtaaagaaagacctgctatgcattcatatgtgaattgggcttatccggtttcctacgactttgcttttgtacagcaagtttatttttgagaggagagagtcaatctgcgttatatctgactcaataataacaagaaaccaagttgca

SEQ ID NO: 6806 - DNA, 1027 bp, Homo sapiens
ttcaataaaaactggttggcatatctgctatgcctaaacaattttgctaatattaagaaggttctcggctaaaattctgactcatcaattatttactttttttttttttaatttaaatgactatttctatggggaatcttttgtaaatgtgtctggtctaattaatttggtgccaaccaggcaccaatgccttgtcgactctctttatttactgtggtatgcagtcacttttcttagttgttccgtgcctcatcctaggaagtaggtttgtcctgtttgctttcataagcatgactggccagtaaaacccttgacctttaaattaatgggtaatacgaattcatctcattccatcatgaaacaaagattctctgtatcagatattactatttattagtaagacaaggggatgggggatgccatgtgctctgaggtatcactattagttaatgagaatggtccacattttatccttcttaggagtaatttttctgaagggcattgggaaattaaataaacacatctgaaattggatttagattttgatagagcagaatgattacaactagggtcccttagtagcctggggttattcaaatacagataaagacaatacatttccataaattctgaagaaaacatgtggctggagtatgagccatatttttctgagtgctggggttgatggccattaaaaatgagaagaactgaaacatgcaggcattagttcctcacatgacagttgctctaaatcaccatttatagaatgcactttttaatgtgagcatttctaaagttaacatgagcaatagaaatgtcaaaagtgaaaattaaatcattaattctaacatattcctttcctaattaagaataattacagcaggggctagattttattcaccctttgacctcaaccttgcttgctcagtgcctgggacttactgtttattgagcgaatgaaaaaattttttttatcaaatcttttgcttaggcaggtccacaaatggcagggggcatacccgggata

SEQ ID NO: 6807 - DNA, 1064 bp, Homo sapiens
ataaactgctaatgattttgcttccacacaaccagatgtatctctggttctacacatcacctctttctcatggaactgtttgggcatattcctgtatacgagtctattactagaaaacaaaggaataaatgaggagaaaatactatgtgtaagttaaaagccagaagagatataaaacattacatttctgattcttcatgtttattttatgatctggtgaccttgtctaattaaaggcacatttcttggtgtacagcggtgatcactgagtacagttttactcacttaggtaaatgaagtattactctcatttagaatagggtaatcaaatgtgtcatagtgaacattgtgtttaaatatataattctgtacatctatctctggatattctacctctcttatataggcctcttttgaaaatttgtgcaggaaaaattaaaaagtcaacatagaattcctttcggtatacattataacctttttccccacagagaggttatttttagtttctgttatgtccctgaccctgacaacgtagccaaaccagactttccatcctgatcttcccccacactcggctcaatctccacaggttttgccccttccaggcgaccttgtccaggagtgtgacaaacccaggcctggctcctggggcagaaagaggaagaacgatatgtgtagtgtccccttgccttcctttcacccctgacgtatttatctggggaagttgaaccacactgtactgtaagaacagtgttgagagggaaagaaatttacagaagaaccaacaagtcacctaagaggtagaggaagaaaggaaaattggttccttctacttttccagggagggagtaaataaaaggacaggctcatagctttactgtttctccactacaaccttagctgcttctgagcgtgtgctgctttcaattccatggattcgcctaactccagagacagctctgtgcacactggaggatcaccgctccctctctccacaccaggagtctgtaactcagatatctggagacaagcaagaaatgccttgtgtaagacagatggag

SEQ ID NO: 6808 - DNA, 1050 bp, Homo sapiens
gtttcctaaagtgtgtttcgctgcagaaggaggcgttccaccaaaagatgacttcatggccaagtgtctgtgtgcaaggctgcgtactgcactcctgtcttgtagagattacacattagcatattaatggttctaagaagtaacattccttttttactttttataccaaagagtttctcaatgtatttggtcacagaccctgtacatcttatcatcccacgaaacaagatggggggaaatgttggacttaggtacacttcatagtttttatatatgctttatgtaagtttttcatagtccccataccatccttatcaggtacacattattgtccccattactcaaatgagaacttaaggttaagtgactcttccaagttcacaagccaagaaaagagcaaaaatttgtacctaaattctcctaatctgggaaccattccaccacactgtactacctcttagattcatgtgtatcatttcagtgagcaccagcgtgtcccatccttctctggaccctgtctctagaagtcctttataaatgtacttctaccttggcttttccagtcatagcatgtagcacgaaatccttaattgtccactgtgtaacacctttcatgacatgtgctgttccatgtggcactgactactccagagtccctgggaacattatgctttttttgcacactcgtctccattttccacgctatacgctccttatatgcaaggtactcttagtagttgcagcatctgtccaccgtccttggctccgtagtatcaccgggtgcttctttactaaatgagagtattcctcagttgtgggagtcgagagagagaagaaggagacagagagagagagagagttggggtgcttattttaactctggttctaatcatgctgcagggtcagcttgccaagaaacacttaaggctctgttttctgtatgtaggcaggtaatcctctgatagagaaacatagagttatcccatcaaaatgtgagcacagaaatgtatcaacaacatgccataagccagtcgatatacctaaaagcca

SEQ ID NO: 6809 - DNA, 1091 bp, Homo sapiens
taaaaaaaaaaaaaaagaagaggtgtaatgggattgggtagaagagccaggactagaaagagtcacatacgtatttctttataatggattaagggaaaaccaggaaataagtgcagactggccatgtttcaaaagaaaataagatttgaaagataaaaatcatcaattcctataatttagatttttacccagagtcagtgtgttcatataatctcctttattcttttaagcatttggtgtagcaaacttctttcaaacatcttgaaaattttttgtccaaatagctatactttccagtattggtttaaaaatgcgaatttaaaaatctgaagtacaagttaggaagtagattggtagaaagttgaagctatgtaaataagaataggctgttacttaagttttcaaaattccaattatgagtattccagtgcatttagacaagctgggtttgttatttttggagttagtaagcaatttcacaatgtgctatatatcacttttaaagacatgataaattgtccctaatggtattgtgtgtataaactagagctgtttctgccttgtgtataatgctcaggattgggtggtacacctgaaaaggctcggattttaatggggcctttttagcacttttgcacctcgtatgttcaggattatgtttgattgatgactttaaatgtgctggcatgagagatatgtagatcttaatgctcttaaaccatttgttttccaatctctataaaaggcccctctgttttggggtaacactttatccttcttaagtaaacagaaataggtttctgggattttgctttttaacattgtaaatccagcaggaaagagacaggctagaggcttttaagagaaggctgaaaacaccatgttcccattttattagagtagccccaaaaagtcagggcatgtgtgtatgtatatatacgtagatatatttttctttcttctaaacagtattaaaataaccttttttttttttttttgccagaactctctgaatcttttctttcctttggaccacttgatatctcagccattatcctcagcctgctggctgagaactctctttggatccc

SEQ ID NO: 6810 - DNA, 2023 bp, Homo sapiens
gcagtagttatgtggacgcatcattcagttctagaatcagtttgaatcaacagcttggctccacacaaaaccttcctttttcagatgatgtggctgaagcacagagaggtaaaagcccccttccggaggtcacataacagtagaaatctgagattttaagaccatgaaatcaaaaacaattatgaattttggggcaactgctcagcttcttcatgtggctatatctttattttttttaatctacatcttcaaaaatccaagcatttctgcctttgaaaacaagatttttttctgtttattaggcaaattgaatttgagatatataatcaacattcataaagttacagtatatttatccattgatttatagaattaatctgtactaatgaaattataatctttttctgttgctgaggacaaggactacatcttaatcttctttgtgtccctaaaagtgcttagtaaaataactcctaacaagtatttgcaaaaaaaaaagaaagaaagaaaaaagaaatacagaccagaagtgatcttaaaaccaactctagccgcttacaaaggagaaaactcagtcctagtgaaggaccatatgtgttggtcaaaaggagatagagccagggttttccagctggtagtccactgctcttcaggtacattggggatgactttgttttcagatagcctgcatttgccatcttccagttaaaatgggtaaaggcttaatctaataattttattaaatgtaatattatttttaaattcacacaaatgcagccacaaagcctgcatcataacttttcacttccaagatattttgttctgttcagactggtatagtgtttaaccacttaaaaattaattgcaaacacagcttgctgaaatattcgtccactaatagccaattaattaaacttatctaatgtttattatccacagttgcctggcagataattgatcctcattaaatatatgttgattcagtcttccctgtctcagctctatctcaagatgagctcttaaatgatgagctttgaataatcttggatgatttttaaaaaataaaaattcctcctacccaaccctattcagaatctctggggatagaccttgggattctatttttaacaaactggacaggtgcatgcatagttgagaatgaccacctaaagtaaggagattgaaattatcattgatgaaaataccttccattgatcagtccagttgaaaactagagatacctaaatgttatcaccagacatatttttaaagtagttatataggttcagcaaaccctagtccttatatgacagtttttaaaatgttttatcataccttaattcatctttattacaaattatttaaataagatagaagtatataaaaaaataaaaggatcgtcccctttacccctacccatctatctctcccactctaactactcaaatataaccactattcatagtaggtatttaagctttgagggtttctcccctatgtattcgtatgttttgtctgtatctaagtacgtttatatgtgtcaatatatatgcacacatacatgtgcatatattcatatttacatttataatgagattatttattcaacaaatatcgaagcatctactatgtaacaggacctggtgctgagataacaacagtgaccaaactgatgagatccctgttctcattaactcaacattataatagtgagacaggcaatatatcaataaaaatgtgatataaaatgtggtaatgatatataatataaagtaaaataaagtaggataaaaggatagataattccagggggttctacttgacctatgatggtcagggcaagactctgagggatatttaggcagagaacagagtcacatgagaaaatgagccccgcgcgtgtgttggagaagtggacgccaaggtcttctagactacgtatgcaaaaccacacgtttttctttttaaaaaataaaattctattacatatactgtcctgtaccttaatttttctagccaactc

SEQ ID NO: 6811 - DNA, 1055 bp, Homo sapiens
tttttctttagcatttaactcttaagtaaagaagaaattaaaaagtaaagtaaaattgtaaataagtaattgcacctttatttctgtactgtacatcccataaagatagacaatatgattgacctaaaagttctaaataaataaacttaaatcagaatgtgtggattagggagtaaaatggtagtacgaaaaaattgtcttgtatacagttgctttttagatgtgtaaaaactgtttacttgacacacaatgctttggaattaatcacatatgcaagcatgttgtttgttggggaaaccccttatagtctctacatatgtgaatgaaagatgggatttgtttgaattactctatagccttcattgttaaaatcagaattaagttctttgttcagtgaagcattcgtagcaatccttgagatttctgagcagggctggttgttggcagagagttctcagtgtattatgctgtttacctaagggttttattcaagaagctctctgaacagctgggctgattattgaaaatgcctcatagtaacttccagcctaggctgatcgatatcggtgcaaagctttacatgggagggagttatttaaacattgagagccccagggataaaagagaatgaaaaaataatgctggacaaatatgctgaaatgttcaaaagaagagagaagtatcttgtcttggtatagaggggaaattcctaaacaaacaagctagaaaatttgtaagctgatcttattacaccctaaacatttacttattttaacttatagcaatcccctaaatatttatttatcttataacaacaccctaagtatttggtggcaagaggaaagattaattaaaagtaccaaagatcaattttatttttatttattttgaaatgtaacctattacataaaattccatgagacactttttagtgataatattgggaaatatttaactttattgtcaaatagattcagctctcatagtttaaatgtagcacaaatgtatttcacccaaatgtaagcagaaaattcctatttctttaattttttttt

SEQ ID NO: 6812 - DNA, 1046 bp, Homo sapiens
aaagcaaaatatcatttaaatactgagcttttagacgtataggagactgactttctgatgcttattcttttgatgaatcacatagacaattactaattggatagttattctataacagtgacattttggaattttcaaaacaggtagctctttgaacatgtttgtatttctctcctcatgttaacatcatcattttggcatactcagacctagaagcttcatgactgactcactaatgaaattcagcaatcatacatatgcaaagaactacctaattcattgaaatatttaagaactgacatggggtgactagatgttttaacatttaagagctctagaacaggctgaaaacactaacatccaagtgtttacctatgaattgatattggaatacaagaaactaacttacattgaaaaggtatatacagaatatggaaatttttataaaaaacaaaagccagcttagtctaatagtttgtttttgcttttaaaagaaaagtttgtttgaaatcttcattgactctcagctgctggttccagaaactacacatattcccaatatggcttatgccagttttctgctttgaagactaaaaaatagaccagaagacaaaatatgatttcatgattctgtgcctcccttgtgacagtagaaaagtaatttaactcctttgtgcagcttttcttcaccagtaaattaggaataatcatgtcttccaccttctgttggggactttgaagagtaatgattcaagggccatttggagttaaaatagaaatatgaaattatttttctttacccaaagacttaagttcatggaatatgagaatatctcttaaatcatttttatttttaaatgcccatttaaaaattcagcattttaaatctatttactttgtgtttatattgcaaaaatagaacacagatgctaaagatgtcatattaggacatctttaatagcaatatctatcaatgccattaaaatattatctatctatgaagcataaagtcccactgttctaagagtaaaacatgggtgtttaaa

SEQ ID NO: 6813 - DNA, 1049 bp, Homo sapiens
ctttccttactttgcacaatgtggaaaggttgaggacctttccccactcgccgcggctaggaaactgggggatttggagggactcacagaggctatagcaaatgaccaggtgatgatgtgcatgacagtttgggctcaagaggggaggtgaccttagcaaggaatagaagtggcagttctgatagtgtggagatgatctcaggcagaaactcccaacagcagttggcaagggtcccagcatcaattccaaagccccactcgtagaaggtcacccttaaaagatcttcttctctattacctttagtatcctgtcccttccaaatgttcctttcccattccctaattatccattttcagtgagagcacgagattagccaaacttgcagttatgtttttttatgctgcccaaagtgcttgcttttacaaaccacatttggccccatatcaatccgttgtgtagaccacatcaagtttccagtccacagcccaactcctgcacttgcgcttgtctttgaacacaaatgggccgcagaaagaggaactgttgggctttgtgagtgaccggaaacagggtaccattgagcagaaattgaactgatcgcaccgtgttaagtcaggaagattctcaacccagaccactctttgagcaccaagttaacatgtattgcatttaaaatgtaataaatgcagtattcataaacttatatgtgtcttgtgccttttgtgtcagcagggtttctgtaggcctctatttacatcaaataaacttcaaatattccagaatgtagaccgcatctggttcatttttgaagtgtccctctaggaacatttctaaaatagtagattgttccaatttttttcctaatgagaaaaatccatgtgttctgtgattattaataataatggcttcaaataaattattgactggttgcaatggaatgcactttcgagcagctgaggaactccgcacaaaatgtctgagttgtattcctctgatccccccctctccatcagttctatgggttatcagccaacccaagcacagttgc

SEQ ID NO: 6814 - DNA, 1052 bp, Homo sapiens
aaaatgcaagaatggcaaatttgaccacaattttaaaaagaggattgaagcagtttggaattacgaaaacaaacagcaccttagtttcctgtgcaattatagtttacctaggaaaaagctattccactgcccacctatcttccaatggcttaatgattttgtgatgaggggaaaaaaaaaaaaacacctgtcaaccatttaattcccaaatcagttaaagatgtccgaatcaggtcccccaatgctttcctgaaaccacactccctgtctcaagccatagggcagtggttcctatcctggagtgggcttcatggagtcttgaatctctgaagttttctaaaaatgtatgtgcatatgtgtgtatatgcatctttctggggcttttccattacatttccttaaaaggttcaaaagagtctacaaccaactccaaaaaaaagttgagaaaatgagatattgttaaagaactgtgtccagtttcgtagctaaataccatttaattactttgatactctggcttacttaaaatgcattgacctacaaggaacacttattttgaatttgtccacaaagttcaacaagacactgaaaactcaaggatgccatccttgggaaatcagatcatttgtcaaaagtacgtccttaaagacaatcagaacaattacatttatatgggaccttatggtttgtaagacacagtcacatatattatttttttaagttattcttcgtaagaactctgaattcatattgtcattattatcttgtggtatagatagttgagacctacagaagttgagtcttgcccaagttcatgccacaaagatagagcagaacttggaccagaaccctggttttagccacagaaatcatgttcttagcagcattctggcggtaacaccatcagcctcttcttcaacatcaaatgtttaatgtctactgggtaaaagggcatatggagattcccttaagaatccaatgttagtcactggagattcaacaaattcaaaactctactcctaggtagcttaatatctaattgggagcttttg

SEQ ID NO: 6815 - DNA, 1028 bp, Homo sapiens
atattttatctgttttaatgcgaggctcggtggctcacccctgtaatcccagcactttggaaggccaaggtgggcggatcacaaggtcaggagttcgagaccagcctggccaatatggtgaaaccctgtctctactaaaaatacaaaaattagccagcttggtggcgcgtgcctgtaatcccagctactcgggaggctgaggcagaagaatcgcttgaacccaggaggcggagcttgcagtgagctgagatcgcgccactgcactccagcctgggcgacagagtgatactccatctcaaaaaatatatattttttatctgttttaatctggactgcccttcccatctccctctccaccccagaagccttaaagctgcttgagggcaagggactgaagcttattttgctagtaccttgctagttcctggaacagaatggacactcaggaagtatttggatggatggatggatggatgggtggatggatggatggatggacggacggacagacttaatgaataaaagaacagacgagctgtgacactaatttacatgaagcttgctgacttacctttctgcattttagttaaagatctggaaggaaacatttaggagagaactctaatgtctggaagcatgcctctgaatggcagagttagtctctttatttggggtgattttttacttctaacctcctttaaacaaagtttgacgattcagtctcaaaaaaaaaaaaatctttttcaatctgagttggtctcagaaagcatatgttccagctgggcacggtggatcaagccttgtaatcccagcactttgggaggcggaggcgggcagatcacctgaagtcaggagttcgagactagcctggccaacatagtgaaaccccgtctctactaaaaatacaaaaattagccaggcatggtggcaggcatctgtaatcccagctactcaggaggctgaggcaggagaatcacttgaacctggggggcaaaggttgcaataagctgagatcacaccacttcact

SEQ ID NO: 6816 - DNA, 1072 bp, Homo sapiens
aaaaagatacagatagcagacatttcacttcaaggggagaaccttaatagcaccaaattcagtattaaaaccaggattcgtttaaagcattactatgtcacatagtgccctgatttttttgcttgttcgtttgtttgttttcagacagagtcttgctctgctgcccaggctggagtgcagtggcacaatctcggctcactgaaacctccacctcccaagttcaagtgattcttgtgcctcagcctcccgagtagctgggattacaggcgtgtgccaccacacccagctaatttattttttatttctttgagccagagtctcactctgtcgcccaggctggagtgcagtggtgtgatctcggctcactgccacctctgcctatgggttcaagcaattctcatgcctcagcctctgaagtagctgggattacaggcacatgccaccacacctggctaatttttgtatttttggtagagatgggatttcaccatattggccaggctggtgttgaactcctaggctcaatggatccacccaccttggcctcccaaagtgctgggattataggtgtgacccactgcgcctggctctgccctattttttaacctcaataaattatattactttagtaggtacctgggtactctctagtattaactaattgggcctcctttttggctagaccattcttattttaaactcagtagtgatctgatttttttaatcaatgactttaattccaacaacaaagaaaaggtggataaatctgccttggttacagtaataagctgttaaaggcaaaattatactttttatacttttcaccaataatgtctactactagatgtatttttttttcattgtgagattgatttgcccttgatatgtattgataagtgttttctttataaatgaaatccatttaaatcattacaccttgggaagagtttttaaactgatcagaatgcatgatcttaaaaatatttctgggccaggcgcagtggctcacgcctgtaaccccagcactttgggaggccaaggcgggcggatcacttgaggtcgggagttcaag

SEQ ID NO: 6817 - DNA, 1493 bp, Homo sapiens
gttcctggagttggtgatacctggcctgagctttgaagaataagtgtgtgttagccaatgaagagagaacagggacatggaggccttaaaacaatatgttgtgcccaggagctacagattgaccatccctactctgaaaatccaaaattcaaaatgccccaaaatccaagtttttgagccccaatatgatgctcaaaaggaatactcactggagcactttggatttctgatttttggattagagatattcaactggagtgttattttgcatatattcccaaatccaaaaaaaattaaaaactcaaacacttctggtcccaagcatattggataagggatacccaacccctacaaactgttccgttttacttgaggaaaaaagacaaggcgggagccagggtttgagccagtggtaccttagaggggctgtaggttccccaccaccccaagagccccttgccatgaatgctgccagggccaccccaagcaaacatagttggagtaagaggactgtgcttgctatgtaaacgcagcttcgtaacaagtgccgttgcacctctgctgccctaagctcctctgtatggaaaatctagagattccaccgaagggacattggctcagtgctgagagttggaagctctgagtcatgactgagttggaagcttacatgttgatttacaaggcgtctttgcccattacatttatttacatgtccagaggtcatggcctgaaaggcttggctccaaatatgatgtgccctttctattgttgatgatgtgactctccattcagttctctttttctcttctcctggttatctgttgctgagtagcaaaccaccctagaaatgcagtgacttcagcagcagtctctcaggattttggcgggttaggaaaatcaggggttgcttggctgggtgttctggctcagggtctctcatgagccttcttcagacagagatcagagctggaactatgtaggggggacaggagcctggagtagctcgggactggctgggcacctttctctttctgtcattagtcaaaaggcccttccatgtggtctccctgcatatgctggtttgggcaatcttacggtatggcagcctcagacttggcagcccagggcacctaaggtgagagctacaaaagcaagaggcagaagctgtgtggctttttcttacccaatctaataagtcacacagtgccacattctgtgcctcattctactcagcaagacagtcgcaagggcctgccgaggtttaaggggatgggatgtgacacataccccactctttgatgcaggggtggcaggttgacgaagaccagtggggcaggaaatattgttgcaaccagttttggaaaatacaatctgtcacatccccgaagaacattttcatccactcacataatcctttaagttacctaaaaattaatttactcattacggtgtcgcccacaaccttccttgctcccttcccacagcaaaatcca

SEQ ID NO: 6818 - DNA, 1046 bp, Homo sapiens
aacatcaggacctctctccccagcagcaacacctggattgagttatttcacttctctggagctgaatctcactgaccatagaagagggcatatttctcagcaaaacagctggaaaattatgctggccttttgtacaagtcatgttaagctccttcaaagaatacatgaacaatctgcattattttaaaggtgaagatgggctttttaagggggagaggttacagctaccagcaaaccagagatttcctccattctgtgaccctccttcctctgcattcttaaggacttggctagaacctgagttttccatttctcctggtgagaatgtgtcttcaggagcttattgataattctgtctttcagcacaactttgtaaagttgaagtccctgccaattgatagtcaccttgtggcgtgatcttgtcagtccaaaagaataaagatctacctttacattcatttagagtgagggatgatgtacagccaggatgcctaagtgtcacctcctgcagttcactgacacatggagtccctttgacaggtgcccgagtttctttttcctatgtattacaacatctacttttaggattttttttttaacctctttccccctttccttcctgttctttcttccctcttttttcttctttttccatctccttggctttttaactctctcctcttttctctctttccctttccacttttcttgtcagcagtttattcaaccaccgtataataaatccagtaagtgatcataaaaataccaatcccaattgcaaaaatggcagcacagcctcagcttggaaaaaaaatttggaaaaacaaactgaaatcatcaaagactaaagaccagatactaaaaagatgggatttgctgtgagatatattttataataaaaattctgctataaagaagcatctttttatttttttccttgatagtctgaatagtttatacctgatgccaagaaattatatataattagtctgggtaatatataatttccatttgattatatatattaaagtgattaaggaacttca

SEQ ID NO: 6819 - DNA, 1050 bp, Homo sapiens
cattttatttatcataatacctatcacagccagtctttaaaagggctctttgtaaatttctgtccttttccaattaaatactgagcttcatgaaggcagaaatcttgccttactcattttaatatctagcagcaaccattgtataagtcctcaataaatttcttttttttttttttttgacacagagtctcactctgttgcccaggctggagtgcagtggcgcgatctcggctcactgcaatctccgcctcccaggttcaagacattctcgtgcctcagcctcccgaatagctgggattacaggcgcctgccaccatgccaggctaatttttttgtatttttggtagagatggggtctcaaacttctgaccccaagtgatccgcccatctcggcctcccaaagtgctgggattataggcatgagcaactgcgcccagccctcaataaatattttgttgaatgatttgaattttcttctccaaagaaaaaaccatgggcctacaaggaccccaagtcaaggagagaaccagtctgaagcaaagtaacaaggactaacatttaaaatagtaattatttttatcttctgttgaatttaaagctacccacagtgatttaccagttttaattcgcagaaaatgcaactttgctttttttcccttctgattatgttcttcattacaaatctcaagagttttatatgcagttgccaaaaatctctcttttgacaaattgcacaggaggcattttgagattgtgtgatagactcgattgaatttaggccaaatcctgtacacttgtttcactcaaaacaaaaatacagatgtagggctactcaaacatttacctatttattttctcccaaccctccaaattcatctttctttaaaaacaatcaatcggattccttttaaattaaatgccgagtaaacaatgcaaataaaactattttgtttgctgagaagtaattgaaaatctgcaactaattacaaattggcaagctctgagcctacaaagagctgaaacactctgctgaggcattgtttacagctg

SEQ ID NO: 6820 - DNA, 1053 bp, Homo sapiens
ctgttttctcaggacaagctcaacttcacttcctcccgccttatcgaaccctttgtttccaaaattgttaatcaagccacttggggggttgaactcaactcctccctcccaatatcctcccagctcaaagtaatgagaaaaacaattgcccacagtgaggatgtccatggtccccattttccccagtctatcatgccttagacagatactgttgaattttgtcagttgcatgtcccacatgctaatggtggttatttggacatctctgcttcaagcccagcttaaaaaaccatatggccccagattcttcaatgccacagctatggtgctcttccatgttaagagacttaacagatgaaatatggttttccgaacctcttttcatttaccatcaaaataacaagcgatgtcttgtatttcaacagagacattcttttcactcagttactctgcaaagaatgtgcccttgtctctgctgtagatttttattttatttgtaaattgtgcgtgctgcatgctacggaatactgaaaagccatacaccctggcttgttggttgacacatagtatgtgtgattacagattgtttgaataacagtggactattgaactgccatccagatgtgtgtggagttaactgtgggaatgtccacaaaggaggattatctttcttgttgctggggccaaggcccccagaaagtggaaacataagcatggcagctactcaaatagaacagtagctacaattggctcttcagaagcaaaattaatcattttttttaaattatgcattgcaattaagactgggtttgttctctaaaagtaaatcatgcaaagaaaatgccaaacaataacacaaaaatttgcagctttgaatgccctttgtgaatggtttcgtcattttgtttttaaacgtttagaaattcagaacattgtagattaaagataagacctcaaccattgcaagcctccgagccatcatcttgtagacttgatctgtgtttcctgcactctcttccattctttgtactgtacaggatactgtaagcattg

SEQ ID NO: 6821 - DNA, 1055 bp, Homo sapiens
ttgggaagctgaggcagtcagatcacttgaggtcaggagttcaagaccagcctggccaacatggtggaaccccgtcctactaaaaatagaaaaattatctgagcatggtggcacgcgcctgtaatcccagctactcaggaggctgaggcaggagtatcacttgagcccaggaggcagaggtttgcagtgagccaggatcacactactttactccagcctgtctcaaaaactaaaaaacaaaagagtgactgttaacggatattggggtttcttttgcagtgatgaaagtcttctaaaattgatattgatgatgattgtacaactcagtgaacacactaaaaattcttaaattttaccctttaaatgggtgaattgcatggtatgtgaatcatacctcaataaaactgtttacaaatgaagatgaatgaagatattttcagataaaaaaatttttaaggtatttgaaggtgagtttttaaaaattatacttaaaattaggatatcttcaaaaatcaacatatctgaacttttttaccagcgtagaaaaaagggggaaatgcttttcaatttaatagcttatatcttttttttctttcctggaatgaaagatctgttacttgttcaacagtgtcaatgctttctatctctggttggaatctgcagcagtcagttggcacccagccatcaaatacctagatttacctttgtgcaataaaagtccctttagcaatgcatattgagatatatcattttgaacctattttaaattctgtagcaagcaagtaaaaaaaataaataaatcatgaaacatcaggcaagtcaaaggaaacaaagaaacgaataggaaatcctctctagattccgttcccactttactttctgtagtttgatctaaagaaaaatgtggaatttcctgcagagtgattaataggctaatgtggtgactgacaggcactctgagcttgacctggcaggtaaaggctaactggcacgttaagttgattacacaatttcctctaaataagttgacaagtggtttgcacagttgccttgac

SEQ ID NO: 6822 - DNA, 1024 bp, Homo sapiens
tgtagccacttttgtaaataggaccaataaaggggataaaattgtccatcactccactgaaataaggaaatagagcaagaacctaggagttatagtactctactagagattacacattatagaatagtgcagaaagcaagccacatgaaagggtcaatttaatgtcgcatcctgcagaggtgaggagttgatctccaactattctcattggttacacaatcacattgaggtatttaaatcctggcaggtgggagcctttgcttcctttgctcaacggtgaattcacatggtggtgtggtaggcagaggttgcacggcattctctaatagctacaacttacctagtcttatccagtataggtatcagggaagtgattacacatgttcagatacatcaatttaacagtaatcaaagagttcttttaacttagaactcagggaagtcaggtctgtcttctcaagctgagaagaaccaaagtcatggtatagacataaccatacacaggtaatgtaaaactataagctgaaaacaggtatagaaaaaacacgagaagatgcagttatgagagggttgcagatgctaatgaccagttcctcccaactaagctgtggtgagacccagagtcaggagctaccaggactgaatccagcctggctccagccagggtccccttctctgttgtcatactgattccattttgtcctctgatccccctctgtcttttccaggtttgtgctattctgattacattatcgactagtctgaagcagagctgatatctctttaccggggagtcagcttcaccagccacagctgctgaaagaatagcttggagatttcacccactgcatttctgttgctcaaactttttgacctttgtgctatttgagaaatctttgaaatgctgaaggtatgattctccttcagggggaacatgctttggaaaaacgcccacttaataaaatgtattttctttctgctgtggctgccagggtttttataaggcccatttgctttagctagg

SEQ ID NO: 6823 - DNA, 1306 bp, Homo sapiens
accagtccaggcacagtggctcacgcctgcaatcccagcattttgggaggccaaggcgggcagatcacaagaccaggagttcgagaccaggctggccaacatggtgaaaccccatctctactaaaaacacaaaaattagctgggcatggtggtgtgcgcctgtaatcccaggtaccggggaggctgaggcaggagaatggcttgaacccaggaggcagaggttgcagtgagcggagatcgtgccactgcattccagcctgggtgacagagcaagactccatctccaaaaaaaaaaaaaaaaaaaccaaaaagttggaaacaatacagatgttcattgatgtataatattaacttcacatttgatttaagaatgcagaaatcggacatagaacccttgtcagcactgctttattttagtgataattgaaccaattatatacgtgagcatttaactttttttattttcaaggctgaaaaaattaaagtcaacctcttactcaggctcatgcataccatggactgtatgtcttgaggaatccgctgctatttaacgaagtgattgtgagatctttgctcttctgtgaggtgaaaaactagaaaattgcaatgccatgcccatgtttgctgaagtgatcacccttagattctgtggggcttatctcttggtataatcagcatggccctcttaaatagagctgtcttaaaaacacagatctactggtaaggtttgttttaatttcggtctaacagccttaggattacccctcaagactatatcgtcaggcttttgtacaaacaaggagcttacacaaaactcccattatgatggtggtttgaggggaggaaaaagccttgtttgcttgattgagttatgattgtatagggaacaaataaaggctttctttccttaaacataacaattatgtcttactctcactaataatgccacattttcttttaaaaaaatatttacacagcctgacgttattcttaatgtcaatgcaatgtgttacctctaagttaaaatccagttttaatcctataagctagaaaaataagttcgattttacacaactgagtttggaaactgctgattctgttgctgtatttattaccagtgcttgttctctttccctcctgctctccctcctctctctttctttctctgtgtgtgtgtgtgtgtgtgtgtgtgtgtatgtatatgaatatattaatatatgtatatgctgatcttgtatctttgtgtatctatacacgtagcaatcttgttcttgccataagaaactatcttattttgttttctgaa

SEQ ID NO: 6824 - DNA, 1045 bp, Homo sapiens
tacttttgcgatagtcaatctgtgacttcttcagtgatggtaaatgtgcaatctgatcttttgaaagaataaacagttccttgttaattaatttatacagctgtcagtgcagctttctctgtcttcgcactctaagtgtttccctgccatagattttcttgccgtttctggcaaacctccagtgagagcctgggatttattaggctgacttggtgcagagtctattgattgtggccccgagggtaataactaaatagagctggagcaacaagtcaataacaccattgttgctgcagcctgcattcactcgaggagtaagattgttttacagcagccgagggtaatcgtgggcagatcagtgtgttcaacacgcgctgcaccgtgttagtgctgaggactatttgaaagctttcagcgggatcactggagaattggggtggggtactgggattatgaaccctgtgaactccttcattacagcttaaaggtttcaactttagtttttaacatctgctgcaaccttggggagctcaggagtaaggctggtgcaggggagtgcagaaacaggctctgggccttagcactaggcggtctgttctggtctgtgtcccggaaacaagatggttatgagcagagagattatctcacagctgctgtctgacatccatccgtctatccggcctcccatctgtgtgaggtgccagccagtggcaccatccctacctcctcatcccccaggatgcatttaatgtaaaccatctaaacagaagaagccacattattataattttctcacttccaaatcttgagttaggctgacttaatttttttttttttttttttgagacggagtcttgttctgtcgcccaggttggagtacgtggggtgatcttggctcactgcaacctctgcctcccagaatcaaggaattctcctgcctcagcctcccgagtagctgggactacaagtgcgcaccaccacgcctggctaatttttgtatttttagtatagacggggtttcaccatgttggccaggctggtcttg

SEQ ID NO: 6825 - DNA, 1062 bp, Homo sapiens
atttagtatttcttgtacagcaagtctactaaaaaaaattctcttattctttgtttatctagaaaagtctttatgtcaccttcacttttagtggatagtattgctagatatagaattcttggttgataagtcccccacctcaccctttttgacacttagaatatgtcattccactgtcttctcttccattgtttctgatgagaagtcagccattaatcatatttgttatttgcctgtgcatgatgagtcatttttgtcttgctattttcaagagtttagctgtcagccatcatttctaccaacatatttatctgctactctctctcctcttcttcttggattcccattacacatatgttggtatgcttgatattgtcacacaggtctctgaagccctccctgttcatttttcatcagtcttttttcctttttcttcttcagattggataatttctttagacagattttcgagttcataattcctcttcatttcatttactgtatattcaactgtagaatttccgtttggctcttttttataatttctctttctctgttgagatttcttctttgttgaggcattgtcatcataatttcttctaattctttaagcataattttcttcaattctttgaacatatttctaatagctgcttgggagtctgctaaatctaacatcagatccactcagagtcagtttctattgactgcttttttcccctgaatatatagatcacacctttttttctttcctttttttttttttggtggttgttatcatgtcatttttttgttgaaaataggacattttagataatatattgtagcaacacaagagtctagtatttttaagtagcttttctgaatgtagtctctagaatctgtctccgctgcagtctactcagttgttgcttttttcttttcctcaagtcttatctttattttatgaggctggtttcctaggggttgcccctttgtgtgcatagcttagtggtcagccaatgactgggcagagattgtattcaaaaacctccaacccataaggcttacatcctctgcagt

SEQ ID NO: 6826 - DNA, 1158 bp, Homo sapiens
aagaatgacagagtgaaaggtcgctgtctctttgcaagacacaggctgccttttgacttagtctgtatgaagatccctcctaattcatgggtgattttcctactcattgctgccaaatacaggacctgagagagtgatcaaaggccacactactccttggcaactagttttctttatcttcatcaaatccacaaatacggttcttggtgcccatcctcaagggtgctgggttctcatatgtttactgccattttaaagatggataaactgaggcactatttgttctccggaagatcacacagcaaattgtaagtagaggcaaccctacaaggctgcctttgctcctcatcctccaagagagacctctggctttcccattccaggcctcctgacctataacacgctgcatagaaaatgcacaccatcctcccctagagtcaccagctgggcttttccagccacgtgctgcagaccatgccaaggtcagggggctgcagatgtgtggtccagccctgatctctgcttatgcttctcgtgagagtccatgaggcgcgcacaggctggtttctggctcctgttgacccctccctggcctttgactccacggttaggaatcggttatgggctaagttggatgatctcagtgtagaccctagttattgatgctgccacagaggctgaacttcaggcttctgagagccgcaggggtcaagagggctgggcttttcctgcctccaagggaatctccaggagggtaaggcagggatgcgctcaccaccactccctcttccttttaatttcttccttagtaactagtcagaggtcgcagactgaaggcccacagggtgagtctaccccacagatgtgctttctttggccatccagtgttttggaaaactttgactttgttgccaatatttaaaacttgggagatttcacaaagagaacaccatttctggcttatcttggtaaatcagaaggtctcagtcccagcagcagtcagcagcagcccctcgctttagaaaaagggcagatgcccctgttctcccagtccctgcccctgatgcctacagcctgcagactggatctcccccaccctcacaggactttcttccttggttagagggaaggatatgtcttcccaggctggcaggtgat

SEQ ID NO: 6827 - DNA, 1075 bp, Homo sapiens
gctctctcagggaaccaaccctgccgacaccttgaccttggacttctggcctccagaactgggagacaataactttctgttgttgaagccgcccagtctgtgggactttgttatgccggccctagcacactaatatactgactatctggccctctgcagacagagcgtgctgattcctgttgagctaagtattaagaaaaatttagaaacagggcgaagcgactccagtcctcactcaggacctaatctagatatgccagggctcagggagtggatgtggctcctcagttccttgctggagaaagtgctcatctccctgcccatcaaaactcatccccactgtgtcccagtccctcaggtctctcggatgactgactacacctaaattgatgttagccagtgggggctactaatggctgatgatggcttggtagattggcccagagatagcatctagttttcttccctttttttttattattttatttttgagacggagtctcactctgtcacccagggtggagtgcagtggcaagatcttggctcactgcaacttccacctcccgggttcaagcgattctcctgcctcagactcccgaggagctgggactacaggcacacgccaccacacccggctaatttttgtatttttagtagagatgggattttaccatgttggccaggctggtctcaaactcctgacctcaagtgatctgcccacctccgcctcccaaagtgctgggattacaggcatgagccaccgtgcccagccttatttttttttatttttgagatagggtctcactctgtcacccaggctggaatgcagcagtgcaatcgtggctcattgcgatttcaccctcaggcttaagcaattctcctgcctcagcctccttagtagctgggaccacaagcacaggccaccacacctgcctaattttttttaatttttcacagagatgagggtctctctatgttgcccaggctggtctcaaactcctaagctcaagggatcctcccacctcagcctcccaaagttctgggatttcaggcatgagccaatgtacctggcctt

SEQ ID NO: 6828 - DNA, 1049 bp, Homo sapiens
ggcaacatcattccagtctctgcctccatcttcacgtgcccctctttgtcctctcttaaggacaccagtcatcggatttagggccaccctaaatctggaatgatttcctctcaagatccttaatgaagtccagctgtggtggctcacacctgtaatcccagcacttcggggaggccaaggcaggaggatcacctgaggtcaggagttcgaaactagcctggccaacatggtaaaaccccatctctactaaaaacacaaaattagctgggcgtggtggcacacgcctgtaatcacagctacttgggaggctgaggcaggagaatcacttgaacctgggaggcggagattgcagtgagccaagattgcaccattacactccagcctgggcaacaagagtgaaactccgtctcaaaaaaaataaaaaataaaaataaaaaagatctctaatgaatcacatccacaaagaccttctttccaggctgggcatggtggtggctcagcatggagctcatgactgtaatcccagcactttgggaggccgaggcaagaggatctcttgaggccaggagatcaagaccagcctgggaaacatagtgagaccctgtctttacaaaaaatttaaaaattagccaggtgcggtggtgcatgcctgtagtcccagctacttgggaggctgaggtgggacgatcacttgagtccaagcgttcaaggctgcagtgagctgtgattgcaccactgccctccagcctgggcaataggccaagactctgtctcttaaaaataaaaaataaaaaggaccctatttccaaataagatcacattctgaggttccaggtggaacctcatgaatttgcagggacactgttcaatccagtacaatcagtatgatttaaagtaagaggctgggtgcagtgcctcatgcctgtaatcccagcactttgggaggctgaggtgggcagatcacctgaggtcaggagttcaagaacagcctggcaaacatggtgaaacctcatctctactaaaaatacaaaaatcagctgggcgtggtg

SEQ ID NO: 6829 - DNA, 1011 bp, Homo sapiens
gagaatcgcttgaacctgggaagccgaagtagcagtgagccgagatcgcgccactgcactccagcctgggtgatagagctggagggaaaccctgataccacttctgggtccagatggctgtggctggaatgcggccacagccaggaacagcgtggtacggataccagtggggctctggtcttttcccagaggctggcacctttcatgccgagttgggcctcgggtctcggggctctaggccctgctgtgccagtggcctgatgtgtggccttatatgccagtcacaccctgctccagacctcggtttcctcatccacaaaatgggaaagctgggctagaaaatctctcaggaaggtaggtctctgctagctcccagccttccatggcagtgcaaagggaaccttcccaacaaagtaagagccaaaggctaagatggcagtctgtggtttgtagaaccttctagaagaccacgagacttggtaagctgagcttctaagtggtccaggatgcagggctggtgtcacaggtgtgtgaccagtagagctacacagggctttgtgcccagaagggccccacgcttgggaaataaggctctgcagtcactgtcttcaaattcttaataattttatctttgtcactgtgttttgtaagtgaagtccaatgggacagtggaatgtgaactgggagcatggagcctcccatctccctgcgtccaggatctgcttctcagctgcttgctcctctgcccccacagctccagctccagctccactcaccttctacctccctgcctcccacccagcaaccactgccaacctgcccccaacctgggcacaggcacaccctgtgggggagggggacaagcacaccccacagcatctcagagtggggcatggtggcagcagtccccatcctgcactggcagcccagggcacatttcatgtgggactctgcgggggtgagcctctagccccccccagatccagtacctcgtgtgtcctggtacaaaat

SEQ ID NO: 6830 - DNA, 1031 bp, Homo sapiens
gttggggcaggggcctgtgggaggatgcctggctcaacctcctgccctaggcctggagcacaacatgtgggcccagcagctcacaggaaagggagccagaagatgggttcaagtgtttgtgtgttccccaagtcaccagggtgcctgtgggggtctgcactcccccaggagaaccctcatgtctagggagcactccatggggtcatctccatgcctgagaggaccctctcttccttctttcaaccttccggagcccagcttgtctcttccggccaggtcaaggtatcctcctgagagaaccgtgaaatacagtgtgccgctttgataattccacatgcatgttcaatattcggatatttccagttaaaactggcattgcacaatataaaaaggaatggtaaaagtcatgctaataatttaaaattttgactttacttagaatggtattaactagcaaatttaaaacaccatgacaaattgaaagtgagactggggaagaaagcaaaaagcatgttttctgactgtttgaacaaggggccccacattttcgttttgtagtgggtcctgaaaattatgtagccagtcctgcctggtgagccacctaccctcttgggcatttagttgtctatcagtaaactagatcattaacactgcgcctgcccctcctgctcacgggcacgttaggaacatgcgcttggataaaatccaagccagagatttagaaaccagtgtgtggtgccagctctcagccttggaaccacaagcccatttttcttaaaaagggatctggactggcatccaaagagatttcagtcccctcatataggtttaaccaccatgggcaaggcagtctctctcccaggtattcctctcactaggtgctctgctctagaaatgaagtctaaaagcagccccatcaatacagaacagagttagaaccacccggagagatttaatctggaatcccagcaagttgtgaaatggaaagactagtcggccagagagctgaggtctcacagtgtgcaaagacc

SEQ ID NO: 6831 - DNA, 1034 bp, Homo sapiens
agatcccacaagccatgcgctgcaagtctaatgatccagaggctgaggtttcggccgctgtacactcagcagccccgcgctcttgccggccgacaccacagtgtgggaatcgagaatatcggcttcggcttggaatttaaggaggaggagagaaaaaggatagctcggctggtcttcaatgattttcttgtaaaacttttacaagggagacttaggctgtttgatgtgttctagacaatcaaatgcccgccgagtctgcggcagagagtggctggttttctccctagtggaggagggggtgtattttgatgtagggcaagttcaaaacccccaaagccttgcacgctggtaggtcggattacactcgcaagctgggggaaaatacaacacgtaaaatgtgaaaaagacctctgaccctgaaagtctcattctgcccaggccagggctgttagtgggctcttagttaggctggagagggcctgggtatcatttaccccatggaggcttctgccctgcctgcaccccgtcgggcccctatgcattcctgctctcacctgcacttcatccattttagccaaaggggccctgcccaccaagctgcccagcagcgcatccacatcagacttacttcttctctttctcagaagaatgaagggcggcactgacccaagttggctccggtggagttgtgaatatttcaaagctgaggcttagatcaaaagtcataacctctggctttcagactgtcctcttcccttacctgggtggcccctgcatccaatatggaaatgtttcccagagaatctcactcattataggtgagcggagcctgaaatgactcattcagcagaaatgtggcctctctcagcagtggccacgggagcccatttgaaatgcaagaggctcctctgtgggcctgccaagctctgtaactcagctccctcccagccctggccctgcagtaattctgctagacctggtgcctccccttgcagggtaggcagtggggctttggcaggtgatgggtccatgga

SEQ ID NO: 6832 - DNA, 1033 bp, Homo sapiens
gcaaagccagaatgcaaagtttggtctatcttaaaaacccatgctctagactgggcacagtggctcacacctataatcccagcactttgtcaggccaaggtgggcggatcacaaggtcaggagtttgagaccagcctgaccaacatggtgaaaccccgtctctaccacaaatacaaaaattagccgggcgtggtggcatgtgcttgtagtcccagctacttgggaggctgaggcaggagaatcacttgaacccaggaggcggaggttgtaatgagccgagatcgcgccactgcactccagcctgggtgacagagtgagactctgtctcaaaacaaacaaacaaacccgtggtcttaacaactatgttattaggcaacactgaggaaaagctgtgagtttactgagtgagtagtactatggtgttatcccaacttagccaattgaagaaccgaggcagtcagtggttaagacaacctgcccacgttgttgcaggcacccgggacctgctgggaaggtcttggatggtagatctctgcagagagtgtgaactgccaagggctgctgggtctagaagagagggcctggaaggtgttggagtctcggatgaacagctctctagtaagggcagacaagatgatggtagaaagactttaggctctgaagggtgcctccgtcctctttgtaggtttgcccttaaacccagtgtgactcggtgcaaacctccatttcaggtctgttttcctttcttccttcccttttgctcatcctcgtgcagagcccagggtatttttggtgttttgttttttcactttccctcctgcactgtgtgactgcggcagaatgttccgggaacatctagttagagatcacttcgtgtgctccaaggcctggggacatgctgtcctcctggccaggcggccgccaggaactgttaatatggcagcagcactggcctcccggggctaaggaggcactgaatgggcctggctcagtccctcaggactaccctggaggctctgtaggcagaccagac

SEQ ID NO: 6833 - DNA, 1044 bp, Homo sapiens
ctagtgggacttaacatttcatgaaatgattcactactaataaacaaaaaagggaggagggaggcctcatgggttaatagtttctttcattgtagatgaccaggaactttgaccagccccttcacttccccaagctctctgaaagtggagggttgatctttccttttgaccacttttgtcgcatcccgtctaagggtggctgatttcactgctgaattaaccaccaagcacccccccaccccctcccccagccaccactttctcaaatactacccttccttttccccctcccttaagacttatttctaatatttctaaagtgcactgttttgggcctctccccatccccgccccccaagtgggctttccttccgccttcctcggctcggattcctgacttggtcgccacccccttctcctcctctcccaccccgcattgtctttctgaaaccgccccctcccggagcaagtccctgcaccctcgcccagaatcccgggctcgcacacactccgcgcaggccgctccccctgcacactcctccctccgtctccccccggcttccccgcccctctcttcctccttctttccctcctccctctcccggcgcccgaaaggatcattgttagccgcccccgccccgcccaccccggctgtttatttatgcacacgtcactgggccggccccgccctccggcatctcattaaggcagtgtgttcctctcgccctgtcaataatctccgctcccagactactccgttcctccggatttcgatccccctttttctatctgtcaatcagcgccgcctttgaactgaaaagctctcagtctaacttcaactcactcaaatccgagcggcacgagcacctcctgtatcttcggcttccccccccctttgctctttatatctgacttcttgttgttgttggtgttttttttttttttaccccccttttttatttattatttttttgcacattgatcggatccttgggaacgagagaaaaaagaaacccaaactcacgcgtgcagaagatctccccc

SEQ ID NO: 6834 - DNA, 1028 bp, Homo sapiens
atggccgagggcttgccggacgggagtcgatcagatctacaagtgtttttaagcattaaaatattaactatcaggtttgacttgcttttttgggccctggcaaaatggcaagggcatgctagaccggtcattttttttatggctagggaagagaaataattattccccccctgcccggcgcccagacatgcttgggaagctgggagagcggttcggctcaacccccttctccagggccagttccaccaggctgcaggggccgcgctctgggcttgcagctgtaggggaagcacagttcgcttactttgtatttttcttgggagcttgtggggcatcttaaacgggaccgttcggctcagaatcgcagtgttcgcctaccaataaaccggaccaagcaacattccaaagaatccctgagaatttctgcctctcctcccctcccccttccgatggaaacctccctggtattattttaaaatccacttaaccatctgaatattgagctttgatggcgggcttgctagctttcttgactctttttaaactcgctgtctgatactggcaatcttgccatcccttctcaaacttgagcagttgtgttgtcttgtaattagcaaacagggaaattgctaaaggcaaataaatgatttcccggtgagaaaaggaaggctcccaatgatcggtcccttttgtgggcattataggaatagacggcgtctagttattttaattgtggacatagcgggtggcctggtgctgtgacatcagattgagtctcagaacacatttctgaactcagtaggcagttttagtacttacatgtcaaacaccagcagacatctttgtgtacactgccccttcgtccttcctccctgttacctgggttagattatgtgctccaaaattaaagttatttatttaggctggtcagcagagcagtggaaatgaggatggtaggctgttgtgtgtcattcctgacgtcttcaatcagaaggccagcttgcaatccagatttgatacagctgcgg

SEQ ID NO: 6835 - DNA, 1028 bp, Homo sapiens
aattagagagtatcattaaatcggcttatgatgaataatacattatctcaagaataatgctttaattgctgaagacaccataaagcttgatagtaataattttattttaaaatgacaaagatttctgcataatattaatttagtctttgattcagtaataggaatggcttttaaaaagacagattcagatacaaaactgcattaaggagaggtctagttaagtagatgggaagtgttagaactgcaaatattagaactgtggtaacatttgtatattaaagataagaatactgtaacctattaaagttgattggaaaaagtagttttacatttctttttccctcctggcaaagtggaaataggaatatggtggttgaaattccagttaggtttgaaatttctttttaaggacttgattattcgagcccttgcatcttctcttatccaaagttatttgcttttcaaccgagctctttgctactaggttgaacagataaataagctgcatcttgaattcatttttgaacttggaatccagcatttaaaggaaaccgagaggggcctattcattgggattttatttagccgggcaacttctctttctggcttgtgaaaaatggacgttttttcctcactgaaacaacataatcctttctaatacaaaagatttagaccttggagtgtgaagggttaatggtggtccttcccagttgtcctcccacccccccacctcacccctgattgttttgacaacacttttcaaagtgtgacattccaagcccctacataacaatgtaatattactgtaattacacaggtcattacattttaaatagagaacaataaaatgcttatcgccctgaaaaagaacaggtgttcttacccttctttggtatttatgctaattgtttttcatctccttcagaaatatttatggcgaacatgtttagatttcaatctcaatgcaaccgtattaattccatgctaatctttataggttggggtttaatgtctgcagtatggattat

SEQ ID NO: 6836 - DNA, 2072 bp, Homo sapiens
cttttcccttttcttttctccctttttcctttctttctcttttcttaattccccccaacacccccaccttttttttttttttttttttttttttgagattacattgcctatattgtgcattttccccaggaatacttaaagaaacctggtatgggagacggctctttaatttatatgatgttcccctgagtggaagggaaaatgtacacattacatagtacactagttaaactagttaacgtgagagtttttaaaaaagtgagatgaggtgaagagagttgactaaaagaatataataggtgaggggaaaaaaaatccaggtttacactggggatgggagggctgcttatttgtgaaaaatgtactggtatctgcgggaggaggcacagaaaagtagccagaggagacagaataaatgcctaagaaagataagaaaagtataatacaagagaacaaagatttgggtttgggggaattgaaattggagattggaagtttccttatggaggggcgtgggagtaccctgggctgggctattaaaaagggatattgctttgctcagcaaagatgggctgcgatcccttcattacccagggtgttctacctagccacagatgtgtttcctatcagttactgtgtaagcatctgagggtgaggcattatctgtggtggagactggagtgtgagagagaaggccagttgtcctgctgattttaatttatgttgaaaaagtgggctgttctggtgtattacaaactgactacgcggtataaggaggaagtgagattcaaaggtgtttgccaggccaggagagatgatggctctcatttctgactggatccttccttccatccaacccaaacttaaagacccaggccgaaaggttttcttttctaatcaatggcatgcagaaacttactagccctcagggatagatatgaatccctaaacagctcattacaaagaaggggctgtgggatctttgaacgggttatcagccgaggtgttctttgcttttcccaagataggttttttctccttaggcacatctgatttcgggctagtaattcgacctgttatattttattctttttgtcatgcagtagccccaaccaggtcggtctacggaggaaggaatggccaggagtggcatcagccctgaaggagttaaaattgctccctaaagtttggcatcatgaaaataaatttgaggcctggtaggcattagcagggcacagcacatttacagagcttaattagtacgcactgtaattgttcatggtctgccagaagaagtaatgttcaggaaaagtggagtccctctcttgcagtcttcagcttgaaaccgataaatcacttgcatatttgtgtagtgattcaaatggagctaagacctctcccatcccaacatgtggtaaattgtaaagtcaatgaattgcagatgtaggctacagtgagattctctaagaaaatgcagaatgaatgggaaagagtgacgctataaatatttactgagaagataactagattccttcgtgctgggccaattatgatgtactaaaatatattagtaaaatgcttaaaaaattgagaggatttgtgtgggtctttgggtgggttggtttgttttggaaagtgaaataaaaggcactatgttgttgtcgtgtcagttttattaagcctgaatcacaatggcatacccagggaaggacacatgaaacccacattaatgcaaattaattcgttatgagttgcagcactgcgactgctaagtggagtaatgatggggcatcattttaagagttttagtgtagcaacttttaatgaaaaatgctgtgttaggaacatgtctcagcacttcagcccacgtgtttttctatatgctagaaatatgttttgtacaagagcaggaaacttgattcactttattttttcccccagacagtttaagagctttaattatgttttgacgttgaaagaaaatcatctagtttttctcaaaaatcaacccagaaatgcccatcaccataaagaagttcaagctcaactttttttttttgcgagactttgca

SEQ ID NO: 6837 - DNA, 1063 bp, Homo sapiens
acttagacacagaataagctgcttgtgctgggtgtgtttgtgagctgggtgaggttttctgtgtcgctgggcacgtgagggaagttacgtggctggggggtggggtggggggcattagaagggagtatgggtgtctgtgggcgctcgcgtgtgcgtgtatgtgtgtgtgtgtgtgtgagagagagagagagaaggtaaaattaactttgtcctatatgttggtttctctgctagagtcttaaggaacttgcagctgcatttttattgtttcaattacagcattctctctaggattgttggtgttatttgggtgatgatgaaggcaaggattaagaacagaactggacaagtgaaaattgaatttggattaaccacagtttgattaatttattcataagattgtgactatatgaatttttttcaacaacatatccttagttatcaggtgtccactcaattttaattgacaatataagattcctatggtaaccctgtgtacagattgcctaggggctctgcagggattgtgggaagagaagcttggacaagtttccattaagatctgaatcaggcgattggaaaagaagagaataaaaccaactgaaaagagagggacaagttgttagtgttgcctactctgctttgaaggagaaccctcctcagacaagagctactttctggccaagaattccaggctcgcagagaaacctgtcccaggcacagaagttgttttaacatgatgcagaattgtcacagtaattagtgcaatctccgtttactgactggcagtttttacacaaaggagatagggacaaagggtgcaaagtcatctttgtttttcagcaggtcactttacttatttatttttattttttatttttgagatggagtctcactcttaccgcctaggctggagtgcagcgataaggtcttggctcactgcaacttctgcctcctgggtccaagcaattttcctgcctcagcctcctgagtagctgggactataggcgcccgccaccacgcctggctaatttttgtattcttggtagagacggggtttcac

SEQ ID NO: 6838 - DNA, 1054 bp, Homo sapiens
ttgttatgatcatcttatccatagcaacaaatgaaagtacacaggtcttgattgaatgccaaggctgcagttcaatctaggaaggtttgtctgctattcataaactgcttaagatgttttcttgtagtttgtgacataagcagaacgctttgatttggtttctttctacagctccattttcagtccggcagcacacattactctgcgtacaaaacgattgaacaccagattgcagttcaggtaggaaacgcaagagattctgaagcttgaattgtctatatgtaggtctcttgtgtgttttattctccgccccttcccccaactgagataatgatgatgatgatgatgatgatgatggtggtggtggtggtggtgatggtggtggtggtggtgatggtggtggtggtgatggtggtggtggtggtggtgggggggggttgaatcactgggggagaaggggagcaaaggagagagaagcaggagaaatgctgctgaaatgatttagagatatggaaagaaagagaaggctgtgcttattgttaagagtttcttgaccgggcataatgggcacacagaccccagcttgactactgtttttctttgcttagggagggatcttgaattgggagtaaaacggggtggcacaatgtgaatgggaaggcttaaggggagaggtgggagaggaggccgtgcaacagccagagggttgtttctggtggatcaaaatcatgttaagtggtgctaagaatatctctttggacctgatcatcctgaaatgttgatttctcttggacctgtctatgtatgacactaaatgtgctggaagggaaaggcgacagatcccagcttctgatgagtgtcctgtttcctgctcacgtagtacttccattctcttaaatccgaaggctaaacaaatcatggactaatatagactcggagctgaactgatgccagcagaatgcagtagaggagggagagcagactaatacgattttcgtctgtctgcctggccttgctgggatggatgtacctcatggtgtaactaatggtacca

SEQ ID NO: 6839 - DNA, 1074 bp, Homo sapiens
atctcgggtagtgctggaaaatcttattgcctggggtgtgggaattgttgaggttgaataggatagtgatccttatcttggtgtggaaaggctggctggggccatgtcactgggagactagcccagaccagaccagctgttgtatctttacacccgttgctgaagtgccccttgttaggccgagcagttcgtctttctccaaaccacctggcacggtgcaggccatgtgaagctctttctcaggaggaagatggagtaaattacagagctcattgttttggaggactgaaaccattactattcctccatgaacaggtagtattgttctctgcttctatttgctaaggcttgatgcccatgtgggcaaacagagagacattttattagagacccagcaccatgcttttgcagtgttcattctccctcagtctctgctagacccgcacaaggccaagctaaatggcatctagctgtaattttagtttgatcctcaaaggataaatggaaaaagcaaaaccaaagaagcaaagggaaaagaaggggaaagcttagacgaaatgaaattgttcccaaagtacattggggagctcataatcttttcgctctggatgtggcatagagcagatatgttcctttcgctccattctccaacttaagactaaatgcagcgtgattgtcggggcagaattattgtccctggaaacttaaaactgttcaaccttaataaatactagatttcaatagaagctgagcttgttgctctcctaagctacatcctaaaataacccagagtactatgaccctgtgcatcacattagactcatacgactcatactcttttcccttcccatccctcctgtaatctcaggactcagccaagctcactgtttatatgaatggccttgggtgattctatagacacgtcactttcttataaaaggtttggacacaatagcagttgctatgtttagatctttcctacttttgacagcctcctagctccccttggttttgaaaagacaagagcaactcagatggccacgttctcccaaaatggataacacaaatgaaact

SEQ ID NO: 6840 - DNA, 1545 bp, Homo sapiens
gcacccacttacccaagaactgattagttcctaaaagaagcagtgagttgattgcttacagagatgatgtaagctttgctctggggtacatcaacttggatttctcatgctttatcttataaagcctaaattaacagctggtttggtttgagttctctgggatctgactaagggattagagtccattctcaagtgagtcaatctagtttaatttatttcaggtctatcaaaaaagatcaatcaaagctcttttgaaagtaaagctataatcggtctgcacacttataagtcactgttgttgcacttggtgtttctctctggtggaaaaatgctcaggctgtggttaagaggatgtattagagcattttctgtgtacctccctttcttgcagcctccacacctccctgggaagattttgaggaagtgtcatgtttgagaaccccacttaagtgggagctgcactcacctccgtctcctttttctctgggcatactggatccctgttttggaagtttctagttcagtataattttaatacctggacctgaacaagtccagcctgttttatgtcactgtttttgctcctgggctttttcttgcagatattggtgggtgaagacatgcattgaattctttccagaatgtctgctgtgaagaattactcatgtcatttgcaaggcttaagctgaagcattcgctgctatggtcgatctaggcttttgtgggcactggaaacgacaacccgagttgttcatttcttttgtttctattttaaaaatacttaccgagcatcttctggtagctaagaactattcgagatacacttgatgtgccaagagaaacatcaagataaaggaggtagttaagagcttgactgtagagttagacctgtctttgaatcctagctttgctactttgtgactttatatgacctgcagcaaataaatctcagtttccttgtctgtaaaataggcatagtaaaactgtctccctccaaggattgttgtgataatgaaatgaaatgatactgtatcttttgctttttaaataagccacttctggggagcttccaggaagcagaagttttttttttttttttttcccccaaatgcattcaaaataaacaaatctccttttactaccataacggtgtatgtgaatgtcctggcggatgctctcaagagcgtcaacaatgtgggaaagagaagcaaacaccaggttcttctcaggtggagctccagagtcgtccagtttctaagtgtgatgatgaagcatgggtgcattgacgaatttgaaattaccgatcatcacgaagcagggaagattgtgatgaacctcacaggcaggttatcaagtgtgaagtggtcagctggagatttgatgtgcagctcaaagatctaaaaagatggcagaatcatctgctcctgtcccagcagctggcctgcattgtgctgacctcagctggcatcatggaccacaaagagatgagatgaaaacacacaggaggaaaaagcctgggattctttttctaggggtgtaatacac

SEQ ID NO: 6841 - DNA, 1061 bp, Homo sapiens
gacgatgaatcccctctacaagagagggacagggcaaaaacgacacctcttgcctcgcaagctgtcttgggccaaacctcaggtctattctttcttttttttgaaagtagtggctgggcacggtggcttacgcctgtaatcctagcactttgggaggccaaggcgggcggatcttgaggtcaggagttcgagaccagcttggccaacatggtaaaactccatctctactaaaaatacaaaaattagctgggcgtggtggcgcatgcctgtagacccagctactcaggaggctgaggcaggagaatcacttgaacctgagaggcagaggttgcagttagctgagaccatgccattgcactccagcctgggcggcagagcgagactctgtctcaaaaaaaaaaaaaaagaaagtagcagctctactgagatatttagaaaccataaaatccacctatttgaggtgtacaattgagtgattttctgtatagtcacagatctgtgcagtcatccacaccctctaactccaggacattttcctcacccccgaggagaaacctcccttacccattagcagtcactcctcatttcctctccccccagcccctggcaatcactgtggatttgcctgttcttgacatttcatataaatggtatcataaaatctatgggcttttgtgtctgtctgctttcacttagcatacggttctcaaggttcatccagtattgtagcatctatcagtatgtcattcctttttatggccaaataatattttattgtatggatagacattttgtttattcatttatctgtttttggttattatgagtaacactactatgaacattttgcacaaatttttgtattgacatgttttcatttctcctgggtatagtcctatgagtggaattgctgggtcatataataaataactgtttaacattttggggagctgccaaacttttaaaaccttgggttctgtgatgtaccagttgtgttaggcagcacagcaaaatgtgacttttgattgccagaaacaatatttaaaaagtggttataaaaa

SEQ ID NO: 6842 - DNA, 2007 bp, Homo sapiens
accaactcacccttgatcatactcgttgtttacacgaagggaatttttattgtcttgtgagtgttgagtgatgattaaacagaagagatgtgactccaagcctggcttcactaagatagtcttgtttgtttcttttcctccaaagtaatttcctaaagaattaaaagcccctttgaaacccagcactaccttgtctctgattatcagcataggcaggaagggcttttaaggtctgagcccagctgtttagaggctacgagacgtgaggcaaatcctggtatctctctttgggcctcagtttcttcatctgtgaaatggcacagtactaccctccaccaaggatgatgatgagaattaaatgggatgacaggtttcatccccagctcctgttcttaggaaggaaaaactgtgacttatgaagcctgtaggttgtgttcaggtttgtatgaggcctcggacttcatacaaaggtatcaaagtggcaaaccctgatccagatgttttcagttcagtcagctggtccttgagcctgttgtgtgccagatatcctgaccaaagaagctagatgggagctgctgtgttgttccttggggctgctggatgcaagttgtttaggtcggcggttttcaaatgctggtgattttgctcaccagaggacatttggcaatgtctagagacatttagcatggccagtcattgggaggtactcctggcatctcgtgggcagaggctaaggatgctattgaacatcctgcaatgcccaggacagccccctgtgacaggagtcatccagcccaacatgtcactagtgctgcagtggagaagccctggctgtgtgtgggggtgtgtgtgtgtcctcttctacatttgataaggtaactcacacttgctgcccccatgatcgctgtgggggatgcttatctatgccccagtcctggtgttggttgatgggaacatcaagattcaggcaagatggaaaatagcccttagaactagcaggaaaagaatctcctttcatttgtctagaggttctgttaaagtgcctttgcttctattttgagacttgttcttaaaaaaaatgcggatatgaaagaaaataaaaaccacattatccctccactttttcttggaggaggatgtgttgaagaagtcaaagttcaccatccctttagatagaatcattttgaacaatttcatatgtcaatacattttgctcatctctaaatttcattttagagcctgtggtgttctgtgcatggatatgtgtgcgtgtatgcacacaaaaataaaaggaaatatttattcttatgaataagtatagaaataaattaatttttggaatctcaaactatcagagacttatgtaataaccagaggcaggcctgattatgtatgggcaaagcatttgtgaacaatgtctccattgtataacatacaaaacaagcttttcttccacattggatatgcaagtcggccttctccaataagggcctgtctctttccaactccccccacctcccacctttgagcaaacattatttattgtggctgatgtgtgatcaggtcttgatttggggcctctttttgatgccttctctttgtgggatctcacccacgtgcccctggagaccctttggctgccagggcctttgtttcccagccacccatgtggtgccagtagtgtctgctttgtagcgagctgtccccagagcctcagcatggcttggggatggtctctgaggttgggcttggatccctcccacttttgggctcagaaagaatgactgccctctatttccctgtccctgccctctcttatcctgtttcccagcccgcatcatgttatctttgcttcttgtaacttaccaaacgatttatgggcaagtaggggaggtgaagagggaactcatctatcaagataacctactttgtgccaaccactgagcatagcaattgtcccttctccagccctctgaggaccgtggatgggattctcatgaaatgaaa

SEQ ID NO: 6843 - DNA, 1032 bp, Homo sapiens
cagggtagctgtggaggggtgccccatcttgctggtcttaaattttctcactgtaggcagggagcatgacctggctgaattctaagtccttttctactctgaggttcattgtgggtgtgacctgctgggctcagctctggctttgggagacaccctctccccttgatctcgacaaccccttagcagagcccagtggctcctacagtgccctgagctgcttgcccgaaggatgcggttgtggttatctcaccccctgccaccctgtttgcgcaagggtttgagattgtgtggcccctccttgtacttcggggtgaggcttgctccagaaaggtggtctgcaaaggggttggctgggggggaggaggaagtcattctccaagtgtttgtcctcatcgttatcccaaattgcttgcctggaataaggaaggaaagaaaaaaaaatactcttgagtggtttgggccaggattttagctgatggatctggtagttccctctgtcagatttgttttctttgaactgtctgggccggtcacagtgtcattgtttaaatgtggaatgtaggtgttctgtgttctgggaaataaaaaccaaaactggtccaggggatccacagaggtaagaaaagaacattccaataggaatgtttcagaaccaggaggggaggagagaaaaacggctctgttggtctcctagaggaagaacttgttagatttggggagagtcaggataaatttgaccctaagagtctctgattccttttagagacttttcttataagaaataaaatggaacttgggagaggcggcaacttgggaaacagcacattctgccgtaatgaaagtcgtcccataagaatttctctatccctttagccaaatttctgtttctaaaaggggaaaaggggctagagataggcttgtttgttttcttagttgaatcttactttttgtatttccagcccattctgcagggtaagaacaagcacagcccgagggctcactcagtgtgatgttctagagcctggctctgcc

SEQ ID NO: 6844 - DNA, 1050 bp, Homo sapiens
gctgccagaattccccttggattctttagtgtggcttctcaagcatcccttatcgctataacgccttcatggtttttggcataactgtatactacctgtgctattatttatttgatgcattcaaacatttgattcatttatttaaactcagtctcactgtaatccttaattaacacctgtgaaattataggtttgatgtgctacttatttatttattttttaatacacattagtataatcccgtaacggctaaagtaacactttgtactgcctaaaaccatgcttgggagcgccacagtttgagaaagtgcttagccttcctttccctcctttagtgacttgtggtttggggcatctgttgactcctagggctcccttgttcatctttctgttcctaagctcagggattagttgctcaacccaggtgtggcctcaaaattctgctcatggaatagcctcaggcttctataaatctcatcttttttgttttgttttgtttttgtttttgagactgagtcttgctctgttgcccaggctggagcacagtggcgcaatccactgtaaccattgcgttctgggttcaagcgatcctcccatctcagactcccaagtagctgggactgtaggctggtaccaccaggcccgactaatttttaaattttttgaagagatggggtctcactatattgcccatgccggaagtctagttttatagtgatgagaattcatctggggtccaaggggccctcctgtgttgcttcctgtgctcccctctaaataaagatactccttccaagttgtcctgattttcaggtcatcaccattttttgagctggatggggaagttggcctggagcagccttccctgtctccgagttgcattacctcctgagaggtctcagcaaatcactgccatctcttgatcagagttgctggcaagagtcctctgtggttctaggttttcagccctggagactctcgcctgcattcattatacatgtccttttggtgccttgttgaaaggcatctcctgccaccgaagggtgtggg

SEQ ID NO: 6845 - DNA, 1031 bp, Homo sapiens
gtagaaaaatcttaagatgcattctgccattttgggctaactgcctccttattttggagcttgctgtaattgagcatgtgttatttaatgagttatacctctgtcatatgtgtgtgtttatatcacaaaataacttatttttataaaaccatattttgagtcatcatttgtgacaatgtcttcttttctctggtataaatgaggcatgtagaaagaagattgacatttgctagaagcttcccctttcctctaactccacaataaaatggatgctcataattacatctgctcctataaggtcaagatttcagggctggaagtgaccttagatcatttaggcccaacttgccctcaggaaaggaaactgaggcccagagatgccttaagtgaattgcccaatgtcacacgctgagtcagtggccagagcaaggcttggatccagttctctgctccctttccagagccttgtgatgtcttctctcctacaggaggtgaaaataactgctgtggctggttctgttttgctgactgtaaattgggtcatggtcagggacagtgcataggtgtaaagaagttgctggttgggggttctaatgcaggtttctccaaaagtgaatgccctgttaaaaaaaaattcttaacaaatatacagagattttttttttaaaaaagtgtgacagttctagacacctagagagtaaagtgaagaagcctgttttcaggtttcccgcctccctgaatttcccagcatggtccaggctttgaaatttatttatctgcttttggcaatggttgatgggaatttcccacatttattttttagctacagagaaaggacattatctttaaaatctcttcgttgttctctctctttgagtgaggagagaagatgtgaatcctggcagtggttcagagtggacacagcccctgtgtttgtggcataggctctgtgggccccatgccagggagcagtacccccgtgtaaaggagtgggggtttgtccatttggatagagcaaagatcctccacct

SEQ ID NO: 6846 - DNA, 1072 bp, Homo sapiens
gaataagtgagtgggtagagaggacatttgtcaaggagcgggagggcgggccattggcttgggggaaatgggctgagactctaggggtggccagcaccgcatacggaggccagcagggttgggcttggctaagtgctgtggtgtctggatgcctatgtgagtttcctccagaagttttcagttggcaaagtagaacctgctggatatgtagcaagggtgtggattgtcgggatcctgctgggcgcaggcgtgtgataccagaggtcagaacagaagctgagggatgaggctttgggagctttttgtcatgcactgtcctggagcctcagttactacaaagtctgcaaatgatagaccggagctttggttctgcctgatgctagctcccctgttcctgatttttcttttcaatattagacttaatcccagaattcacatgttgaaagaaaacttagaggtctagtgacataaaagcctcattttgatcgttacagaactgatgccttgagaaatggagagagaagtacacgatcatggtaatactggatgttcactgagcactcactagctccaggccttttctaagtaatttatgaagttgtcaggtttaatcctcacaacgcccttatgaatgagctattgttattatcccgatttggcagatgaggaaactgaggcttgaggggaggatgacgtactcaaggtcacacagctgggaggcggcaagctggaagttgaacccaaggagtctcacatcggagccaggactctcacccttcagtgttatgctgccttaatcaggcacacatacaggcggggagaggcaggtttccggacaccagactaggctggtgccggtcaggctacaccagggaacctggaggcctgtcattcttttgtgatgctgttagttcctgttgaggaagtgaggctttgtgggttcccaggaggaaaaggtatgaactcatggcaaaagaaaggaaccaaaaaagggagatttgcatcacaatgagccttctattcatcctaaattatacctccttttataccatgtgtgtctgcaaacttgtgg

SEQ ID NO: 6847 - DNA, 1025 bp, Homo sapiens
aaacccctgtgttctttgcctacccctgctgttgccacatcatcttggagagctggctgcttccctcctcaactagaagttcctagtgcctgcttagttcttgtctcttgcttcccaagtgctcacaaaatacatccatgttcgctacgaggaaatggaccacataaggtttccgtgaaaaccttagcccttaggtctaacacagtaggaacagaagttaatgttttcctgacgtagaagtttctcttgctgcttctggtcacatttctttcttgtgtggttcttctatggctactgcacttttttttttttcttactgtctcccccttcccccacacaccaccttttggggatagggtggcaggtgagaatataaacagataatggttaagagatagtttagtctttctaggccagattatttagtttttgccatctaggtaaaattcggtccaattaagcgtccattaagtgttttaatataagctggagaaggagttgaacctggaggtcagggctctgtggtctattacagtccccctggggtctctagcccaagggagactccagggtcttaataaatgactgggggtttcattttgaggcctttactaccaaagactgaataatacattgggcatgatggttttgtcctaaacattaacagccacaaaaggtagagagtgtgtctgtttatagatacacatgtatcatgaataattagttggggactgtgcatcaggtctctcattttacattcgaggaagcaatgcacggaatgaattctggacctgcgaactctgaatttcaattctctgtctcctacttttactggagtgcttgcaaacagtacagtgtttttgttgtgaagttataccgtgcctgtaatctctctgcgggtggccctcctaagccctacttcaagaaatagctctaagctcatgacacccgccccacccgatgcctacatatgtcttatatccttggagtagtgtttggggttgcaaatttgactttagggagac

SEQ ID NO: 6848 - DNA, 1065 bp, Homo sapiens
aaaggagggcccagggctggccgtctcttggaggggcccgggatggggtacgcccccttggaaggggatggtggttgcggtgggcgctgtaaatgttgtgtccagctcagagggtgcaacagtgtctgtaactcatattctttttttttttttttagacagagtctcgctcctacacccaggctggagtgccgtggtgcaatctcagctcactgcaacctaacctcctgggttcaagcaattctcctgcctcagcctcctgagtagctgagattacaggtgctcaaccaccacgcctggctaatttttgtatttttagtagagacagggtttcaccatgttggccaggctggtctcgaactcctgacctcaagtgatccgcccacctctacctctcaaagtgctgggattacaggcgtgagctgccgtgcccagccagtatctataactgaaggctgtttatttctgcttgcctaacccgtccaggaggatgtgctggggccatctgaacaaccattgacattcagacattatttagaaatggaattgggaagtgtttaaaaggcatagactagtctggccttctgcccattcagagactgtgtatgtagtcagtgtacagtgtattcattgagggcccctcgctggatgtttcagccactccctcacaggttctcgtgtctgcttggtacagttgagatctgcaagagctgattcatcggcctgattgagattcctttgtaaaaccagatattcaagaatactagtggcaagaatgctttggtgagcgtaagatagcggctcccactggatcacatggctggtcggtgtcagggagatcactgtgggaggtagcaggagtcagtctttaaaaaaattattgggccgggcatggtggctcacacctgtaatctcagcactttgggaggccaaggcgggtggatcatgaggtcaggagatcaagaccagcctggccaacatggtgaaaccccgtctctattaaaaatacaaaaatcagctgagtgtggtggcaagtgcctgtaatcccagctactcgggaggctga

SEQ ID NO: 6849 - DNA, 1913 bp, Homo sapiens
attaacgagtggtataaggttcttagccctttgtctggtatctgctgggtgttcagtattcatttcctcgctttccctgcatattttgagctaataaatgtttggggacaccactttcctgtagaatctcatgtaatcccaaacagatcctagctgcttgctatggcccatctgcgggacccgcgtcaaggctttcccataaaggagagccctgcgggaatcatcatgtgccaggcactgtgctaggctctttaggtgcatcttgaaacttaatcctcgtgacattttggagtagatactatcatccccacagaaggtactgaagtctcaagcacattaatagcttacctaaatattgctaagggtcttccagatgatctttaggaaattttcagccaggggagagtgaaagctctatttgctatagttaaagcaaggaaccctccttcttaaaaaattatacagttattgagatataattcacataccttacaattcatccatttaaagcatgcaattcagtggttgtagtagattcaggagttgtgcgagcatcgtcacagtcaattttagaacattttcatcaccttccacaaaacccccgtgtctcctagtagccactccccattttccctaagtcccacagtcctaggcaacaactaatatattttctgcatctatggatttgcctattctggacatttcatatagatgaaatcataggcccgtggtcttttgtaactgacttctttcacttagcaaatggaagggtttttgatggaatcttagctcagatgtcgccctaggcttggccttctggaactcactgttctcttgcttccttccaccctgcctccctacccgctttgctacaagaagacagaatgtagaaacccccagttgactttttgagtagaaatgagccatgttctatttagtggtagaatgtttgctgggttagcccaggacttcagatggagtgcttcctcctttttaataccttgtgactgctgtgttggcaagcagagggttaaatgctgcaggaggacatgggagagtttttgctttgagggtccactggagcaagagaagcttgagagtctgtctctgagatcccagaacagacatgaagatatggtaccgattcccttggtgctaaaaggaactccaggggaatttcaggaaacccctccttttctcgtctttattctcaccccgtccccccgccacctctctccccaagttcacactcaggagggaggaatcttttaccttttccgttctgggcagcagctgtagggaatgttatcagtgttgggactgggcacgggaccaagccttcctggtgcctggactgcaaccaagctgagagctgacatggcagggcgagttgtgtgtgagttggctgcccctaggctcataggcctagcacaatagagaccctgtcaatggagggacactatcaggcaggtcactatcaatgtgacagacactatcaggcaggtcacattggtgcagatccttggaggactcccccccaccccccatgagtggattcctccaggtcaggggctggctgggactgtggatgctggagtaagtggaattgtgggtgcactctgcttcagcagtactctccaaggagaatgattgttttaataaattactgttttaataagggaggtggaagagctttttaatcacttgctttttaaaaatttttaattttattttaattaattaattagtttatttattttttgagacggagtcttgctctgtcgcccaggctggagtgcagtggcacgatctcggctcactgcacctctgcctcctggattcacaccattctcctgcctcagcctccagagtagctgggactacaggcacccgccaccacgcccgactaattt

SEQ ID NO: 6850 - DNA, 1044 bp, Homo sapiens
gtacagagaggttgtgtgtgtgtttaacatttccataatgtacaatttcctctaagagtaaaggccatgaggaaatgcccgtggaagataaaggagaccatgtggtctgtggcaaccatggatacatttctttcccaacgcattctctgaggcactttggtaactctgcctctttgctctcagcattgtgttagaaaataaagccagcagacaaggattaaaccctcatgttgctgggttccttctagaaacaattggagggctaaccaagtcacctttggtggaaggcagtaaggtgagtcattgctgtggctggactgaataggatagccttagctgtaaaattgggctgatctttcaaatggactcatgcttgccgaatgactcacgctcctgtttacaaatcagctctgtgaagaaatgcagagtgggaggctctgcttgccagacggagaccttagacctccaggggtggagaacggagtacttcctctggtgctcggcttcccttcctgggggcagatctctcagcttctggttggtggctctcaaaatccagacacaaggtcagctgcagccagcgtgggccctggagtagctccagttatggggcagcaatggccccctctcattttgagagctcactttgcctgtggatggttttaatccatctggataaacttgaggcccatgggaataccatatactatggtaaccatgtacactgctctaaagatgtggctgctgttgtataactttttcctttatttttgtcaatttcctattttccagagtcttgcatacccactatgtctactgtgatagtgaacgtaaaaacatacaagatgttggtgttatcctcaatctcttattcttaatcctgaacaaattacatgaaaaaatcgttcatggagtttttcttcatataaaactttttacaatgaacataaagggcatagctatttctttttttttaaaaagaaacgtagaatattatttcttggttgtgaaatcgcccttcttggaccccaagttgttttttac

SEQ ID NO: 6851 - DNA, 1065 bp, Homo sapiens
ccgtctcaaaaaaaaaaaaaaagagaggtgtggtggctcatgcctataatcccagcactttgggaggccaaggcgggtggattgcctgagctcaggagtttgagaccagcctgggcaacatagtgaaaccccatctctactaaaatacaaaaaattagccgggcgtggtggtgtacgcctgtagtcccagctactcgggaggcaggaggcggaggttgcagtgagccaagattgcaccactgcactccagcctgggtgacagagcgtgactccatcaaaaaaaaaaaaaaaaaaaaaaaaaaaaaaagtgagaaagaatgtggttttggtactcagtgtctaggacgtctgtttaatgggatggttaggagcgtgtgctctgtactctgagctcaaaccttggctttgcctctgaccagctgaatgaccatgtgcaactcactgtttatgcctaagttttcacatcataaaaccaggacattattttgcctatctttacttattagtagatttgaatgaattacagtatataaggcaagtgacatacatggaaactggcaaacatctgttttttgttgttgttgtttgtttgtttttttttttttttgagacagagtctcgctctgtcgccgaggctggagtgcattggtgcaatctctgctcactgcaacctccacctcctgggttcaagtgattctcctgcctcagcctcccgagtagctaggattacacgtgcccaccatcatgcccagctaattttttgtatttttagtagagatggggtttcaccgtgttggccagggtggtcttgaactcccgacctcaggtgatctgtcttcctcggcccctctaagtactgggattacaggcatgagcacctggccatatctgtattttttaattcacttctttgatttgggaggaaagaaacctgaaccctcttcttagtgggagtgggataggctttaatgttaatactatgcatcatgtattaaaaatccactatccttctggcactggattaagcttttcataagtattattgtttcacccttacagctgcca

SEQ ID NO: 6852 - DNA, 1057 bp, Homo sapiens
gggccctgccagtttcttgtaagtggtggttttcctagatggtcccctgtgcagcctgcgtgcctcctggaggtggggccttggggtaggaggtccccacaacatgtggaaacgcagtaggcatgggagattgaagtctccacttctgactcacctgctaatgggaaaagtgcagactcttgggctccataatggggtaggggttgagaaggtattttaaaagccaggcttagtggggaaataaaaactaaagcagacccacccagagagctgtcttacaactatctattattttcacatggactggggggagtatgggatgggcagagttgagtgcatcttagaaaatccaggtgagaggctgtggccaagggaacccacgggcccggtgctctgaagccctgggctgctggaaccggcttgacggtgtctttctctgttctcctccccacagtctaacaaagtgccagtggtgcagcaccctcaccatgtccaccccctcacgcctcttatcacgtacagcaatgaacacttcacgccgggaaacccacctccacacttaccagccgacgtagaccccaaaacaggtaggctgtgggctacggagccaaggtagagtgctggtcctggggttctgggggaacctttgaggcctccacaggaaccccaggggtggagcagtaggggactttgggggaacggtggtgggggggcccctgttgcttttctgggtgttgaaaaggaagctctttggggtggttgaggcctggtgtggcagtggttttccactccctttggagaagttcatttgcagtgttaaagatctctttatggcttccagtacccctgaaggggctgtcttgggaacctggctatgagtcctcagtatgtttcaggagtggcttttaactctaagagcctcaggcagacatggatgcaggaatcatattgaaggcatttcttgggttcctcctcagcttcctgggaagatgagacagcatggctttccaagcctcggctccctcactggctaagaggctccagtcactacttgaca

SEQ ID NO: 6853 - DNA, 1092 bp, Homo sapiens
cgcctcccccctccccgaacctgctaggctcccctccccgagacgccaagtcacagactgagcagacccagcctctgtcgctgtccctgaagcccgaccccctggcccacctgtccatgatgcctccgccacccgccctcctgctcgctgaggccacccacaaggcctccgccctctgtcccaacggggccctggacctgcccccagccgctttgcagcctgccgccccctcctcatcaattgcacagccgtcgacttcttccttacattcccacagctccctggccgggacccagccccagccgctgtcgctcgtcaccaagtctttagaatagctttagcgtcgtgaaccccgctgctttgtttatggttttgtttcacttttcttaatttgccccccacccccaccttgaaaggttttgttttgtactctcttaattttgtgccatgtggctacattagttgatgtttatcgagttcattggtcaatatttgacccattcttatttcaatttctccttttaaatatgtagatgagagaagaacctcatgattctaccaaaatttttatcaacagctgtttaaagtctttgtagcgtttaaaaaatatatatatatacataactgttatgtagttcggatagcttagttttaaaagactgattaaaaaacaaaaagaaaaaaaaagcaattttgaagcagccctccagaaggagttggttctgtattatttgtattaaatacgagcttgcgaaccaatcattttacatctggtttttaaaccgtaagggcaccatgaatgcagtgccgttactttttttttttttttctgtgtgaaacaactcttattgtgatgttacttgttattgtttaaatgtacagaaacaaagggtaaaaatgtgttaatataccttgttccatggtgttgttcttttggggggaggggacgctactcaacacttaatagaatcacaacgctgttgggccagtagtatttattgctttagagattgcttgtcgtacctgtatgtcgtccctttttaaatatgttttcctttttcttgaaactgtataaagtttttttccccctta

SEQ ID NO: 6854 - DNA, 1030 bp, Homo sapiens
agagcgaattttctctcctgttcacagacctgaggatggcaggtgatcaagaggcttgtgcagggtagcaggtgtcataacctcattgtatcagcttcataccctttctagactgtggtcctgaaccaagaaatggagaaaagcgttgctgagccgttcactttataagtgtttggtttttatgtgtttgcattttccttgttgcatttggagggttgagatggggaaatacagcaactcctggatcgttcactttatgcaagatcattgaaaaatgtttgtatgcctcatttaaaaatgaagggctttggtatgcttccgtggtctcctattatttttattcacttgagtacctttaaaggaaaaacataacctaatgaacttgaactctttaattcaccacacactcacttcctgtttttgttgattaacttacatatagtttgacatgttttgccgtcatgtgagtgccgttttgcagcctggtgtagatttgggacttcggtgggttgaccatgtgtgatgctcatcaacttgaactgtatgatggtttgttctgttgatactctgtctcttgcttagctattcccctgtcgttcccaatttttcactcttaaagattgtgctcctggctgcatgtttatggaaattttgttttcttttttcctttggaccccacgctcacagacagttgcttttttccacaggagccatcccagggttgggggatgctacaatggggagccggggcatttctgccggtcagcagagaagggagaggccagtgtgaccttcccagcccgagtttgaatggtcctgtggaaaactccagcgtgcagttcactgctgattcagtcacaggccttcagggccaggcagcctgtgccagtcttctatcccctgctgagctccgagcatgttgagtttttattattacagagaagaaggaaactcacttcctgtcgtcgcagagcacagcctagttctgatgcagaggggactgttttcagatggagacactaggtactac

SEQ ID NO: 6855 - DNA, 1084 bp, Homo sapiens
ccctcaagccataggtcacctttttgatagacctcagggctttgttttggatcaggtggcaaataattctttttgattcataaatcattaacacaaacacaccaaggacatatttggaaagcccagccaccaccacagtactgaggtggacatggaaactccattaacttgtaggttcatgcatgatcggctctctaaaagtacgcaacaaacatcagaaaacacaaaagccaaatacgatgagtttgcttcggcataacttttggtttttatggcactatgaatatttatggcactgcagttttctaacaaatatttgttgtaatcatttaaagccaaactgtcaaagaatttaaatttggaaggcacatggggttatggctgcaaataaacgaggctgagcatttcgcgagctttaagtgtctgacccaagtaaatagtataagattcgagaaagagttgggaaagaggaaggtgtacatggtgagataggtttggtctccgttgctagttctagcttccgttattttaagtagatctcaattagtatagcatcaaacgttttagcagaggtgcttttaaccattcatgtttaaaaattaggctctgagtctgatccaagttctaatcctaactctgtcatttaaccatttaatactcacataacccacataaccttaggcagtccttcagtttcctcatctacatatgaagatggtaatgtgaaaattaatgagataatgtacatgaaatgcttagtacaatgcctggcacaaagttgtaaccgaaagaggatctggctgctcaccacttacagaaagaagccaaaataacaagaacaaggtgtgatcaaaggagagtgaattttattatccaatgccaacaaggggaaaaggtcagaatcctttctgaaaattgccaccttttcagtttctggagagtgggcaatggtttaagaatagaggcttggaatacagggagggggaggggctcggaggtgccaggtggcatgtttcactccgatggcttatcttaaattattgctccaactggcgaaggggccagcaccatcttgggcccaacc

SEQ ID NO: 6856 - DNA, 1047 bp, Homo sapiens
tgaggtgaatgcgccgtttggaaaccacaggacagtgaacgtttcgtctctcccagcgagactctcccgcgggcccggcggccgcatcgggagcccggcggaaacatggcggcgcccggaggccggggccgcagcctctccggcctgctccccgcgcagacctcgctagagtacgccctgctcgacgccgttacccagcaggagaaggacagcctggtctaccagtatctgcagaaggtggacggctgggagcaggacttgtcagtacccgagtttccggaaggtgaggggctggcgtcggggtgggggcccctcccggcacctccccttcctcggggacggcgccctcccgcgaagcggtgggctaggcgggtttgtgccgctggcgccccggggagtggcccttcgcctaacttgggccgctgttcgcgtgttctgcaattcccaggggtccccaagcggccaccgacgggggtttccctggcacggggatccacatactcgtctgtgtatcctgagttccgcccgcgcctgatattagccaagtggacactccgtgaatatttagtgtccccggtggcaatgattgcaacgtccacaccattctgtccattcaatctggttccccagtgtcttctggtcatctttctgcatcatcttgacatttattgatcactttttcatgtatcacacacagggtttttttttgtttttttttgatacggagtctcgctctgtctcccaggctggagtacagtggcgtgatcttggctcactgcaacctccgcctcccaggttcaggcgattcacctgcctcagcctccggagtagctgggactacaggcccgcgccaccacgcctggctagttgttttgttttgttttgttttgttttgttttgtttgtatttttagtagagacggcgtttcactatgttggccaggctggtctcgacctcctgatttcaagtgatcctcccgcctccgtttcccaaagtgctgggattacaggcgtgagccaccgcgcccggcctgccacacacagtcct

SEQ ID NO: 6857 - DNA, 1050 bp, Homo sapiens
gactacttggagaccttcaagaaaatcagaacagctgactggaacaaatatctaaaattagaatccaagaaaactttctggaaagaaaagaaaccttgaatctacatattgaaagggcctaccaggtaccgggggtgattgacccagaacagtccaagaagtatcctagtaaaattattatactttaaacattgaaaaacaaagaacgtaacttacaaagacatgtaagttagactggccatgcttttcacaaataacgtacaaagcaaggcaacagtagagtgacatttcaggaatcttaatgagtgtaaaccataaaccaaagagattatatccaaccatttgtccttcaagaatcaatcaaggttaaagaaaaacagtttgaatgtcccaaaactcagagaatactgtgcacatgtgccctttctggtgaatctactatagggagagctagagaaccatgggtgagtagggaaactgctaatggatggatggagattttatacatgtagagctaacaccaaaactaagatgtagagttttggtatattagtcatagtttgatcagagaagcacaactgggtataataatgagagaactaatagagaattcattataggtagttgaccttatgttattgtggagctacatggctaactagtatatgtgaggctgttgcttttgtgtgctcctgcaacctacctaagtttactaacttttcacagtcttcaagcagaggtgtgtgtgcgtatgttcttgtgctttggtttggaattaaagttgtaattactggcaaattatatctcctgatggcaggtcaggcagttgagaaggaaagatggatataaagtagcagagaacaagggcaaaccagaaagaacgtgcaaacatgaactagaacttgcaaggataaactgaaacccatgtaagctttagtttagatgatgaagtggagcaaaacactcatctggcccagaaattagagacgcggaaggaggagatctacaacccttatattcttattgctttcatttgccttgcatatcttt

SEQ ID NO: 6858 - DNA, 1029 bp, Homo sapiens
tgggttaatacattaaagcagatgtgttttttaaagtcttgcagactttcttccagacttaaatatgctaatgtattgttgagtgcattaatggggggatatctgtgcagcatttctaaacttatttgaccagagagccctttataggcagagctgcttataggactgtttccatggtgtatattttagggaaaagtggttttttaaattactaaattcttaatgattaatatttctttatcattatctttttggggttgtatgtgtctataattcgtcagaggggctagacctctaatggtgtattgaattagtaaaatagccagcctgcaacattcagggagtacttgtccttcttttttaattgtatgtcatttctcttgctttacaacttaatgggttttcgagtattgaccatgtgctccatttcaaatatttatgcatttaagtataatcacaacaaatttaggttacctgaaattgttttatattctgtgacttaatatggtgtctgcagaaatggaaagtggaattttttccttttaaaaatacaagaatatttattgtgttttatttttgtttaagacctcatttgcagaggattgaattgattatattctcattcatggctcacgaacattgtttcatgcagacccttctcatttagaataatttatttaaattataaattctcctacttccccatacccccaactctcactccccttacattagcatacctataagcagccattgtgatacgtttaatgcatgtttttatttgtatgtgatcttgtaagtgttctgtgtatattttttagttactttattgtgctatattttatgtatcataaagttaacccattgcaaatctataattcactagtttttagtaaatttaacaggttttgcaactgtaaccatacgttgtttttaaaacatttcatcccccaagtaagaacccacatgaccacttacagatagtccctgtcccctcccatccctaggcaactgttaatttactttctg

SEQ ID NO: 6859 - DNA, 1090 bp, Homo sapiens
ggtaaataagttaatggttggaaaaatgataatgaaagctgacttgaacaatttaactagaccaagatcactagtttgtttttttaggaggcttatcacttttgatttgattattcacattcatttatttaagaactaaattgcacacaatataccacatgttgactccacctatgaacttgtctttttcagtgagttaacaaaaggaacctgccttaggtttgctggaagtggaaatgaagagaatcgaaacaatgcctatcctcacaaggcaggttttgcccaaccttcaggcctttccttggcctctgaagatccctggagctgcttgtttgtagcagatagtgagagcagtacagtgagaaccgtttcactgaaagatggagcagtgaagcacctcgtaggaggagaaagagaccccatggtaatgacagtcactcttgcacagtgcgctcggacactgagcaagctgtcaattttgtgaattatggaaagttaataagatttaagagagaccatccttggcctatctgcgaatcaaaatgaaagtcagaccaaaggaaatgtgaatgtaaagcaacgtgaggaacacaccatctaagaaaagtgaactgactctactttattatgtataaatgttaaggtttcagggagaaagaaaggatgaagcattgattattggagaaaagaaaaaaatgtaaattagatattgggcagtggggtggaaagagcaccagactagtggacttgacctattcctgaccagatgtagtattgtgagtaaaactactaagcaccaccaattaatacaggttcaaaatactgtcattttttttctaatctgaatgaagtatccaaccctatttatatgaaaatcagcattttcccttttaacttaaataccatttgtaactgtttgaattttccttcatattctaacaaaacactgtaaaaattataataactgctgtttcttttcttttaaaaaaaattaaagaatttatttgcttttggtgatgttgatggagtaggaatcaatgcaaagcttcaacacccccttggagtaacatgggacaaaaaaaggaattta

SEQ ID NO: 6860 - DNA, 1002 bp, Homo sapiens
acaaaaaactgtacaacattagcaggaactggagacacaaataatgttaccagttccagttttacagagtcaacttttaatgaaccaggaggcttgtgtattggagagaatggagaattattatatgtagcagacaccaataatcatcaaattaaagtgatggatttagaaactaaaatggtatctgtggtaagtaattttaaaatataagttaaagaatgtggttttaagaatgatactaagatcctcacagcactgacagaggcatttttggttagaccatctccaggagagtattaagtggatgcttctgttgtattctttgacaaagagaccagcaggactgctttaaggatatccttttattcttaaaataaaagttccatctgtgctgagagtttgagaaaaatactggaaattggagataatctaatgaaccttcaagaaaaaaaaaaggagaggactcagatctgtttttaagtgtacagacatactgacatacactacatacacctgctctgtgggttgggttatttagcttattgtttttgtttttttttttttttcagtgatctttagattaacatgtaacctttgtttgcctgtgatgaatccattaccaaataatctaacaaaagctttagaagccactttctcaagacatcgaaaataagattgtggaagaaacttaaatgagttatagtcagtttttaaagatatggacgtggtttcttatagaattttcaaggggaaatgtctattataaactaactcttgatgtatgacatttacctgaaaaaaatgcaacagtttttttctgaaaaactggtaatttgcacggtatatttttaaaagaaacatagattactattgcaacataaatgtcatttctcttcacgtagatctctgatataagatgaataacatcttcttatagttgacaatgaaaattataagaaaatgtatatctagcatgtttaaatttataaacttttgctttaa

SEQ ID NO: 6861 - DNA, 1436 bp, Homo sapiens
agctggagatatagagaacatttccagtcaaccaacaatttcactacaaattcctgatgattgcttatcacttgaagccattgtatctgtcagtgtgtttctttattactgtagtgcagacagcagtgcttgtatgatgaaggcaattttgttcagtcagcctttacaaataacggatacacagcaaggttgcatagctccagtagagctcaggtatgtattttagccagccagctagctagcaacccattgccaccacctactgtctcccatcctgactatcactgtaatttaaggaaagaaaacttcagttctgcctctggataccaagatgcccattgctcagttcagacaactgatattaaaataaagctatgctccttacttacttcttttattataaacaaattcctttgctttggctgatactagctgagtcattgatcatcattggtaccatgatattgtaatctatgctgctatttggcacaagactgaagttcacactacagtagagaatactataagataatttgcaataaatactgataataataataccagatattttaactaactttttctacctttattaatagcaatcagcacacttgaatgtgtaaatttcacagtaactttaggcagaacttaagctccaggccacatttgtataagaacaccaagtattcaaggcataaagtctgttgtaagccaaaaaaaagtcttttcatcactgtagaagcttaaggagtacatcagtggtaaatacgatctttattctcttctgtggttttctcagttgagatatttttaaaagagagttttgatctatttttattataaattatttgttatttaacataccattatgaatgccttaaaactttgtacagataaagttggacatagaatctctaaggactgactcctttaactgtttttgagtgactacattaccagataatgaatgagtccccagaaatattatgactttcaaggaaaaagggactttaggacacattacttagtgtctgtgataaataatttattgtgacagctaaatctgatggttacatatcttgttttggaaatgtacatttcacttgtaagcattaaatgcagatttgttgagtttaggttttgaggtttttttcgttcccatattcagaatttaaattatgatcatttattgtgatgtttttaaaaatcacttttaagccttaaaagtgaaattttcagtgtgaggtgctttcatgctattaatagatacagtatatcctaatatattagtcttcaaaatattaaggccgaaacagtgatttaatgatactattttttaatttttgttgttttttatccctaaaaaaagatattggaaaggttttttttctattgtcataatttataactacttaaaagcctaatcttgttttcct

SEQ ID NO: 6862 - DNA, 1050 bp, Homo sapiens
acgtagtctggctctgtagcccaggctgggagggcagtggcgcgatcttggctcactgcaacctctacctcctgggttcaagagattttcctgcctcagcctcccaagtagctgggattacaggcgtacaccaccatgcccagctaatttttttgtgtttttagtagagacagggtttcaccatgtcagtcaggctggtcccaaactcctggcctcaggtgatccgcctgcctctgtctcccaaagtgctgggattacaggtgtgagccaccttgccctactggccttagttaatttttaatctcatttgacttattatgtttctcatttctagatggacaggatgagaatattttggcccaatcattttctgtttaaggacttaaacaatttcacactctaaatgaagtatatacaattttaatttactaatttagaaatatctgagtttatttttcaatataatatacaaacacagtgtttgttatacatgttcatgtacagtgaaaatgcaaaggcattttttagactctattccccttcatttgtctagacagttttaggttagccttagcttatacttttcttgactttcaaaatacagttttattgaacattcttattcttacccactgccagtctgcattgttttttacattaaaagtattatttatagtagactaatatgattttgaataaaatcacacttaagcaatatagataggttcctagaatttatgacgaggataaacctctcacataagaggaagcactagaaagtttatttttaaaacttgttgatccatattctataaggactaatgcatattttttatcttttgcttttcttgttggataaattattatgtccagtgatagtttaaaaagaacaagattttagtgtaagtcacctcacttgaaatgccagtaatgtggtattacacacattttatataatacctggaatctttgccctaaattattctgctggtttgtcgctatttttttcctctcctctttattatttcacaaatggtagaatttcttgat

SEQ ID NO: 6863 - DNA, 1027 bp, Homo sapiens
atcacacatttagcgagtggcagggcctggatgggagtctgttcaactctctgctgtattgcctcttaaagtaggttttcttaaaacataaatctttcataactttatatatttatagtaacttaatccaaagaaccccaaaagtactagcaatgattgtttctgcaatttaaataaatccatttaattatacaactttgcattatatactgttattcagaccttggaacagtctataattgtttgtcaaaagattttatgtactactttttcttaatttcagatattatccagagtttttcttggcagatggatgtattaaaaaaatagctttccagtgttagttctcaacagtgctgtttcaaaagttgttttaaaagttctaacggttggtcttcaaaacgtaattaagaccttatcataaagagccttttgcacaggactatctcaaaccctaagaagctattcatatttaagaaaattttgttgtattaaatattagtccaagtgagctctggaaatacagtcttctgctttcttgtttcataaataacactggtatgcagacccctccccatgactcaaatattaatatatgcaattctgttacagtaaagttttcaccatggtcaacctattccagcattaggtactttttgttgttgttgttttgttttttttttttttttttgagatggagtctcactctgtcacccaggctggagtgcaagggtacaatctcagctcactgcaggctccacctaccgggttcaagtgatcctcctgcctcagcctcccaagtagctggcgctcaccactactggtgcccaccacaatgcccggctaatttttgtacttttagtagaaacagggtttctgttggccaggttggtctcgaactcctgacctcatgtgatgcgcctgccttggcctcccaaagtgctgggattacaggcgtgagccaccgtacccagcctagcattaggtactttgttttgttttgttttgtttttgttttttttgagat

SEQ ID NO: 6864 - DNA, 1079 bp, Homo sapiens
aaaaggaaaatattgcaactatttgcaaacatacttccctacctgtacaagcagccatatactaaaaagcactaaacaagcacaaatgaacactaaatagccttataccaaaaagcattcttgtaactgtcagggcatggtatgaattccttcctctttaagcagcaacttaccacaggcttggtggctttaagtaatatagcattaagcaaatggtcagttattttttaatgttgaaaacttccaagtgtgaataatacggacatagtttactaccttttgcttttaatatacctggttatctatttccatttgaaataaaatgaaaggagacctcaaactgatgctgagaagtagacaaaatcagctctcagacttaactctccccaattaaaatagtttttttttcccttcccatttttttgtttttaagagatagggtcttgctgtgttgcccaggctagagtgcagcagtgacatgatcatagctcactgcagcctggaactcctgggctcaggatccttctgcttcggcctcctgagtagctaagaccacaggtgtgtgccaccacacctggctaatttttttaaaattttttgtagagatggggacttgctatgttgcccagactggtctcgaactcctggcctcaagccaccaacctctcaaattgctagaattacaagcatgagccaccacacctggcctgttattccttctttatctaatgtgtgctaagcttgtgaaaaatatatgttgaggtaaatagggcaaaacattagttgataaattatgctaattaatgggaaaaatagacatgttcctctctgaacatttagaaggactctgccctacaactatcttctgtttttagaatttgtagtcactgttcttagtgccactggaaatatattcattctttgagcatgtacagggtgggctccctgttgtatttattacacttttcaaaatgccagcaagtttttgtttgtatagagttggaatgtattgttcgtgcatgcctgtgatattcatcatcaaaatatacctgtaaaaaataaactactgcttcctctcc

SEQ ID NO: 6865 - DNA, 1032 bp, Homo sapiens
caggccagcccaaatccagtgacctcctcttcaccttcttaaaagagacaggagaatcacttgaacccgggaggtggaggttgtggtgagccaagatcgcgccattgtactccagcctgggcaacaagagcaagattctgcctcaaaaaaaaaaaaaaaaaagtctgccatgtgtatggcacgtctgagcaatggactctccatgagtctgtaggagagctgggtcttactaacctagccaagtggtatgcagcaccaaccatgagctaccggggcaaagggagacatgactctagtagccttgcacctctactgggcttacttagggtaggggtcttcgggtctaacccatgcctggccggcctggtgggtatggtgttctccattgtagaagccaagcagccagtcaacctctgcaaacccagcccgtgcatgaatgagggcagctgcgtcctgcagaatgggagctaccgctgcaagtgtcgggatggctgggagggcccccactgcgagaaccgtgagtggagctcttgctctgtatgtgtgagccagggatggtattgcgagtcctgccaagtcccacaaactcagctgaaggcaggttctaaaacattcgttcagtggaagaaattattcagtcgtttacccacgaaacatttagtgagtacctcctgcatcccaggcattgttctcagtgcaggaacatagcagtaaacaaatgaataaaacctctgccctcatggagcttccattctaatgggaagacagacaataagcaaataatacaacatgtggtgtggtagacggtgctaagcaccccggagaaagtcatgacaactaggagggaggccacagttaggagcacagtagatccagggtacagggatgtagacggaggcagggatgggtaaatgcggtggtgggagctgctggaagctctttttggggtgctatttgctcagtaaaatgggaggaacagctaagtgaggacgaggaggaggtgctagaggtttgagagaaaagaagtcattg

SEQ ID NO: 6866 - DNA, 1027 bp, Homo sapiens
ttatggaacctcaattaatgcaaacgtgagtagcctgttttcttttgaaaaaaaccgcatcactgtgtcatgttatttttgcccactgactacctgttcattgtgctcagttctgagatgggtattctcacatccactgctctgcttcatcgcatcgttcggcaagtgacctctgatgttttgcttcaagaaatggtgttttttatccttggagaacagagggaaccagaaactctggcagaaatcagcagacatcctttaaggcataggttaattgaacattgtgatcacatatctgatgaggtaagctacgtaatgatttagaattggacttagattctttgaaatacggttttaatgtattatacttcagatattttcaatacaacctcttttattggctttagaaattgaaagcatgactcacaagatggtaagaagagtaacttatgtaaagacatttttcagttagcttttatcaattttggtttcagataagcataatgacattacgaatgtttgaacatcttttacaaaaacccaatgagcacattctttacaacttggtcttgagaaatcttgaagaaagaaattatacagaatataaacctttgtgcccagaagataaagatgtggtagaaaatggattgatagcaggagcagtgtaagtttccatccaactccgtgagttcagcatttcatgtagagatagaactttctctctcctcttatctacctcccttatcctcaaaagaaatacctcttacagtttaaaagttcttaaaagtaaaattagatgcattgatactaccatccttttacattacaaataatattgtgtattcattagacccaataacaaaatagtatagaatgttaatttgcctagaaaatatacataattccttaatcctttatattagcaaaattatgtaacattttctaagaacatagcagagaatcttttggtttagaaaatgtcataataaaatagtgctttttatgtgtcattaaatttaacttagag

SEQ ID NO: 6867 - DNA, 1033 bp, Homo sapiens
gatctctcttctctgtaattgtcagggtgagttactagttctgttatattccctaggattgataaatctgtgcaattaatatgttaatatcattgtatgcagttagtgtcacataatgaaaaatatatctactgcttaaaagtaattattatacattctgaactactattttttcaattattttaaataatatgtaacttttattttaaagaattaggtatgagtccttggttaaagatgattatatgagtagtgaaagtttacgttctttattaaatagtagggaaggaagatttttctttttagatcctgaggttgtctgtgtagctgatttcaggaactgaagtgccttgcctctgtgatgcaggttgttggagaccttatgcttcgaatccagcgtattcaagactttactcccaagcttctgttagtcagaaagcggttacttggtttggaacctgaaggccctatgtaagttagtgttttacatttttttaatccaaaaatttcagtgaacttaatgatcggctgctatcttgaattgatttattgtctgttttttccttaccagtattgaccacatcacactgctagagggtgtgattgtgttagaagagttctgtaaggagctggcggcaatcgcatttgtaaaatatcatgcttcctccacaccataaataacatctttcatgtaactgggggaacagaactactgtgtacatttcaccaaaaaagactcagttccacccagccacaagaggataaaaagcctttttaaacgcagtattgctgtaaactggacagaaccattaagaacctattgagtggacattcttggtgaaatgttgtataatgttgttttcattggctttatcataatggttctatatatacaattgcacattgttgaatccaggatacaatcaaaggaacttcaggaaataagcatttctaatgactgtgaaaagctgcaatatttccaatgtcatgactttgatgatatttctgttatattaatgtccttttaggtagc

SEQ ID NO: 6868 - DNA, 1066 bp, Homo sapiens
gctattggatatactattttttattgcttatatcaatgtagataattttttctcctaggaatttgtcatctcatctaaaatttcaaaaatattggtataaagctgtttataatagtcccttatgaccttcgttttattttgaaataatatcaaacttacagcaaataacttttgctaaattacccaagagcaagctcagccatgatgtcccaccaccccaaattcattactgcaattcagtttgaagaccctatttattttttaaaaacagctttctgaagtataattggcatacagaaatactgtatttaaaatatataattttaaaaattaatatacattcacctataaaatcatagctataatgaaaacagtgaacatatttatcatcataaaagtgtctttatgcccctctctccattgtgagttaatttttgaatatgatttcagatatggattcaaggtcattttttgcatatgtacatcgttttgtaaccattttttaaaagactatcctttctgtggttgccttgaacctgtgtcaaaaaacagttgtccatatctgcatacttttattttgagacttttaattctattccattgatgtatttatttttaaaccagtaccacactgtcttgattattgtagctttgtaagtctttaaattaagaagtgttagccctccaacttgttctttttcaaagttgcttttgccattcttggtcctttgcatttccatatgaatttttgaatcagcttgtcaatttttatgcacacacacactcaaaatctactggcagtttgagattgttttgaagctatagatcaattttggaagaattgacatctaaacaatatcaagccttctgacccatgaaataagatatctctcttcatttatttaggtcttttatagccatatttttgtagttttcagtatcagatctttacatcctttgtttatgaaatctctgagtacctcaaattctgaagtttcaatttctaatagttcattggtggtatatagaaatggagttgatttttgtatattgatcttgtgttttt

SEQ ID NO: 6869 - DNA, 1033 bp, Homo sapiens
taacagatagtaaaagctttatgtatatgtcttcattcatattttctaaaatcattgtttaaaaaatgcttgtttagtaagcatgctaaaatccttgcttatgtgtgttttttttttttttgcactggcttatttttgaggccggctgggagtgttcatgtaaaacaagagagaaattccaacaacagagaagggggaggctggggcggggggacagataaatgcaattttacttgacaacagagttgaatgtgagtgtgtaaaatttctgccataacataaaacagatttgaaatcttaccaggtaaaatttaaaatgtggataatacttgttaagtgccacattaagttatttacaatatttgatccctagagaaacttagaaaagaacttacggggattattttgctgcttgtattctgatcacttcattattaattactgcaggatcatttctatagctaatgtgggattttcctcagatcttcttaaggccatagtcagaaccaactgaatatatatataagatgattgcattatttttattggagaaaaattgaagcaaatgaaattgttttaataaagaatataagactttctccctcttttatcttgttaatgtatattttattctttttaacaaggtagaattttggctataaaacatatactgtaatatatgcttttggaaaaagttttaaatgaattttcagggctgttggtgctgtgaaaatagtacatgtacttctgtggttgttttagtgtcttttttgttgatttttggcagataaaataacacaagaagatattgaaggcattctacagaaatttactggaaatataatgcaagtgccccccctgtaagttcaattagtaaatttggaaaaatgtttacttttcttttccaatggttaacatcactctagttaaaatacacgagtttcctcttagcatatggcaaggcaggttttaaatctgatgtgccaaatgttaaagtgaaggtgagacaggatgtggagcttttgacactcta

SEQ ID NO: 6870 - DNA, 1037 bp, Homo sapiens
atgataaagttgttttacttgtaagaaaacgataaaagatttaaaaaatcctgaaaatgtttcaacctggaacataccaaatcacttcattttgacactttaagttttttatatttgaaaaataatgtcttaaaagttgttaaaagtcatagaattattttatttatagtcttaaaatccaggacctttatgtaatagaaatttgctctttgcaaattcaaagttttgaaatgtgaataaaggctaaacacagtttcctctacctgtactgactagatatttttttcttaaatacttgaattaaaacaagccattgactcatcatcagaaatgagttactgtattaaataagagtgctttgtatcagatcttcagtacattttatgtcccctgaccagtttgaaatttgtatcagatttacaatgaacattttgaggttcaattagatggtgaattgttctgtttcaaagaaagtaagtaatttaccttatatcatgatgtatacaatagaaagagatgtgattcaaaagcactgtaaaatgccaaaacatttaaatagaggaaacgataatagatatgaggtttatgcactgaaatgagtataatggccttgtagttaaatttaaagagagggattgtcttgaaaccatttctttctctaaggtatgtatgggcagagctctagattgtcctaattcttcattaaatactatttattaagcacatttattaaggtgttgaatcagtagtaccttcatttgttaatgtgtgagctaaattctctttatgaataggaatatcttcagattgctgctataaatactgataccggccggaaagttgaagttcgggaattattttgctcttcttatccttaacccttaaaatgcagcatattaactttatttctgtctttaccgttagtcaactttttgatcctaggtgaatcacttaatctctttaggtctcaagtttccttatccttacaacaaaggagacagactagtccatcttgaagaatctctccaatgctaaaa

SEQ ID NO: 6871 - DNA, 1089 bp, Homo sapiens
agaagtgtacatataaggagggaagtagcagtatggtacaagataatacatacatatcagtgaatgatattgccaaaaagtgctattgatagagcaataattcatttctgcaaacagctgctgatctcctactgaaaacagaggagggagaacaggacgcctcgtggtcaggatagaagagaaagaccttgagttgagccttgaacagtatttaatattcaaaaggttaagagaggagagcaattgaggaggggagaatagttccagcacaaatgatggtgtacaagatgaacacagtcagtaaagagcagactggtctggatggagaggaggatttgcatcatttgggattacgtcatttagacccttgaaagccaggattgagtaaagccacagtgaagcgactggctcgtatggaagctttattttaagaagattaatctggtagtgacatgtgccaaaaactgaataggtagaaatgagatgcagagagcccagttagaactaagtctggtgcagtaatgcaggattgaggcaataaacaccaaactacagtatcaccagataatggatgtttgaacggacggtttaaaggaaaattgatggtatttggtaatttattagataatccagggccatggaatgagaggggaaaatgactaaccatagtcatcaaatggtttttcttaatgaatctgaattttggtgtaagagcaacattttcttaggccttgcctagttggtacagctgactatgataatgactgctaccatgcttgttcctcttttagcagctgtgagtcccccaccagccaaacaatgagcctcttgaaaaggacgatgccttttcacttctctccaagtgcttggcaaataggaggccttttgaagttactttatagttaggggttcccagtgagtatttgaaatattaagtcatgcccgtggttgacagcatggccctactgctcatcatcagctattaaccttaggcaagttaatgaacttttctaagccccagtctactcatttataaagtgggattattaataatgtctacttcataaaattatgaagcctgagttaggt

SEQ ID NO: 6872 - DNA, 1047 bp, Homo sapiens
ttccttataaagctgctacgaagtttcatgtggaaggctttttatctttgtatggtcatatgctttcctttctcttggggaaataacctgagaatggctggatcatatgggtagatatatgtgtaactgttaaagaaaccgacaaactgttttccaaagtagttgtatcatttatgttcccaccagcagtgagtcagtgttctatctagttaatttcacatccataccaatacttggtatggttagtcttttaaatttttgtgattctaataagtgaatggtatattattgggttttagtttgcatttcccgaattactaatgatattgagtatcttctcatgtgcttacttgccatccgtatatcttctgtaataggcatttattcaaaccttttgcatgttaaaaaaattttcttactgatttttgtgagttctttacattttctggattactagcttcttatgaggtatatcatttgcatatattttctaccagtctgcggcttgtctatgaaaacaatgcaaagagaatgaaatctcttgacagtatttttcaaagaatctaagttttaaattgattaattccagtttatcatttttttcttttatacttttcatgttgtgcctaagaaaagtttgcctaggctgggtactgtggctcatgtgtgtaatcccagcgctttgggagcctgagacaggaggatcacttgagtctaggaatttgagtgcagcctgggaaacaaggcaagacactgcctatacaaaaacatttgaaaaattagctggtcgtggcggtgtgcgcatttagcccatctacttggaaggctgagatgggaggatcactttaacacaggaattggaggctgcagtgagctgagctgtgattgtgtcactgtactccatcctgggcaacacagcaagaccatgtctttaaaaaataaaaaataaaaaaaaaaagaaaactgcctaaaccaagttgatgaagattttcttcattttttttctctagaagttttgtaattttagattttacatttatatttatg

SEQ ID NO: 6873 - DNA, 1025 bp, Homo sapiens
ttattatctttaacagtaataatacaaggtgattgtcatttattaatttaagctttttataacaccttgtgtacctgtctttgatttctttggtctgccatgaatggttagaattaatgctcaaaatgtttgccataaggttactaattgctgtctggatccacgaaaggaagatgctctggcattttagatatctgatttatttgaccctatttgatgcacagtatacttccagtctaccatttgagccaaaaagtgaataggagaactattttacagatagcataaagttatgaaatgatcagtagatgtgatgaagtttagccaaaaggggaagagattgatcttatcattagatagtagattaatttgaaaataatgattaccatgtgcaagagaagtattccctgattaaaaaatgtttgagttgtatagttatctcagtagctgaagggaatgttgaggaaaaaatgtattaatgagctaaaatcttatttggaaatatccttgttagaattatagagctcagaatcagctgatgttgtagtccatttgtattgctacgaaggaatacttgacgctggataatgtgtaaggaaaagagatttgtttggctcatgattctgcaggatgtacaagaagcatggcaccagcatctgcttgtattgcggggctcaggctgcgtctactcatggcagaaggcaaatgggagctggtatctgcagatttcatatggcaggagaggaagcaaggggtgggagcggccaggccctttttcataaccaactctctcaggaactaatagagtgagaactcactctttactgtgaggatggccccaagccattcatgagggatctgcctccatgacccaaactcttctcagtaggcctcacctctgacattagggatcaaatttcagtgtaaggtttggaggagtcatatattcaaaccatagcagttgagaattaggcctcaaagtcagatagataatggttaaaatatcaactatatcaatactgaat

SEQ ID NO: 6874 - DNA, 1060 bp, Homo sapiens
cttgtgggttattcctcaagaaatctttgcccagtccaatatcctggagagtttccccaatgttttcttgtagtagtttcatatgcttaactacctgttattatgctagacattttatttgaaaattattgatagaaataatttaaggcccaggataatgttatctttctttagagagtaccatgtatcttctgttaggagacttggcatattggcagttctggcagcaccataagccgattttaagacttgggagttttctgctgctcagatgactcatagctaacctacagttgaggtaaaggctggttaacttctggtacaccactattttaatagcaagtcattatgtcccaagtcaaagtgccctgttgtttctttgaacccctatgttttgtgggttattgcttccaacttttgtcctcctctccccttgaggctactaaatgcactctcaaccttttggcagtctcttctaaataagcaaatctctcagaacaaaagcatctctgaatgcctgcctcctcttaaagaatttgcaacttctggatcttggctttgtacattttatcattttgttacttgtaagattttaaaattgtcctttaactttttaagttgtcttcagtggagagtttttctgaattactgcacttagtattaatattattggaagtgaaaaatcagggcaagttatttaacttgttacttaaaatgtgcttcagacttctcatctgtaatatggagttattaattatttactatcttataggttttttgagatttttaaatgaggcaacacattgtgtttatagtggtacctgacatgtagaaaatgcttaagttattattacatttatttgagaatataggaatttgttgctcttcaaagattttccaagcatgaattagccactttattacaaaagtaatttgcagggattatgaaagatttgcaaatgacattaacattgactgacatttctgtcaaccctgatttaggtaaattaaagtttttcccccctaatgtatttaaggctctatactataaggaaaattt

SEQ ID NO: 6875 - DNA, 1029 bp, Homo sapiens
ttcactctgtgctttgtatattatataataaatattatgtatttattcactctgtgctttgtatattttaatttgaaaaatatttcatattcattttcagtccaaatgcagtgttaagattaagattcaatcattttgctacagaatgtagctgggatcatatgtatgtttatgatggagattcaatatatgcacctttaatagctgtacttaggtgagtaattatatttaatcagttgcagaaaagtgactgtgtaattgcttctttaaatatatattgatatgtactgcaaaataaatttagtaaagatattgatagttacatttcacagatgattataatactttgttatgtgctgtaactgtcaatttaggtaataattatgtaaatattgatataacataaataagtactatattggaaatatagatttctttctaaatattttttattctcattgtatttagtttattctttcaaagtgccttgaatatgttttcagaactatctggatatattagcgtgagttctagctgacaaataaatagacaagttttgttttttaatagttgtttttttattttagtgaaatggtaaaattttaaattctgcataaaagggttaagttatgctttgtgcaatgattaataaagatggagtttctaccaattgtcaaaatgtgagagttttatttgtttcaaaatattttattgttagtcgtaaggtagattattaattttaaaattatagcattgtatcaatttaaaaatcttttcttgtgtatgtttagattattataaaaagtttcgtgaataggagaaaatctattagacacagaaaaaattatgaacatgtatagattttatatataatttaacatgattgttgataagttactcattatattatttacttttgctatttatacaatatctgttatatgttctgtcattgctggaaatttaagtatggataaaagcttattggtcccttcaaaatattttctttccaatttttctttttattat

SEQ ID NO: 6876 - DNA, 1046 bp, Homo sapiens
tgccaattttggcttttgttgccattgcttttggtgttttagacatgaagtccttgcccatgcctatgtcctgaatggtattgcctaggttttcttctagggtttttatggttttcagtccaacatttaagtctttaatttatcttgaattattttttgtataagatgtaaggaagagatccagtttcagccttctacatatggctagccagttttcccagaaccatttattaaatagggaatcctttccccatttcttgtttttgtcaggtttgtcaaagatcaggtggttgtagatgtgtggtattatttctgagggctctgttctgttccattggtctatatctctgttttgataccagtaccatgctgttttggttactatagccttgtaatatagtttgaagtcgggtagcaaatggaaaacaaaaaaagcctgaggttgcaatcctagtctctgataaaacagactttaaaccaacaaacatcaaaagagataaagaaggccattacttaatggtaaagggatcaattgaacaagaagagctgactatcctaaatatatatgcacccaatacaggagcacccagattcataaagcaagtccttagaggcccacaaagagacttagactcccacacaataataatgggagactttaacaccccactgtcaatattagacagatcaatagacagaaggttaacagcgatatccaggaattgaactcagctctgcaccaagcggacctaatagacatctacagaactctccaccccaattcgacagaagatacattcttctcagcaccacattgcacttattccaaaattgaccacatagttggaagtaaagcactcctcagcaaatgtgaaagaacagaagttataacaagctgtctctcagaccacagtgcaatcaaactagaactcaggattaagaaactcactcaaaactgctcaactacatggaaactgaacaacttgctcctgaatgactactgggtacataacgaaatgaaggcagaaataaagatgttcttgaaa

SEQ ID NO: 6877 - DNA, 1044 bp, Homo sapiens
acaaagaagacaaagatccttgtggaacttacattcaagctaggagagacagaccctaaataataaatatacattatatagtatgttagaaggtgataagtacaatggaaaattaaagtagaacagagaaagaggaatagaaagatctgggggttacatttaaaatatgatgatatgcttaggttttatggagaagttgacatgtgagaaaagactttaagcaagcaagagagttcaaccatatagatatctaggggaagaacattctaggcagagacctgtcagttcaaagaccctaaggcaagagcaagccaggtgtacataaggaccagtaaaaaggccattgtggctggaattgaattactgatggggagattagtcagatatgaacttagaagttacacaacaagggagatggttggggatgtggaattaaggggttgctggaggggatggagattcctgaaggatggagctatatcagctaaatattcttagctttgtagaccatagtgaggattttgactcttaccctaagtgaaatgagggagccattgaaggattttgagcagaagattagtattatgtggcttagttttataaagctcctattggtttccacctgagaatagactgtagtagcagtataccagttcagaggctactgctataatctaggtgagagatgatgatgatggtagcttggacaggttggtagctatggaggtggtgacaatggcttgaatactgaatgtgattttaatgcaggattaataggatttgctgatggtctagatgtggggggtgagggaaagaagagtcaaagatgactaaggtttttggtttgagcaaatggaaagacagagttgtcatcaactaatatgaggaagattttaggaagaatatttggttatggtatgccaagttagagatatctttgagatattcaaaaggagatagtgaggaggcagttggatatatgggtctggaaattgatggagagagatctgtactgtagatataaatttggaggtgttcgcttaa

SEQ ID NO: 6878 - DNA, 1033 bp, Homo sapiens
tcctggatatcgttgttaaccttctgtctcattgatctgtctaatattgacagtggggtgttaaagtctcccattattattgtgtgggagtctaagtctctttgtaagtctctaaggacatgctttatgaatctgggtgttcctgtattgggtgcatataaatttaggatagttagctcttcttgttgaattgatccctttaccattatgtaatggtaaaggataccattcttcgaagaagaaaggtagcttctttgtctcttttgatctttgttggtttaaagtctgttttatcagagaaaaagaattgcaacccctgcccttttttgttttccttgagttttcttttgtgtcctaacatatagtctatcctggagaacattttatgtgctgatgagaagatgtgtattttgtagctgttgattgaaatgttctgtaaatgtctgctaggtccatttggtctaatgtgcagtttaaatccaatgtttctttttctgtctggatgatctgtctaatgctgagagtagggtgttgaagtccccaactgttattttattggatcaaataacactggtgccaagaaacggtgccagggagcccaagacaggcactcttagactgccactgtcacccctacggcccaaagattggcccagggccaatttctccctttaaatgtattaatttcttcctttaaatgtaataatgtttgctttatatgtctaggtgctccagtgatggctacatatttgtttagaattgttatatccttttgctgaattgatccctctatcattataaaatgaccttctttgtctctctttattgtttttgacttaacatctgttttatctaattagagttactcttgctcttttctagtttctgttttaatggattttttttctatccctttattttcagcctctatatgtctttacaggtggtatgagtttcctgcagttggatcatgtttttctttttttttctttttaaaaaatccattcagtcagtctgtgttttttaagtggaa

SEQ ID NO: 6879 - DNA, 1050 bp, Homo sapiens
tggaggcttgatgatgaaagaggtaaacatacttccctgacagaactgatatttgagtacattgttttctattttaatactcttgtagcatactaaaataaatctgacattttatattatttaaataattctttaaaattgtgaaatttatttgaacatccaagtccgattgtgagtatatgacttttttcgcctctaagcattacattttctgtgagtattattcttgtaagttatatttcagataatttatgtatatatttgttaatatgataaacattgaattcttaaattctcttaatccatatgttgtatttctataatctgagggctttgtttaatctagtgtgttgtttcattttttttttaataggtcctgattgttctttgaatgttccctctactgagtcttactggattctgccaaacgttaaacccttcagtccttctgtaggtcgggcttcacataaagcagttttacacgggaaatttatgtgggtgattggtggatatacttttaactacagttcttttcaaatggtcctaaagtaagtatttattttcagattcttgctgttttttaagctggatttttatccaaaatgtcttttttttttaattgttgtccgagagtaaaagtggttatttttgtggtagtgtctatttgctagtgagactgatttgtgaatacatgaactcagtatgtccatagctgtcattgcacatagaagtatgcttcatgtagaaatgttattacttctctagagtacttttaataaattctgagtaagaaaatattaacttcaaatacaggcaggccttgcctataatggataaaatgaatcaaatgaatcatgccacctttttttttaatgaagtataatctcatatataaaaatcctctcaatttgttctgtaaattttagtgtacctgaactttactttgtatgtgctttacaaactttcattgggagaacagttctagtattatgagagagatgattgatttactgttggctcaatagagattgttctctgcatgattggata

SEQ ID NO: 6880 - DNA, 1035 bp, Homo sapiens
aacatctttatgtatggaggcagaattgaaacaaatgatggcaatgtcacagatgaattatgggtttttaacatacatagtcagtcatggagtacaaaaactcctactgttcttggacatggtcagcagtatgctgtggagggacattcagcacatattatggagttggatagtagagatgttgtcatgatcataatatttggatattctgcaatatatggttatacaagcagcatacaggaataccatatctgtgagttacttaaaaattgtaatttctttattgattgggaatgtttttctctaataaaatcttcatatgaatttagtcaaaatggtgagttatttgagattgaaattataagctgataattaataatttttaatataagcttttttgattatgttagattttgtcctttaatatttaagcttacctttttaaccaaatgaggggaaatattacttaatagtctcattttctaagatttgtgaattttttaaaaaaatatgtgaaattccagtaggtggtgctatttctttggattttatttatgaacgaagtactgaaactatcccagtctctttactatgcattgcatggtttcaggattttttattttttagcattctatttctaatcttactgctatatctttatgtatgtattacttctttaaagtcagcttctcaaggatagtctgctggcttctataagagattattatctgttatgtgaaggtgaaggtgtctagggcaatctacatgtgagtttttgtactatacctttactccattttgtttttctggtacttcatttttttgaattatttataacatttttaaaacagtggtaaccttctttattgtttttagtttgtttacaaatatatgccctatggtggttattcagattcaagaaaataattcttttctggctctggccagtatgatgaactcaaattcttggctcttttgtgtatggacaactatatatacaactatttagagtccttgtgcagtcttaatgagaaa

SEQ ID NO: 6881 - DNA, 1049 bp, Homo sapiens
agatggagtctccctctgtagcccaggctggagtgatctcggctcactgcaacctccacttcccgggttcaagtgattctcctgcctcagcctcctgagtagctgggactacaggtgcgcgccagcatgcctggttaattttttaatttttagtagagatggggtttcaccatgttaaccaggatggtcttgatctcctgatctcatgatccacccacctcggtctcccaaagtgctgggattataggcgtgagccaccgcacccagctggttcttaagaaatacacaccaaagtattaaggacagtaagaatgatgtatacaactgggagagagggagggggagggggagggggagagggagaaagggggagggagaaagggagaggaagggagagagagagggagaaagaattaatgataaacgggaaaaatattgacaattagggaatctgaatgacaggtatatgtgtatggggagttctttggctattgcacttttgaaattatttgcaaataaatgtgaaaatagaagaagtagataaatgttttttcatatttggttatgtggaatatatgtttaactgaagattttaagaattcccttgaacttgctgtggcagtaaaggaaatgtcagtttgtccttttttgttatacttagaattacggcttttagggaatctacaaatctcagaggggaattatgtggatggttttactaacttggaccataaagctcttctgggttagtcctgtgggaaatttatttcactttagtttagcaatacctcataaactttctaagaatctcaatgtgagtctcaaggtgagtataatattaatgttttgctttagtatttttcatgctttaagaattttggaggtgtagttgggaagccataattaatgtcatttaatgttaacttttttccttttgatctaaaaatcattagattttttcagaaaggtatttttttaatataaatttattgatactatgagtttctcctctgctcttaatatcacatgtttttaaaaattctgtggtg

SEQ ID NO: 6882 - DNA, 1023 bp, Homo sapiens
tgtactctattctggtccattgatgtatattatggttattctagtatcacactctattgattactgtagctctctaaatctggcggtgtaagtcttccatctttttttccattttaaaaagttttgagctattctaggtccttcatattgcaatataaaatttagaatcaacttgtcaatttttgaaagaaggctgcaaagattttaattggggttgcattggatctagagaggggaaaattgagtctttaacaatatggagtcttgtaatgcatggacatggtatatcacttctttatttaggtctcttttgtttcagcagtattttatatttttcaatatactggtgttgtacatagtttgctaaattcctaaatatttcatatttttaatattactaaatggtatttaaaaaatttaaatttataacagctgattgctagtctatgtaaaaattcattttcaaatatgggtttggtcatgcaacgttgctaaacacacttattaatatctgtagcccattggtcaacaacttattttctatatagatgctcatgtggtgtggtaataaacattgttttactctttctttttcagtgtgtatgccttttactaattttctttgtcttgtatttttaggatcattagtacactactgagtagaagtagtgacagcagatattcctgccttttcccttattttagcagggaaatatgcagtcttagcaatgtgtttaacatgacttttatcaggttgaggaaatttacttttatttctagtttgtttagtttttttcatgaacagtgttaaatttcctcgaaatagtttttttttccacatcttttgagaaaaacttttgttttttcattttctgattttttaatatggtgaatggtattgattgacttttacatgttaaactgcaattgcattcttggataaagcttacttggtcataatatattatccttttcatatattgctgaatttcatttgctaaaatcttaaagacttctatgtct

SEQ ID NO: 6883 - DNA, 1050 bp, Homo sapiens
tggtttccagcttcatccatgtccctgcaaaggacatgaactcatccttttttatggctggctagtattccatggtgtatatgtgccacattttcttaatccagtctgtcattgatggacatttgggtttgttccgagtctttgctattgtgaatagtgccacaataaacatacatgtgcatgtgtctttatagtagcatgatttataatcctttgggtatatacccagtaatgggatggctgggtcaaatggtatttctagttctagatccttgaggaatcaccacactgtcttccacaatggttgaactaatttacaatcccaccagcagtgtaaaagcattcctatttctccacatcctctccagcatctgttgtttcctgactttttaatgatcgccgttctaactggcatgagatggtatctcattgtggttttggtttgcacttctctgatgaccagtgaggataaacattttttcatatgtctgttggcaatagcaggtataattttcattcagcccaaggaattttgttgtcatctcctgtagggcaaatctctgatttttttttcttttagtctggaaatttttgtttcactttcatttttgaaaaaaaatttgctgagtgtagaattctattttgatagttttcctttgtttttaatatagaattatgggttggcagttcctccccttgcccccccacattttactagcttaaaaatgtgactccactgtcctctgacttgcaagtggtttctgatgaaaagacagctgtcattcttatctttgttcttctgcttttttgtcttcataacttcatgaaattcttggtgtgagcttctttatatttcccactcccccatcccgatcttgtgtgtattttgttgcatttctcagtttcatggaattacagattttgttaaattttggaaattatttcttcaaataatatttctgtccaccacatcactatcacatatctcaaactcttatcactctggattaggctgcttgatattgttatccaggtttttcaatctttttc

SEQ ID NO: 6884 - DNA, 1088 bp, Homo sapiens
tctaggtgaaatctgtattcatttcctatggctactataataaactatcatagacttggaggcttaaaacaacagaaatttagcttctcacagttctggtggctaaaagtctgaaatccaggtgtcagcagggccattccctcttgaaaggctccagggaagaatccttctagccttttccatcatttggcagctccagacattcctgggcatactttgattgtagctgcattactccagtctaactcttggacttcatatggacttctccttgtgtgtttgtatgtgtctgaacgtggccttcttgtaaggacaccagtcactggatttaggacccatacttgtttaggattagatctatgtgatctcattttaacttaactatctgcaaagaccctattttcaaactaaggtcacactccaaggttccaggtgaacaattttgggaggacagtattcattcaaccagtacaatatcttttaatttctttttctgtttatgatctgatagactgaaaggcaattgattttttattactcttatgtctaacagtttgctgtatttttgtaatttatgtgtagacttttttagcgttttttaaataatagttgatcagattatatacaaataatgacagttttgtttcttcctttctgggtcttacagctttatatttttctcgtcttacaatttctgctataatcttcagctcattgttgaatagaagtgtgataacaggcatctattttattcctgagcttttaaaaaatgctttcagtatttcttcactaagaatgatgttcattgtgggttttttagatatcattataaagaaaggtctcttttttcctggtttgataagggtttatattatgaatggatgcttggttttgccaaaggctgttttaggaatgacttacttgatttttctactaaataatttaatgtggaatattattttaatttactttattattaactcaacttgggttaaatcaaacttagtcataatgtattatgtgttttttttagtttgctagtatttttgtaaggatttttacattgatgttaatatgtgagatttgca

SEQ ID NO: 6885 - DNA, 1034 bp, Homo sapiens
ttttaagggatactatttttttgtctttgttcccactactgctattactactatttccaggaatcattatttagacaatgaatttttaggtaactaaatgaatatttctggtaaatagttaatattgaaactgattgtggaaaaatgtcttaatttttctatggtaagtacatttttttgttcaagcttctattaaaatttattttattgtcactgaagaattgtatgtatttatggggtacatagtgctggtttaatacatataatgtatagtgagcaaatcagggaaattagcatatccattatgtcaaacatttattatcatttacttgtgttgggaacattcaatatcctccttctagccatttgaaactatgtgatatattattgttaacaatagtcatcctacattattatagaacattagaacttattcatcttatcgagctgtaattttcaatcctttaataaatctcttcttatccctccctttcgccttactcttcccagcctctagtacctctcctctacattttacttctataagatcaactgtttttttttttttttttttttttagcttccacttatgaatgagaacacagggtgtgtaactttctgggcctctcttattttacttaacaaaatgtcctccacttccatccatgttgccatgaatgacaggatttcattcttttttaatgactgaatattatccccttacttatatttaccacattttgtttatctatttttttcttgttggaaacccaggttggttccacatcttggctattgtgaatagtgctgcaataaacatgagaatgcaggtatcccattgatatactgattttctttcctttggataaatgtccagtagtgggattgctggaacaaatgatagttctatttgtagttttctgaggaacttctatattgttctccataggggctgtactaatttacattcccaccaacaacgtataagaattcccttttctctgcatcctcaccagtattttttgactttttga

SEQ ID NO: 6886 - DNA, 1033 bp, Homo sapiens
atttgatatgtgagggcttatttatggcattttgttaattgatttatggttgttttatatatcctttgctcctttcttattgtttatcattgtggttttttagttttctgtagtggtagcatttgagtcctttctctttcttatttgtgtccttgcttcgtcagggagttttatactttcatttgtttttatgatggcaaatattgtcctttcacttcctgaagcgtctgtttcaggtcttggctagtggtaatgaatttcctgtttttgcttgtctgaacatagctatcataatactgaagagggaaaggtgaaagctttttttttttttttttttaaagaactggaacaacacagagatgcccacttgcaccactcttgtttaacatagtactgaaagtcttcagactgagcaattaggcaaaagcaagaaattaaatggatctaaattggaaagaagggagtcaaattgtacctgtttgcaggttacataatcttatatgtagaaaagcataaagattctatcaagaaactgttagtactgacaaatgaattcagtaaagttacagaatgcctaatcaacacacaaaaatcagtagcattttcatacatgaacaatgactaggagaaaaggaaatcaagaaggtaataccatttacagtagctacaaataattaaaatacttaggaataaatttaaccaaggagatgaaagacctagaaacttttaacatatacattttaacttgttaaaatatttttcagatttatattactaccagtgagatgtaataatgttattcatataggtctattctttttcttcattttggtcttatttttgctactacatctatatatgttgtggacccaacagtactttaataaaattattactttatataattttatatcttttaaataatttgagtgatgaaaggaggataagtatatagttatagcttttattatattaatctttttaccatttctggttttctttatttgttgccatggccccaaaccatcaggta

SEQ ID NO: 6887 - DNA, 1133 bp, Homo sapiens
ccttcagtatgatactagctgtgggtctgtcatatatggcttttattaggttgagttatgttccttcaatccccaattttttgagggtttttatcatgaagggatcttgaattttatcaaatgcgttttcactgtcaattgaaatgattagatcatttttatccttcattctagtgatatgatgtgtcacatggactgatttgcatatgttgaaccattcttgcattccagggggataaatcccacttggttatgaatgatctttctgatgtactgttgaattttgtttgctagtattttgcaccaacattcactagagatattggcctgtagttttctttgtttgtttttgacatggagtctcgctctgtcacccaggctggagtgcagtggcacgatctcagctcactgcaacctccacctcctgggttcaagtgattctcctgcctcagcctccaagtagctgggactgcaggtatgtgccaacaagcctggttaatttttggatttttagtagcgatggagtttcaccatgttagccaggatggtctagatctcctgaccttggcatctgacagccttggcctcccaaagtgctgggattacaggggtgagccaccacacccggctagttttctttctttttttttcttttcttttcttttctttttttttttttttggtgtgtgtgtctttgtctggttttaatatcagggtaatattggccttgtagaatgagtttggaagtatttccttctcctctatttttcagaatagtttgagtaggattggtattagttctgctttaaatgtttggtagaattcagctgtgaagccatcagaccccaggcttttctttattgggaaactttttattataccttcaataacattacttgttattggtctgttcaggttttggatttcttcccagttcaatctcggtaggttgtatctgtgtaggaattttttatttcttctagatgttccagtttattggcatgtagttgttcatagtagccactagtaatcctttgaatttttgcagtatcctttgaaatgtctccttttcctttctgattgaatttttttgtgtgtcttctctgttttttcttagtttgtctggctaaagg

SEQ ID NO: 6888 - DNA, 1064 bp, Homo sapiens
tgagactatcttcctggcctaagagatggtctgtcctcaagaatattccatgtgctaatgagaagaatgtatatttttcacccgttgaatgaaatgttctcttattgatcattaggtccatctggtctgtagtgcatattaagtctaatggtgcattgttgattttctatttaaaatatatgttcagtgttgaaagtgggtgttgaagtccccaggcattattatattggagtctgtctttctctttaggtctagtaatgtttgctttatattatctggatgctccagtgttttgtgcaagaaatatttgcaattttaatattctttggctgaatttgaccattttattattatataatgaccttctttgactcttcttacagtttttgccttgaaatctattttatctgacataggtatagctattcttgttttttgtttccatttgcatggaatatttcatttcatttccttcatttttagtgtatgttgtttttatagctaaagtaaatttcttatgggcagcatatatttgagtcttgttttaatccattcagccactctctgtcttttatttgaagaatttagtccatttacattcagtgttattgttgaaaggttaggacttaactacttccagtttgtcatttttcttctgattgttttgtacattttctcttcctttcttcctctcttcctttttagattagtgatttcctctggctgtatgttttaattccttgctttttattttttcaatttctattataggtgtttgctttgtcattactgtgaggcttgcaaaaatattttatagctaacaacgttaaattgataaaaactctaatctcaaagaagagggaacaaaaggaaaacaagcaaagaaaaaactaaaaaattctgtactctaacttttcctctaactccctcctactttttgactttttgttgtctctatatcttttcatattgtctatctttcaaaaattgttgtagttattatttttgatagatttttcttttggtcctcatgctgaaaatgtaagtgatttacacaccacaat

SEQ ID NO: 6889 - DNA, 1048 bp, Homo sapiens
aatgtattatgactatagatacttcattacttttttcttttaaattttatactacagctaaaagtgatttatataccactgttactgtattactgtattctgaatttgactatagatttacatttactagtgagttttatattttcatatttttaatgttgttacttatcatactttcatttcaaattgaagaatttcctttagtatttattgtaaatcaggtcaagtggtggtggactctcttagctttttgtgtgtcttgaaatgtgtttctctctatttcacttctgaaggacacctttgctgatgtaaaagtcttggtggtgtttttttcctgtaagcaatttgaatacatcatccttcttcctcctgttttataaggttgttgttttttttaaagggggtagggatttccattaatagcctaatggagattccttgatatgtgatgattctgttatctcttactgctgaagattctctgcctttgactttatttatttatttatttttgagacaggatcttgctttgttgcccaggctagagtgcagtggtgtgatcatagctcattgtaacttcaaattctaggtcaagcaatcctcctgccttggcctccccaagtagctaggactacagatgcatgctaccacatccagttaatttttttagtttttgaagatatggggtctggtagctaggactacggatgcatgctaccacatccagttaatttttttagtttttgaagatatggggtctcgctatgttgcccagactgatcttgaactcctggtctcaagtgatccttctgcctcagcctttcaaagtgctgtgattataggcatgaaccacccagtcctgtttttgacttttgacaattttattatattttgtcacagagtattttttggattcatcttacttgagatttttttaagtttggaaatctggatgtctgtaaccttcccaatatttgggaagttttcagccagtatttctataagtaaactttttctccctttgtcacatcttctggtgatcccataa

SEQ ID NO: 6890 - DNA, 1051 bp, Homo sapiens
aatagcagtcaggacaaagaaaattgctcaagaaattaaataacgtgctctggaatgacttttggataaataatgaaattaagggagaaatcaagaagttctttgaaaataatgagaacaaagctaaaacataccagaatctctgggatatagctaaggcagtgttaagagggaaattcaaagggctaaatgcccacatcaaaaagttagaaagatctcaaattaacaacataacatcacaactgaaataattagagaagcaagaacaaatcaaccccaaagttagcagaagacaagaaataaccgaaattagagctgaactgaaggaaatcaagacgcacacaaaaaaaaaacatttaaaagataaacaaatctaggagttggttttttgaaaatattaataagatatgttgcaagctagacttatttttgcagttgaaagtaatggcaaaaactgcaattacttttgctccaatgtaatagcgtgccaaccaacaacaacaacaacaacaacaacaacaacaacaacaagcataggtcctgatgaattcacagatgaattcaaccaagtgtacaaagaagagctggtactattcctacggaaactattccaaaaagttgaggagaagggacccctccccatattattctatgatactcatatggacaggaggcagggaaacactgggtagaagagggcagtccctgggagggccccaccctcaagcctggaacagtagcccaaagggagaaatttctatcaccatatttctgctcgaatgttgccttttccaaaatcgccctggcccaccccactcccctgattctgtacccataaaaaccacaggctccactggcagaggtgctgcagaaaaggagagaagagaagaagcagccagacattggagagaagcagcttgacttcagagggatggcttgacggggaatatcagaggagagcttggctggggagagcaagactccggggaaagaccaccttctcacctcatattctttccacctccccttcccactgcaagccactttcatt

SEQ ID NO: 6891 - DNA, 1108 bp, Homo sapiens
atcatcagcaaacagagattactttttctttctgatttagataccttttctttttcttgcctaattgctctggaccttacttccaatactgtcttgaatagaaatggtgagagtggacatcccttccttgttctggaacatagaaggaatacttacagctttttatcattgcatatggtattagctgtgggctattcacatatgatctctgttgtgttaattttctcctatacctagttgttcagtattttttatcatgaaagggtgttgaactttgccagatgtttttctgcatctattgatgataacataatttttatccttcattctgttaatgtagtgtatcacatttattgatttgtatatgttgaaccatccttgtatctcagagataaagcctacttgatcatggggtgtggtccttttaatgtgttgttgaacttggcttggtagaccaatggaacagaacagaggcctcagaaataataccacacgtctacaaccatctgatctttgacaaacctgacagaaacaagcaatgaggaaaggattccctatgtaataaatggtgttggggaaactggctagccatatgcagaaaactgaaactggaccccttccttacaccttatgcaaaaattaactcaagaaggattaaatatttaaagtaagacctataaccataaaatccctagaagaaaacctaggcaataccattcaggacataggcatgggcaacgagttcatgactaaaacaccaaaagcaattgcaacaaaagccaaaattgactaatgggatctaattaaaccaaagagcttctgcacagcaaaagaaactatcaccagagtgaacaggcagcctacagaatgggagaaaatttttgcaatctatccatctgacaaagggctaatatccagaatctacaaggaatttaaacaaatttacaagaaaaaatcaaacaaccccatcaaaaagtgggcaaaggatatgaacagacacttctcacagaagatgtttctgtggccaacaaaaatatgaaaaaaagctcatcatcactggtgattagagaaatgcaaatcaaaaccacaatgagacaccatctcacac

SEQ ID NO: 6892 - DNA, 1032 bp, Homo sapiens
tttgaatttagtttgttctttttctagttcaagttgtaaagttaagttgcgtatttgagatctttcttcttttttagtatgtttataactaaatttcccttttatccactgctttacagtgttccatgagttttggtatgttgtgttttaattttcacatttctctaaatattttctaatttcattgtgattttgtctttcaaccattgatcaaatgtgtgttggtaatttccacatactttttaatgttcaagtttttcttctgtttttgatttctaactttatcccactgtgggtggtgaagatactttgcacatttatcttttaaaatctaccgagatataatttgttacctaacatatattctgtcctggagaatgtcttctgtgcccatcaggagaatatgtattctgttgtttttaggtagaatatcctgtatatatctattagatcttggtggtttattgcattgctctagacctctgtttcctttattatcttctgtctgattgttctatcctttactgagaatggagttgaattattgttttaatcatttggatttctctctgttcctattgttactttttgtcttaaagaacatttttaacttaaatatagtatttctttattagaatttgtctatgtctttttgcatatcttttaaaattttttctcttgttatattttgtgtatgtttcttttataccaaaaatatctggatattttggttttgttttaataatctgggaatctcttaattttatgtgacagggaaataaatggaaattttcttttttcttctcttctgatttttattaattgaatgagcttcttattaattgaatgagcttctaatgttcttttattttccttttagcagtttaagaattatagttttttttatttaatgattactcttaaattttaacaagcatatttccctaaccaacaataatattaatcagtatgtcttttatcctcctgaatcatataggagaactaaaaaacttcaaaacttttacttatcat

SEQ ID NO: 6893 - DNA, 1049 bp, Homo sapiens
tggcagcaagaggatcccctgagacctattctccagacaaacaacgctaactagtgaaaaaatctttaaaaaacaaacaaccgactgggcacagtggctcatgcctgtaatcccgacactttgagaggccgaggctggcggatcatgaggtcaagagatcgagaccatcctggcgaacatggtgaaaccccatctctgctaaaaatacaagaattagccgggtgtggtggtgcacgcctgtagtcccaagtacttgggaggctgaggcaggagaattgcttgaacccaggaggcagaggttgcagtgagccgagatcctgccactgcactccagcctggcgacagagcaagactccatctcaaaaacaaaaaaacaaaaaaacaaaaaaaaaaaaccatttaaaatacctggaaatagttttaagtgcatacggaaaacaaagaaacacttgttactggtggagggtcttgagtatgagttgcccgggtccttggagatttggacaaagtattgaacaaaatgcacaaagtagcagaggaatgaaatgcagcaaagaagcagcaaaagcagaaacttattaaagagagaaagcactccacagagtgggaggaggcctgagcaagctggtcaagggcctggatgcaaagttttctgggttttaagtacccaatttgaggttcttattggctaccccttatctggaagaaggttttgtctgtggctaaaggctgaggtgaattggcagcccatgcagataaagggatggtccctgctcggcctgtggcctatccaaggcactctccctttccatctgagatgtggcggaagggggagggctgtagggagagtagcttttgatcctttgttactcagcttggggagagggttctttttttctttttggtttagttttaggaagtttgtattaattggcctcaggttccctgcccccaaacctaggcgttttccttttgatccagctttgggaagtcagcatgaattggccctagattttctgcccccagaccttggtgttttctgttttaga

SEQ ID NO: 6894 - DNA, 1026 bp, Homo sapiens
ttgatgagaagtcaaaactgtacaaacttattttcattatagtcacattttgaacactttatatctttatttctctttactatttatttctacagtggagcatttctaatgcacttagaatattcttttagagagatatttttaagaattccaggataccaatccagctatgtaattctgagaaataatttttagaaccacactacagtggagtacctctcaaaaactacatggctctaactcaagtttataacagtaatataaggaaaatgactgagaatttcagtaggaaatttaagatgcagcaagctaaattacagtcttagagaattaaattaaaatgttggcaaactgctttagatcatgttataaattctatgaaatatgacaataatgtaaaataataaaaaaaggcttctgctactttttccttcatttaaatgaatgtgtgtgtgagtttgtgtgtgtgtgtaactgctttttatgttggtgtagaaagactatgtaattgcatggttattatgttatgcaagtatacatttgtaccatgttattgtgttgagtaatggtacagacttacggcattcaagttctggctttctacctatgcatttatagcaattaatatttattactttggtcctaatggcttgctttggaaattaacttagaatgacttagaagcacacactcatcaactactaatagcttatggtacaatagcatccaaatttcaaatctatacttggtaagtattttcaatcaaactatgtaagattataattaaaaactttaaaagtcgttatatattttgcaaatttaccatttgattatttttattatttattattgccatcctaaatttttctactagtataaaagtatattttgttcttaaaaatgccaagttattgccataaaataacattaatttccatagacgtacaggttagcaagattctactcagtctatttctctaaaattgtttgagtaaaagtgttagcttcttatttcttatttctatt

SEQ ID NO: 6895 - DNA, 1029 bp, Homo sapiens
ctaggaaagggaactccctgaccccttgcgcttcccgagtgaggcaatgcctcgcccgcttcggctcgcgcatggtgcgtgcacccactgacctgcacccactgtctggcactccctagtgagatgaacctggtacctcagatggaaatgcagaaatcacccgtcttctgcctcactctcactgggagctgtagaccagagctgttcctattcggccatcttggcttctcctcccaacaagttcttttgacactaaacttttaaagtagatgtaaaaatatccattttaactattaaaataacaaagtttatcttccaaaccagtagagaaaacaaatagaacagaagtagtaatggagaaaggagaggagaggagtttattaattcaaattaaatgaaaaaaaggagaaagaaataagaaatgaaaatcaaattcaagtataatagtaaacatgataaatgcaaatggttcaaattcactaggttacacagggattatcagactggataataaatggaagttttcctttcttttttactaaaacacccctaaaacatgaagagacagtactgttgaaaatgaaaggatggaaaatgttaaacctgatatgtagcatcagtttggctctccggaatcattctagactgtcctcccttctcatccctctctcacccccaactctcacctcagctctatgccatggatggtgatttatgtatggactacataaatgagcctcttttgctgtgcagcttctgatggtctcaacctgtgggggacacaatctggagcttagagtgttggcagatagagaggtcagagcattgttctcctaagttccttcctgagagaccatagaatggcaatatgtgtgttcctctgtcaaaagccaaaactttagtaagatggccttccacagtattctgtggcctaggaagatttatgaatgcagagttctttctgctttcaaagctaagtgttttaagaaccaaaccctttgggaggaacaacaaaaattggggtgcttt

SEQ ID NO: 6896 - DNA, 1034 bp, Homo sapiens
tcactgacataaatattgcaatgtgttatagaataatgaagttactgataatgtaattaaatattcactgcttctggattagcatttctaaatcactattctagtgatgtaatgtcattattcacaaaacttcatggttcattgccaaccctattccttcttcgtatatggaaatcaccatcttcttccactggaaatattttctcagattagagatgccattgtttatagattttcaattactgtagttgatctaatttcacctaggagggtatatattgattataaatgtttacatgggataattacattttatcggttaaataggaaccagtatatatgctattggtttagtagcaatgcctttccaattacagcccacctttatatgatataaattgtctttattctttccccttagcatttttagagtttttaaggacatggtaatttgtattgaaagttacactactcagtggtattttccaagaagactctgcaaatcttttacattctgtgttactagcaatgtgatataaatcagttaacatccataaccgatagctactcatctacaaagagtcttaaagagtaaaacgtacaattcagaaatctgaactctggtgttaaaaaatcctcaagattattagagcaactaccatttgaaaaacagatctgaactatgaagttctgtatcagaattttgattttgaaaaatttctgtaggttaaataacaagaatcaagaacactacataccatacttttggacaaaagtttattataaccctatattataataggccaagtatatcacagtggattcattgttattactaaaagtatgcattcatagtttcagtcactttaattatcatacatggacaatgactagattttttattattaaagatatgtaaagtaaaatacataatatatcaagaatatacatcactgccactaaatagaagtgttttcattgttggaaatttaaaattatttacctattatgaaaacgttagttcttaaaaggat

SEQ ID NO: 6897 - DNA, 1045 bp, Homo sapiens
tggcccagaaatttaactagatacttactcaagagaaatgaaaacataagcctcaaaaacttacatatgaatgtacatagcaatattattcacagtaaacaaaaagtggaaacagctcaaatgtctagcaactgattaatgaataatcaaatcatagcatatccatacagtggaatattatttgctaataaaaaggaatgacgtacagtcatatgccacataacaaaatttcatcatcagactgcatacacagcaatggtcccaagagatcaggagttataggaactgaaacaggacgataaaaaaagaagaacccccaagtaaattcatagtaaacaggtcagaagaagctgttgcagacctcaagaagctccttaaaaagtttgaaaacatggacctcaatacctagtggtcttaactaacagagaagaatgtccatggtgtattatctgcttaaaagcaaatctatgatgaaaattaactgaccatatcaccgtggacacatttctgaaaagggtgacaattcctcaagaatagccccacacaagtcctttaggaagcattccagaaaaaggcatgcttgtctaggagatgacagcttcatgaatgttattgctcctgaagacattccggtgtaataagatgtggaggtggaagacagtgatactacttaacctgaagggtaatatatgcatctgtcttagtttttttaaaaaaactttaaaaagtaaaaccaaagttaaaattttaaaaatgtgaaagtaaatcaaagcttatagagtaaagacctaaagaaaatatttttgtatagcagtatgtatgttttaacctgcgttattatggaagtcagaaaattaaaaaaattacaaagcttataaagtaaaataattaaaaagtaagctaaagtcaatttattactattattattattattattattattattattattattttgagatggaatctcgctctgtcacccaggctggagtgcagtggtgcaatcttggctcactgcaacctccgcctcccgagttcaagcaat

SEQ ID NO: 6898 - DNA, 1641 bp, Homo sapiens
attaatgtcctaggcttccacattcactcactactcactcactgacaccaagaacaacttccagtcctgcaaacttcattcatgataaatgccctatataggtatgacattttaaatcttttatcctgtatttttactgtaccttttctatatttagatatgtttagatatatagacacttaccgtagtattacaattgcctacagtcttcagtacagtaacatgctgtacagtttgtaacctaggagcaataagctgtgctatatagcctaatatactccatgatgttctcacaatgacaaaattgtctaatgatgtatttctcaaaatgtatccccgtcattgagtatcacatggctatattaatatgtatagtaagcttgaaccttgcatgcattattctaagtgaaagaagccagacacaaaaggccacttattgtacagaatgtccaaataggcaaatccagaggcaaaaagtagttagtggtttcagacactttgagagtagggaatgagtagtgactgctaatgggtatggagtatcttttaaggaaaaccaaaacattatggaattagatattggtggtaattgcacaactgtatagaaaaactaaaaaccgctctttggacatgaacatggcgaattttatggtatgtataaaacttattttaaataaagaatcaaatgaagattataaaactgaaagattcagtaagagaaataaaaataatttgctggattagccagtagtaaagtagagatgacagagaattgaatcactgaaattgcggataaaacaatagtattcactctgcagataaaatagagtgaaagattatgaacatagcatcagttcttacatgataggaactaaagagccaacattaataccatctgagtcacaggagtggagaagagggtggggctgaaagaatatttgaggaaataaaggctgaaaactatcccaatttggcaaaatacagaaacctacaggtccaagaagacaattgaacaccaaagaggttaaatgctaagaaatccccaccaaaatacatcataattaagtttttgaaaaatataatcagagaagaaaatcttaaaagcaaccagaaacaacacactacatattgacaccaatttgaatgtcagcaaatttctctttttaaactatggagtctgtaaagaagtggcataatttccaagtgctataagaaaagaacttcaaactgtgaattctgtgtttagagaaactatccttcatgaatgaaagggaaacaaaaacactgtcagatgaatgcaaactaaaatcatttatctgctacagaccttcctttaaaattgtgtaacagaagttcttcaaatggaaaggaaatgacaaaggaaagtaatttaaagtataacctacataccattggctatcctcttcctcatgaaatttgtaaatcttttatgattgaaacaaaaagtataatcctatctgatactcagtgcaatgatatttaaaagttgagaaggtaaaggtaaaaattggacatgtggtttcacacttcattctaagtggaaaatgctgatactggtgaactactttaattcatatatgtatgtagcagtacacagagcaaccactatggaaactacac

SEQ ID NO: 6899 - DNA, 1069 bp, Homo sapiens
aatacaaatctggaagacaagcactctgtcctatttcttgatagtttctgtagttttagcaaagcatcttgcattgtagagggatctcaattctttaatgactgagtgtaatatatagcatttttcaccaaaaagagtcatttatcctatagtaaaaaaaaaacaataaaataacactgaaagcatgcagagacttgggtgaaatttagaagctttggaacatgtatttcatcagtaagttatttactttgtttatgtgatagtcctgacatggaaaatcagtgtaagccaagatagtattgacagaaagagcataataaatagaaaaggggtacatgaatcagattatttacattttgaagatggtggctgcaatgagtactgcacttgaattaatccaaaagatctcccttgagctgaaagtgtgtgtagtcataattgcgtgacctgtgacacattgtctttgtcccactggcaggttacaaaattggcactgaatcaagatagagtaattataggaaagtagaaactgtctggatattccactgaaagctgaagatgtgatccattcttgatttgctttgctaatagctttaactttgagaagacagagagaatagtaagataaacaaccaacaggtgggggatgtaggagtcctgggagagagaaaattatcatgccatttgagagtatataatataaggaaaagagaatagagaagtgaagcatttacatacccccaggttttggcaaaatgtattccaaaatgtttacaggaaagctattttgattctgtggcaagagagctaaaataaaataccctaataaatcattcattcatttattcagtttaagtaatggtattagaaagggtaaagctataagtgagttaagccttcaaaatgaactttttttctttttttgttaggataacctgactgatacagcaaggttatgctgcagatatgatatatcttaactttgtaatggcatttatgaatatctggtgttcttttgaagttgacagaaaaatggacactgggtaatagcatagctattgttggtggt

SEQ ID NO: 6900 - DNA, 1049 bp, Homo sapiens
tacccacatttggatgaaacagattcttatactatattttattcactcattcattgttcattcataaaacactgttgactatcaactaagtattgtggggaatgaaaaacaaaaataggcttttgccttaaagaagatcccagaaaagcatggagacataaagagatggtgccatattaatatcacaaataattcatagaagaggtgatcatttcaaagttgaggtgaggtagaaggacatttgaaggtggaggagagaatagatagggaacctatgcaaaagagtcatgtagtaggaggtatgaagacaattgcaggcagagttagtcactgctttgttttttatgtatgtgtatttttaaggagtattatcctaaagtcattcaaagagttgtatgccttgtggtgtttggaaaggtagctagtatcaagtttggggaatgataccgtatttgaagtaatagtattaagttgaagaattatctgtattcatatttgatagaatcactgactctacctggttgtcaaatttaagcgtagatattcttttcttttgtatttatttatttatttatttatttatttttgagacggagtttcgctcttgttacccaggctggagtgcaatgacgcaatctcagctcactgcaacctccacctcccgggttcaagtgattctcgtgtctcagcctcctgagtagctgggattacaggcatgtgccaccatgcctggctaatttatttttatttttattttttagcagagacaggatttcaccatgttggtcaggctggtcttgaactcctgacctcaggtgatccacctgcctcggcctcccaaagtgcttacaggcgtgagccgctgagcctggcctgattttcatatcatttttaattccatggtttgttttataagagattttgaatagcaaaacagttattatgtacaacaaataagatagtaacatctctttaatttttaaattttcttcacaacaatgtttatggcagtatgattataatctattgtattatgatcaatttgttct

SEQ ID NO: 6901 - DNA, 1025 bp, Homo sapiens
atatttgttccaaatgatgattcatgaacccaagaaaggattaaagaaagagttaatatcactatgcttttgaaaatggaaagactgcaaatgtctcagtttaagtgtctttacgctattctaactcagataaagtggtatgtaaggaggccatatgccacagagcccagatgttcttgaaccagtaaacattcttcaatctgaatcaggtaagatctttagcttttcttaactgcttcaaaccttaaccacctcaactttacagtttatttaaccaagctccttagaaactaacagcaggcacagcaaaatctgtttttaaaggaataaacagggcaaaatgaaattgaacctttacattaaattaacattattttatccctaatgttgattgttgtttctgttaaataattatgatgaaaagaaaaagtgttgatgcaatcacaacttgacattttgttgttaagcctcctcattttgttaaacctcctcacatcatctaattgattattaggtggctgatttcattcacctggctatagtaggccacctgtaaagcaactgtgcctatcctacagcatgactcttcagtgctctgaaaagagaaaagggctgagaagttgaaactgggagtctgtcatgttcttgattctattggtcattctgttggatcttttagaaaatcattttacctctctgaccttcagattttcaatctgtaacttaataatagcccttggcagtgaaatgtcttgaatggtgacttttaacatagcagcagtcataaaaatataagagtataactatataaaagggtttctaggagcttactcttggggcaaattgttttgccacataatattttttaaacggacaggacagttatgaaagattctagagagtgttgtcatgttaactgatcaaatatatttgttaggagcatttttattaatcagtacacatgacttagcctgttttaaacaatgtcttcaaatcttaaatatttcatttaaggatattaaaag

SEQ ID NO: 6902 - DNA, 1033 bp, Homo sapiens
gttgtaagttcagatatgctgatgattattatctgtgttaaagcagcctcaacactttccaaaatatattcatataatagtagctcattatctatattaaaccacaataaagttaatattaataccatggattttataaaataactttgaacgaagctgaaagcttcatttagtttaataataacgatgcttgaggaccactttggttttaataaaaacatggaaagtagcagatgagaaagaaccataaagatgccagtcgaatagctgtaataccaattagttggcaattgattcattcatcaaatatttattgactacccactatatttatgtaccatcacaccttggaccaatagaaactgaattaagttttaaaactacgatgaataagggtgcaaatgaggaatgactgattgataatcccaatgagtgtgggatttttctttgtggtgggtgatgaaaatgttctataattacatgacaacaatggttgcacaattctgtgattatactaaaaatcaatgaactatgtgcatccactctaaacatgttgattttatggtatgtgaattaaatctcagtacagctacttagaaaaacaaagctttattgatggaagacaacaatgtcataatgatattgatcataaagttattggctctcagccagtgttgaacaagtagacaagtgtgcatcaaacggtttatgagacaatcctaaagaagtcggactatttggatttgggattaacatttgctctactttgcatgcacaagaaaactcaggccttgtgacacagtatgcatgcctgtttttaaacaatcacaaatttacaaaaaagtatttacaagtatatataaagaatttttttcctcataccatttcagagtaatttgccacctgacacccttttatctcctaatactttgatgtatatctcctaaaaaaggaacattttccacataaccacaatgtagccatcaaaatggagaaattaacactgatgtacgactaccacctaatcctgact

SEQ ID NO: 6903 - DNA, 1018 bp, Homo sapiens
gtaagtaatgactcacaagttggaaagctgaaattgaccaataaccacaaaatgatttaaagatatcacttttttatatttcaaagaaatcagtaattcctgtgctaattaaactgtttcacagcataaagaaaaaactgaattttttccgaagcaagtgtaaatagttatccttttattatagaatgcaaaacctgacaaagatagcgcagtaaaaggatgccttgaaaaactgatgatgtaatttattcaagacaataaaggtataaaaagatctggtaaaagtctggaaaaaataacaatgaaaagtctaatggagtgtgaataattatcccagatattaaaacataaaactatagagattaaaacaatgtgggctttggcctcactacacaaattagttaaaaagaaaaagaatacagaaatagattcaaatatatgtggtaatttagtgccataataaagaatataaaataaatgaaggaaggatgacttttcaatagtagtatagggagagttggctggaagctgttcaaaaaatatgaattcaaccattcctctttatattaatttttaagttccagatagataaaatagtgtactataaaaaggcatacataaatacataagatcgaaatatgagtaaacatttttacaaacttgtaatagggaggacccacaaagaaaaagactaatcgctggtgactgcaacactgacacataaattctataaccaaacctcagtgaaagactaaatcaaactagcaaattatttatatcacttagaataagtatccctaacataaagagtcctgattaactaattttcttaatgtgctaataggaaactaggcaaaggaagtgaatgggcaattatacatacatacatacatacatacatcccaaagaaagaaataggaatggcctatatgaacatgaaaatatattcaatcttgctaataattaaggaaatgcaagttatgactatactgaattatcatttatgatttattagata

SEQ ID NO: 6904 - DNA, 1048 bp, Homo sapiens
gcagatacaggcaaaatctttgcgtgcccagagttttgtctactatttcctatttgacttcaagcttctcacttgatgttaatgaggatgacggtgatgatgatgaagactgacatttttgaactcttatataccaggcgttttttaagccctttacatttaatcctcacgatgacttggtcaaaagaattcgtgtgctagatccactaaaacgtaaactccatgaggtacagaatctttcatatatcatcagttttgttcactgctaaatccttggggactaaagcagtgcctggcatatagtaggcgctcaagaaacacttgttgagtgaagttatttgcttctcaaatgattttttaattatcaaggctttggagttttctgagcatctatagtttgacggtgatttcttattggtagtaacagattattattgaaattattaactaaatttatataatacattatagtttataaaacactttcacatacataacctcacttaaggcagtcagtgacatttttccactagaaatactgaaatacaatgtctctaccaaatgaaaaataaaatacagccattattacaatactaccattgttccatttcttcaatgagcagtaagcatttaaattaagaatgactagggtttctaataaggattgtcaagtatcagaattgttgggggtttttttaattgaaagaagaaaatactagaaaatatttctccagttggcttagaaagaaggaatttccatttgagttccaaatttacttaacaatctggaaaggtagctgcaagtctgattctggtaagtgtttgtgtctccgaaatcagtggcaacaaaatattttaaataaaccaagtaaagtttttgagtatgtaattaaaaatagaactgatgagatcacttgccaagaaccgtgaggatttgcattaaaaacaatgatttgagacagtcatgatttattcagcacattctacccaatgagagaacaattcgtatgaaagtcagggagtgctcagctatgttatagaaagtgtt

SEQ ID NO: 6905 - DNA, 1055 bp, Homo sapiens
tgatacatttggttttactcaagagttatatgggactcaacagatatgaaaatgactcatatgtagctatgataagccaaattatctggttgagccatggctcctataaatttaatgaaatctttactatccctgagcatcttaccaagtgttcctgtccatcattggacaaacaatgtaacaaagcagatcaacataattaaacaatatgcttcttaaattacctatgatagctacagctccgcatttgtggtcacattcggtcaataatactcaaggtccttttctagtacttaagacgcttgtcagctaaatgtcaagtggtctttcttccatgtccatttgtacatagcataactctatccatggagtgcttttgtaatttttaaaacagtttatgagaatgaaaagtcaagccatagactgggaaaaaaatatttacaaaacacatatctgataaagaactgatatccaaaatcttcaaagaactcttaaaactcaacagtaagacaacaaacaacccaattaaaaacaggcaaaatatctgaacagacacctcactaaagaaggtatacatgtggcaaagaagtatatcaagaggtgctcagcatcatatgtcattagagaattgcaaatttaaacaactgcaagatactgccacacacctattagaatggctaacacctaaaacactgacaacaacaaatgctggtgaggttgtgaagcaacaagaactctcattcattgctggtggaaatacaaaatggcacagccactgtgaaatacagtttggctttttttttttttaactaaactaaaacataagcttaccatattatccagcaatcaggctcctaggtacttatgaattgaaatgttatgttcacataaaaacctgcacacagatgtttttaacagctttattcacaattaccaaaaattggaagcaaggacaatcaagatgtccttcagtagtgaatgcgtaaacaaactatggcacatccgcacaatggaatataattcagcaataaaaggaaacgagttatcaagccaaa

SEQ ID NO: 6906 - DNA, 1106 bp, Homo sapiens
gtggcaaaacatgagtgggaatttcattctcagaccctgctggccccaggggcttgttcttaacccggagggcagtggtggtagtggcagtggtggtctgtactgggaaggctggctgccacacggtcacatcggagccattgccaaaggcttgaattgcattttctgcagtaaaacaggaggaaatccaatttcaaagtcaagcagcaaacgtaacagacaggatatacacagccagagaggcacactagaaattctgattatagcattggacttctctgaacaaaacgcatccatccatttgccctatacatgctgagagccagtctttggggtcagttgctcaaaaatcaattcagtcattacaccctgagctggacacttagctatgctcagaatgcaacaaatatttattgtgttcctgtttacgtgccaggtgctgagcaagatccttgccctaaaatatccatcagtcaagccctttgaaacccagcatcagtactgttacttgggatcataactgtcccattttccaagaaaattcttgtgctctgtcaatattctatattaaaaggaaactaattagtgctttttaaaaaaaatcctaatcatgagactgaggcaattccgtggcattcacattaatatggcaggcaaaatggaaccagtttctttaaaaaaaaaaaaaaaaaaaaaactaccccaaatctcatcagtatctagtgaaaatttaagtaagattattttttttctttctgctccagtcttccaagcaaaatctgcataattaggtaggagcagccctgcttaaatgaaaagtttaaaatgtaaaacttcaaaagcttattacaatttcataggattagattgtttttatggcaagattaaattggttgtgtgttgttcccctccccaaaatgaataaaaaacagtttctaatcaggtcttcggggatttggcctggatttagggtttttttttatttcatattcattgtataaaaaaccaaactcctccatttgggacctgaatgtgcaaattgttaatatatgactcttagttggcatttttctatatacaagacagaataatttaagcctaatctt

SEQ ID NO: 6907 - DNA, 1952 bp, Homo sapiens
gatggagtcttgctctgctacccaggctggagtgcagtggcaccatcttggctcactgcaacctctgactcctgggttcaagcaattctcctgcctcagcctcctgagtagttgggattacagatgctcgccaccatgcccagctaattttgtattttttcagtagagaggggttttcaccatgttggccaggctggtcttgaatgcctgaccttgtgatccgcccacctcagcctcccaaagtgctgggattacaggcgtgagccactgcgcctggcctgcactcaccacttttattgaacatcatactggacatcctagccagtacagtaaggaagaaaaagaaataaaatgcatacaaactaggaaggaagttaaatagtctttatccacaagtgacataattatacatatagaaaaactacaggaattttcaaaaaagctactaaaatgaacaaatggacttactaaagtcacaggatacagatcattataaaaaattacttgtatgtctatgaaattgcaactaatgactagaaactgaaattttaaaaaagattccatttacattaacagttaaaaaactaaaataatttaattttttttttttctttgagactagatctcactctgccaccctggagtgctctggtgcaaacacagctcactgcagcctcaacctcctgggctcaagtgattccaccatctcagcctccagagtagatgagaccacagatgcaagccaccacacttagctaatttttaaaagttttgtagagacagggcctcaccgtgttacccagcctggtgtcaaactcctgggctcaggcaatcctcctactttggcctctcaaagtgctgggattacaggcatgagccaccacacctatccttaaaaacatttaaaaaaaaatagctttaacacaaaaattgtacaatatctatatattgaaaaagaaaagaaaacaggctgggtgtggtggctcctgcttgtaatctcagtgctttgggaggccaaggtgggaaaactgcttgaggccagaggttcaagaccagcctgggcaacacagtgagaccctgtctctacgaaaagtagctggtcatgtagcacatgcctgtagtcccagcaacttgggagcctgaggtgggaggaccacttgaggaggttaaggttacagtgagctatgatcatgccactgcactccacagtgggtgacagagtgagcccttgtctcaaaaaaaaaaaaaagagaaaaagaaaaggaaaacaaacattgctgagacataaaagaagacacaagtatttaaagagatataccatgcccagtatattggtatggtatggattggaagacttaatatagttcaaatgccaaattcatctacagacgtgatgtaatttcaatcaaaattccagcaggcttttttgtagaaaataaaaaattggttctaaaatgtatggcaaggcaacagatctagaataaccaaaaaatcttgaaacaaaagaataaacttagttcatatatgcaaaaggaattgaagacttaaactacaatcaagactgtctggaattggcataagaaaagacttacaggtcaatagaaaaatagagagaagtccgggcacggtggctcatgcctgtaatcccagcactttgggaggccgaggcaggcaaatcacttgaggtcaggagttggagaccagcctggccaacacggtgaaaccctgtctctaataaaaattaaaaaaaaaaaaaaattagccaggcatggtgacacgcgcctgtaatcccagctactcaggaggctgaggcaggagaatcacttggaacctgagtggcagaggttgcagtgagctgagatggtgtcactgccctccagcctgggcaacagagcaagactccgtctcaaaaaaaaaaaaaaacccacacttataaagtcatcttattttca

SEQ ID NO: 6908 - DNA, 1027 bp, Homo sapiens
ccagtagctgggattacaggtgcatgccaccatgcccagctaattattttgtatttttaatagagatggggtttcaccatgtttgcccaggctggtctcaaagtcttgacctcaagtgatctgcccgccttggcctcccaaactgctgggattacaggtgtgagccgccacacccagcctaggattttttattgtcacggaagaatgcatatggcataatggtaagttaaaaagtaggatatgacattttcgtattaataataataacatttgttaagtgcatatgaagttttaggcactgtttagatgatgattacaaggtgtcttaaaagcaagggaaaatgcctgtggtataacggcatgcaagaaagcaggatataaaatgctgatgtttagtaagaattaatatgtatcaagcacacatgaagctcatcactttgtgtatcatttcactaagccttcaaaaaattatatgtggaggctactattattgtacatttacagatcaagaatgaagacagagaaagaggttaagtcatttgctttagggacctacctggtgagtgaaggagccagcattcaaagaaagggagtcttcttctacacagagaaaggactagaaggaaacagggcaaaatattagcagtggttgtatgtgggtgctggtgcgaggacagctctgtccttggcattgtctttggctctgagtaactgagaacctagaaaacaacagcttgagcaagtgaggggctcattttcttccattccaagaagtctgggggacacagccacggttggattggaggctctctgacaccggcagaacctggcctcaaccctctgagcatgtgagttttgttctcaggtttgtcacttgtgtctcaaggtgactgcccacctcttgggtcatttcttgcattcagagcaggaagagggggaaaggtgaagggctagaggtggaaactggctgaatggcccctttatcaaataaccttcctgtaagttccaactagcaactagtttcaca

SEQ ID NO: 6909 - DNA, 1049 bp, Homo sapiens
agtctcctttagccattttattatttctcttttctgatgaaagtacttttcaaaagtattgaatatgtcatgatttgagctggcaaaactatagataatttttcttctttcttataaaaccctggctggttcttgaacctgttgaccatttgggtcaagggaaagaggttgggggctgttcaggaggaaggtacaagaagggatggtagggacctctctggaggagagaatttgaggatcctctgctctgaagtggggtggggagagtgcttctcccattggcccttctagtttgtgtttcagatctgcccaggttgtttctttgttaacattcagccaggaaccccagggacactcgctttctaaggaccttcagtagccaacatctcagtgatgccataagacaaatcacacttcttcctctgtcaattggcatgccactctgtttcttaggcctcattgaaagtggagaattgaatcccaacgtcaaattcccaagtactgaaatcagagacagagaacaatacagtaaaatctttctaaagctggaataaatttaacttagaaatcttgtctgtctggctgtcagaaattttggatatagagagaaaacatattgtgtgttgagctccagctcgttgccaaacacttactcaaaccatctcatttaatctttccagcaatattcagaagtaagaatcacccctaatctatccacaaagaaggcaaggtttagagaggttgaccagttatccaagatacacagctaacagtggaagttgaatccaaactttcattttaagctgtttttcttgtattgactccacatttttatactttgataaacatgagtatactgacatttttatctttctaaaaatgtaaataaagaaaggaacatgctgctatgttccacagaaacaccctacagtgggattttgctatgttttcaaagtattcctagcaagcctgtattcctttaagcacgcatcaaacataaatagatgctgtctgtattaggggcccttgtttcctctgagaaagtggtg

SEQ ID NO: 6910 - DNA, 1024 bp, Homo sapiens
tggggtacatatgatgttttgatacaggcctacaatgtataatgattacatcagggtaattgcagtatccatcacctcaagcatttatgatttctttgtgttaagaacattgtgattccacttctagttttcttttttttttttttttttttttttgagttggagtctcactctgttgcccaggctggagtgcagtggcacgatctcagcatactacggcctccacctcccaggttcaagcgattctcctgcctcagctgcctgagtagctgggattacaggtgtgcaccaccatgcccagctaatttttttgtatttttggtagagagtagagatggggttttaccatgttggccaggctggtctcaaacttctgacctcaggtgatccacccgcctcagcttcccaaagtgttgggattacaggtgtgagccactgtgcccagccaacttctagttatttttaaatatacaataaactatcattcactgtagtcaccctattgtgctatcaaatactaggtcttattcattctaactatatttttgtatccactaaccatcccaaattttccccctctccccactacccttcctaacctctggtacccaccattctactctctatctccctgagttccattgttttaatttttagctcccccagattagtgagaacatgcaaaatttgtctttctgtccgtggcttcttttacttaacatgatgcctccagttccatccatgttgttgcaaatgacaggatttcattcctttttatagctgcataatattccactgtgtatatgcaccacattttcttttccattcatctgttgatggacactcagtttgattccaaatcttggtggttgtgaaccgtgctgcagtgaacatgggaatggtggtatctctttgatacactgatttccttttttgggggtaaatacccagcagtgggattgctggatcatatggtagttctatttttagtttttcgaggaatttccatactgttctccatagt

SEQ ID NO: 6911 - DNA, 1024 bp, Homo sapiens; identical to SEQ ID NO: 6910

SEQ ID NO: 6912 - DNA, 1051 bp, Homo sapiens
ggttggccttcttagcattcctccatgggagattctaggattattccagctgtgttacttcaaggattcttgaaactcttcttggacccatttgttgactgactgctttgatggactgtaaatacacatcattaaggctagatgccttaacgcatctagcatactgttttgactccgctagatgatgacatgtctttgtctttcaaatgcgaatttgatttttcggaaaatcaaattttgttaggcttgatgcgtaaagtggccattttggagctggagagtaaggggcaagaatggggaatgagaagactgggacctttcccagtgccctgtgctgggttggggtttataaaaaaccctccaaggcattggctttgttaggctgggctcttctgggtgtgcagcgttgtgtgtttgttttaatagtaaccaccattattttataataaaatgacggttggtggaaggtgagcactcctatccttggttgacaagctgggcagttgatgaagagatactctgtctgtaatcctttaaccagggatgtgcccagtagaggctagattcctgttatctctgtctagtgaactagtgaccaactaatgagcagggaggggtgctttagcatgtgcaaaatccgagtcaattgaactgacatgattcaagacctcctgggtgtgtaatgctggctggggtacttcaggaatgcaaagatgtgagattctgctcttcctcttcaggaccttccagcctagttgggggaaaggcaggtacatgatcaactccattacaaagtaatctaagtacagaggcagccttgatggggggcagggatcagtaaagctttcatcagagaagtggtcttgagctgtgccttgaggacaggtggctggtggtatgaagacagcatttacagggcccctaactggtgcaggctctgtgaaggaggctttatagagatagatgtatttttcaccacggtccaatgcattaggtttcattgtcttttgcacatgacaaatctgacaggctaaggacacattcaggtagg

SEQ ID NO: 6913 - DNA, 1029 bp, Homo sapiens
cttttctgcatcatactttctgctcattgtgtttctcttcatatgttcccactaccagctaactgaatgttgacaccccaaagagagaaaaattggttggtgagttagtcactgcttttctcttggacagagccctcaatttaagtcatctggtaggcacaccagtcattgttggctgcccttgggtcaagtggcctgccctgggccaaccagctgtgaccagggaagtgggtcagagagttcagagcagcgctgtccaatggaaccttctgtgatgatggaaatgttctgtatattatggtagctactagccatgtgtggccattgagtgcttgaagtgtggcttgtgctaccaaggaactgagtttttaatttcatttaattttaataaattaagatttaaattcacatagctgcatatggctagcggctaccatagtggacagcatagctctagaacatgggcccagtttttggcgattatgaataaagccactataagcattcacgaacagctttttctatgaacataagttgtcatgttcttggcctcttctctccactaaataatgtggtataacattctcttgagatcagttgtttttttttttgagacggagtctccctctgttgcccagactggagtgcagtggagcgatctccgttcactgcaagctctgtctcctgggttcatgccattctcctgcctcagcctcccaagtagctgggactacaggtgcccaccatcatgcccggctaaatttttttgtatttttagtagagatggggtttcatcgtgttagccaggatggtctcgatctcctgacctcgtgatccacccgcctcggcctcccaaagtgctgggattacaggcgtgagccgccgcaccggccaaggtcagttttttaaaaagccaattaatatctgatttgtgattctgaatctttaacatatttaaccgtctgctttttttttttttttttttaattcacagatgacatggtctttttttttttttattgatcattc

SEQ ID NO: 6914 - DNA, 1055 bp, Homo sapiens
cctgacctcagatgatctgcctgcctcagcctcccaaaagtgctggcattacaggcgtgagccaccgcaactggcctgtaatctcagctgcaactgagcacttttctgagccagacactgttccatgacctttacatgtattatttcatttcatctccacagtaaaccttgggaggatggtttcattattatcctcattttacagatgaggaaactgaggcacagagaagtaatttgcccaggttcacagagggagagccaggctctaacccagtgtttgactctaaaaccaggttttcctcagtattgacaaaaatgttttgtgaacctttctaccttcttgactacaaagtgataggatttatattttcatgggtaatagctgaaatgtatctttagctatcctaatcattatagtgtagcctatatggagaattaaatagcctctcaaatgtcaaagcaagcacattaaggaaggatctatgtagaaagaaaatgctaatagtgtgataactagtttgtttgttgatcctgtgcctgcattgactttcttgcaaaattcatatagttacagggaatgttgttatgtaatgaattgactagtagtagtttttccagctacggtcagttgatcaggtttctcttcttaagtgtttggaagatctgcagtttgggaagggaatagatacaggggagatctttgagcagatgcattgacatgtgtactcattgggaactatttcctccagtggtgagcaacctgaagcctttctcagtgtagcttttcaagagtcctagatccaatttcatagacatcctttcagagcatgcacagcagaggtgaaatggaggagaagcgtgtagggcaaaactaccttcttcaaagaagggagaaactttgtagaatcactggttcctagacgcttgtgttttggccaggccctggccagcaaaggctagccaaaggcatgctttggaggagaggtagtatcaagtttttttagagtagaccgtgaaggtgccagaaactaaggtgcactgacagcttggtctat

SEQ ID NO: 6915 - DNA, 1050 bp, Homo sapiens
caccatgttggccaggctggtctcaaactcctgacctcatcatcctcctgcctcggcctcccaaagtgctgggattacaggcgcgagccactgtgcccggccccatacttttttctttgaagccatatgaagacccttaaattatggagaggttactgaatggtaggagcctggagttttaaatacatacacatttctcaacttgatgtgaaagttactaacatttattatgtgacggatgctgggcacttttcacataatcctcatgaaaacctgggactacaggtgtccggctaagttagatggaattctgtttacgaaggaggaaactgaagctgagaggggttcagagactgtagtagagctaggattcttcacccaggacaccaaatgcagactacatctatagcacatccaagtagctgaattctgtccagctttccagttctacagtcagccccaggtcacccttgcacattctttcctgtcacctggctctctggcttcaggccccttcatgttcatcctctacagatttgtcctgtgttctatctcaaatccaaatctgccctgctggaggaagcggctcctgaatttactacctgttgtcccgctgagtgggttcctgtttagttcttcagcctcattcttcctgctccctgtcttattctgcatggccagcagtaccaaactatttggagtcttctttgccttcagtggacatctgagtgtctgctatgtgttaagcagcctgctagaggccaacaacagctttttatttttatttattaattttaatttttattttttcttgaggtggagttttgctcttgtcacccaggctggagtgcagtggcgtgatcttggctcattgcaacctacgcctcctgggttcaagccgttctcttgcctcagcctcccaagtagctgggattacaggtgctcatcagcatgcctggctaatttttgtatttttagtagagacagggtttcaccatgttggccaggttggtctcaaattcctgacctcaggtgatgcacccacctcag

SEQ ID NO: 6916 - DNA, 1059 bp, Homo sapiens
ccttcccagttcattccctttcatctcacactggctgttctcctgctgaagtggcttaagtccatggttcacacccatattactctccttatcagagggacttgggcacacctgtagtgttttcccctgaacgggcctttttaaaaatttccatagtctggctagaacttttcaaatctttaagttctacttcatttttgcttaacaactctgtctttaagtcatagctctcttctcgcattttactataatcaggcaggaggaggcaaacttcatctttgacattttgcttagaaattgcctcaggtaaatatccaatttcactcttaagtcctcccttccacaaaatactagaacatgcacaaatttcaaccaagttctttgccactttataaccaggatcatctccatattgtccaataacacgttccttattttcatctgagacttcatcagaatgctcttcacggttcatgttttctactgacattctgctcaggattacttaggaattctctgagaagattgaggctttttctacagctcatctctcttctttctgagtcctcaccagaatcacctttaaaggttcacacagggcagtgtaggctttttctaatagtatgcacctccaaactctttcagcctctacccattacctggttccaaagctgcttccacatctttagatgtttgttatagcagcacccctgctgcttggtaccaaaatctcgattagggctttccagaaccaatagtgtatacgcgcgcatgtgcttgcatacacaggcgtgtgcacacacacacacacacaaacacacacagttgacccttggacaacacaagtttaaactgtgtgggttcatgtatagtgtattttcttttgcctctgccacccctgagacctcaagaccaacccgttctcatccttcctcttcctcagcttacttaacatgaagataaggatgaagacctttataatgacccacttccacttaatgagtagtaaatacattttctcttccttatggttttctttttttttttttttgagatgga

SEQ ID NO: 6917 - DNA, 1031 bp, Homo sapiens
tgacaggctgaggctggaggattgcttgagctgaggggttcgagaccagcctgggcaacatagccagaccttgtcttgtggaaaaaaaaaattaatgagtgaatggattttagaaaataaaataaaaacaaataaaggaggcctggcaagggttaagtcacacagctggcagaggtggggcctggatctagactcaggctgcctggtcctatataattctgctgagctgccgccctgttacctgaacatcaggtaacagcaaagcacacactgccccacaactcaacacatgtttttccatgtagagttcttggggaggaactttggggacagggttaaattgccttaagaataagtaaaaataaaactatttttatgcttcaaatgtcactggaagtttgacaattgaattttaagaaacaaaatgaatttaagtggactctgatattaattatttgttacaggaatcgaaaaaagtttggagttcttaattctccttttattggtacttatgctagaacactattcactattgctgatcgagagacaaaaaacctaggtggcaattaggcctattaaaagcagatgtttgcagtttttgtctgcattttttttgggtgaagagcagccagactagcaaaaattttgttagtttcctaagccagtaaatttgctggcagtgtcttttggatggttttgctgacacactgaaagatcaggatggcttgttatcacagacctttcccttgagggtgggcacccctttggcctggcattcaggtttgagcactaagactggggtctctggcagtttgatttagagatgggaaccagcccgcccagcactttatccatctgccagtcatgatttgcatatttggcactcccagttcttcggaaattaaatgtcacacatcatccagaaaaggttgggacctttgttaggcctttcagggaggtgttctgatgtccttcatggccaccaatctgtaacatttttgagactagtagctgactattcaataaaaagg

SEQ ID NO: 6918 - DNA, 1035 bp, Homo sapiens
tctctcaagactgtgaaggaaccagcctcaggatcagccgatatgctggcagaataaaaaagatgggaagaatggcagagtaaagggatggaaagaacctgtgtccttaatggtattgggaatcactattaagccatgttggaaccgtcctacctccagacttgttctgaggtatgagtcagttgactcaaatttgtcatccgcagcaaaaaaagccaccttgacacatgcatatacacaataaaaaactcaagtcaaaacaaaactatgccatatatactattgtgcagctgttttcatttaaggtctcatggctgctgtttaatcatttctctattggtggacctttaggatatactagttattttgctattataaagactccagaaaatatctttcttttttaaaaactccatggactaggaacagaacgcattttatatattttgggatacttgtatgttttatagaataaatttatggaaatgaaattgctggatcagacattatgtatatttaaatttgataccactctgttgcttctgaaaagatcacaccaggttttttaaaaaaaattgttttaaagcaacagtaggagctagtgcccatttcctcacatattgaccagtgcggtctgtgtttagtattcacgtttgcctaggtataggtgaaaactcattttctgttttaaattgcatttctttgagtattaaagttgtcatctcttcattgagtataggttcagaaattgtagtctcatgtttattagctatttgtatatttttttcatgtggattttctctgtatcctttaccatttttttccgtattggatttaggactctttatgcattattggtttttatgttgcaggtatattctcctaggtagcactttgctttcttacctttgcttatactgtcatttggtacacaggcttaaaattttttaaagttatgcttagaaagtcatgctccaacctacatttatagaagcattattctgagttttcttctagctctattatcattagaaa

SEQ ID NO: 6919 - DNA, 1051 bp, Homo sapiens
ctacagcctgcagctggctgtgggttccccactccctgccctagaatctaggtttattgtattaatgcacataagtgagtgcaacaagaggtgtagtgaggctgggtatttttattggttataaagtggtcctggccttttataaaataaataggtcaactaatattctttttttttttttttaacaaaaaccggtttcaagtggttcttcaaaatatcaatgaatagtgggatctaaatttatccactagattgaatgcttgcctttaggctgaaatctaaaatcataatctttaatattataaatcagagacattttgggaaattgtagcccaagctttaagaataaagcactctagttctattttatctcatacgttttgtgtgtttttagtaagaggggcataaaatgtgcttgaaagtacaattaaagatagtatttatgtattaaaaggaataaaaaacgttgactgtggattcatagggaaacatcccatgatattaatctcatggatttttttcactttgatagtaaatactgttatgtatggatataatatgtggactttaaaaataagagatgaattttcctcacacacaacctagcagaaggtttttgtgtttgtttaagccatttggtaaagctattttgattcatgtccttcacttgtatttttagtggcagcaatccaacttaatatagcaccaaaaaaaaaaaaaagagtacttttacttcccattcagaaataactgctggcagcacacctgcattttccttgagttttaactgcacttagatttttaagagggtatcaatatcatgattgtcaatatcatctttcttcagtcaagtgtttttgtgtctactttgggataatcaaaattgggaaaaaccaaaaggtttatttctagtgttggctacgattttgtagggtcacattacacttgatgatttgatttccaattctgtaatttttatggaaaattggtaccctggggtgaagagtattagaaaatgtaaagtgtatatagctttgctatttaaagtttg

SEQ ID NO: 6920 - DNA, 1048 bp, Homo sapiens
gtgataaaatacacgtttaaactctacagaaattagttcgaaagagatctttgaaaaatcattttaagaaggcaaagttccaaacagggttacacaggagtctactcagtttcctggccatacaggattaacgctgtgccttacgttagagcaacaaacttgactgtccgtgtatatataggtgagggacaaagggtttctgcagccaagcactgcactccattccgctgcctgggcgggccttgagcaggaaggtccctcttgcaccacctcctccacttcagttcagctctctcatgtcttccaccaagaggacatggtctttttccacacagatcacatgggatggtgaatcttcttactcatgaaaaacagcccaaggtactgctaatttgggacgttttatttattggaaaggttctttcaagggaacttttctgcaagaccaagcaatgtatgtatttttctttggtaaattacaatttacattggcacaaaaaacacatggtgactaatgtactttgctctaggacaattaaagaaaatgtattttatcctcacaaatccagtgaagccttcattttatttctaaaagtttaaggaaggtctagtctaccagttataaaaatgaaaaccagttcaactctaatataaacattatttacatttgtttataaaaatagatttgagtttaggaaaagttgaacaactagttatttttacttcagttattaggtacaatgaattccttgatttttcaaggctgaccctgtttccttggttaacaatttcaatttaggccttataggaaaaaacgtaagggatcctttatctgcctccaactaggtaagttatttgataccactgacagcttaaaaagtaatgtcctaacctttctgaagattctggttgccataaccatgctactacagtctgttgttagtttgctctattaaaactaattggtctggagaaaacctacctgcagttgtacgaggctgttactggagtagcagatgttagctgatctaacatacttggaaccaac

SEQ ID NO: 6921 - DNA, 1027 bp, Homo sapiens
catttgtagttgatgctaatcagaaaaaaagtttctcggaccaggttgacctcaagtttttctaaaggatgaaagataccactgagtttttttttttttcattcttttaattgttgggaatgaactaagaaatacaaataagtccaagtgagggtcactgacctgaaaagaggggtgggagctggaaatatatcagagaagtggaatgattcaagtagacacaaggccttgtgcagcaagggatattttatttttagttacaaagaaactaccaaaaggagtattttgaatggtggagtattttagttaaactgatgtgtgtaaataatgagagctcaagaagctcaagccctagtctcagcagaggtcaagaagcttggagcccggagcttggaataaggctgcctgttggcaggtctccaagggcagggaccgaagtgtgcctgtgtgctgtgagtgagtccagccctctgatggattccatgcctccagcaaggaggtaagagggaatgaggcaggagcagggaagattaggaggaggaatatgaaagctacaagctagggaacataaaagtttcgtaaggaataatagtaacgtggacttttgaggtgatatacagggaagatgcttttattttacaacttggtagtagaacagaagctaaattatttggagtcgttaatacccacagtgaacatcaagttgggcaaagggatgggagatcttcccttggttagaaagtgaccttctcagcaatttggtattctgtaatgataagtctgtgatagtgcatgattttagggaatggcaattaatggttgacctacttgggaatacaaataccacgtgttcatttgtacaataagtgctttgtaggtgagattcctgacacaccccttcttgtcaacagagttatctttagtctcttgttatcactatagaaataaaaatatatgtatttgggtagtcgagtaacagttgaattatttcttaccaagaaaaaaagataaaaaataatatgtaagg

SEQ ID NO: 6922 - DNA, 1023 bp, Homo sapiens
tttgcagttaactggaagaaaaatggaagagtaatcttccctctttaaaaataaaatagaaatctttgcatatgacttatatagcaactaactcttcagagaatcccaaaattcatagtatagttataggcacaaataactttaaaaaaaaaactgaattgtttttgagacagcatctcactgtcacccaggctctggagtgcgctggcatgatcatggctcactgtagacttggcctcctgggctcaagtgatcctcccacctcagtctcccaagtagctgggactataggtgcaagccgccatgcctggctaatttttaaattttctgtagagatggggtctcactgtgttgctcaagctggtcttgatctcccgggctcaagcggtcctcctgccctagcctctcaaagtgctaggatcacaggcatgagccaccacatgtggcagcacaaatttttttggtttacctttatttatacttttaattttttttttgatgtggagtctcgctctgtcacccaggctggagtgtggtggcacaatctcggctcactgcaacctccacctcctgggttcaagcgattctcatgcctcaacctcccaaatagctgggtgtacaggtgtgtgccatgacttgtggctaacttttgatttaaatttttttttttttttttgaggtggaatcttgctctgtcgcccagactggaatgcagtggtgcagtctcagctcactgcaacctctgcctttcaggttcaagcagttctcctgcctcaccctcctgagtagctgggattacaggtgtacaccaccacactcggctaatttgtgtatttttagtaaagacggggtttcgccatgttggcctggttggtcttgaactcctgacctcaagtgatccacccacttcagcctcccaaagtgctgggattacaggtgtgagccaccgcatctggcctatcttgatttatttataatgactatctacagaaacaactcatagtctgtggggttttcttagtg

SEQ ID NO: 6923 - DNA, 1043 bp, Homo sapiens
atggaaacgcatagatcttttaaaaaattatattttttgagacaggatctcactctgtcactcaggctggagtgcagtggcgcacgcatggctcactgcagcctccacctcctgggttcaagcaatcctcccacctcatcctcccaagtagctgggacttcaggcatgcaccaccatgcccagctaatttttctgtttttttagagatggtgtcttgccatgttgctcaggttggtcttgaacccctgagctcaagagatccacccacctcagccttccaaagtgctgggattacaggcatgagccactgtgctgaaatgcatagatcttcagtgtgcagtagggtgagttttcacgattgtatgcacttgtgtcgtcactgcctaaaacaagaaattgaacatttctgagttcatttctatgttctgtgttcatttctgtttcatgagagagctcaggtagctccctcatgcttctttctagttaactcctcctaccacaaaaccactcttctgatttccttcaatatggaatagttcgcctattttaaaaattcatctaagtagcatgaacagtatgtattcttttatacctggtttcttttactcagtatttttgagattcgtctaatgagagccaatacttctgcttagttgtaactgtcttgctatactttctttgcttcttaattatttttcttaagaattttaaactatagacatcatgacatttgttccctaaatatttagtatgcatttctaaaaaggacatgtaaacattttttttaatttaaaaatttttttgagacaggtctctctctgttgcccagggtggagtgcagtggtacgatcacagatcactgcagccttgaccttctaggctcaagtgatcctcccaccctagcctcctgagtagctgggaccacaggtgtgcactaccaggcctggctaattttttcttttttctagagatggaggtctcactatgttgcccaggttggtcttgaactcctggtctcgagctatccttccaccttggtctcc

SEQ ID NO: 6924 - DNA, 1075 bp, Homo sapiens
gatagtggtcctagaaaagataccaatatgcatctacctaggaaatttgcagcatgagttaaattaagtccagccttgttggggaagtgggggtgagggtccaattaggaagaggcaagttgaggcagggcgcagttctaaaggagaccactgggccatcaggccatgagcttggagtcattgggcagctctaatgaattcttcagcctgcacacctggccttgatcctgagcgcctcccacctggcacccacatctcctatgtgggcagtgactttctgctctggaatttcctttggaagcctcattgggaaagtcatcccaactcatacttttttctggggtttcattgttgcctaaccttagattataccagctgggattgccttgaaatgtttccttcaaaaccatgttgttctcctatataaacactgacttggtagtatcattactgggtcgtccactatttagtgagttgctttctcctatttgggagcacattgcctggtctgtatgcagtgcttaaagggacagaaaacaggaaggtaagctggtagccttcatgtttggatttggagaaacaaggacttctttgaccttgaccataacattggactttagtaagtggtgcttcaattcttgttctttaagcactaaatgcatgagacaaaagtctaaggcataattctcaatcatcagcatcagtaccatttgagatattgttaaaaatgtacatttccgggccaggtgcggtggctcacacctgtaatcccagcactttgggaggccgaggtggcggatcatgaggtcaggagatagagaccatcctggctaacacggtgaaaccccatctctactaaaaaagtacaaaaacttagccgggcgtggtggcgggcgcctgtagtcccagctatttgggaggctgaggcaggagaatggcgtgaacccaggaggcagagcttgcagtgagccgagatcgcaccactgcactccagcctgggtgacagagtgagactccgtctcaaaaaaaaaacaaaatgtacatttccagaccagctgtataagcatgtttgagg

SEQ ID NO: 6925 - DNA, 1047 bp, Homo sapiens
tatgtaaagcgcttagtattgtgactttcaataaacagtagttatctacatgattattgattatcagagctgaagtttcctgagtattctggcttgtgccatcatccattcatcagttcatattgcatgggggatgcaaagataaataagatgcagcttgtgtcctggggagtgcccaggtagtgacagatggtgtatttaagttgatgattcctgggataattggagaactatggtcacaggtgaccatcttgaataggacaggctcttctcatgatgccaagtccttaattctcccacgagtctgattattatttacctttagcaagcctgctattttagtttcttttttccctaaatacccgagacacatcctactaatggctgaatcaagaaataactgaacgctgtttcctggggactgtctgttgaacatgttgctcagagccgttgaagaatagggcctgtcaacgagacattagctgggggcagacactctaaatgaatcactgtcaacttgcacaacaacctaccaggtgggggattgtcccagttttacacataagggcactgaggatcaggcaggcttggtaacttgtctaaggacaccagctctgacaggaatagctgtaggtaccagctggaggaattcctgctgtcttgggactttcaatgatcaaatacaacaaaacatttacagtccatgtttatttaagtaaataacaaattttcttctctagtttgttggaaacggtggtgagttgagtagttgcctccaaacagatacgtttaagtcccagcccctggaacgtgtgagtgtgaaccttatttggaaaaagtgtcttggttgataataatatgacatcgtagactagaaatttgctaagagagtagatttcaggtgctgtcatcacaaaaaaataaagtaaccatgtgatgagatggatatggtaacttgtttgactgtcgtaatcctttcgctatgtgtatttttatttgaaagaatgaacactgttttacatgccaaaaaagaaaaaggaaaagtaa

SEQ ID NO: 6926 - DNA, 1032 bp, Homo sapiens
aagtattgttcctgggtttatctgtgagggtgttgcccaaggagattcacatttgagtcagtggactgggagaggcagacccaccctcaatctgggtgggcaccatctaatcagctgccagcgcggctagaataaagcaggcagatgaacgtggaaggatttgacttgttgagtcttccagcctttatctttctcctgtgctagatgcttcctgcccttgaacattggactccaaattcttcagcttttggaatcttggacttaaccaatggtttgccaggggctctcgggcctacagccacagactgaaggctgcactgtgggcttccctatttttgaggttttgggacttggacggctttcttgctcctcagcttgcagatggccttttgtgggacatcaccttgggttcgtgtgagtcaatactccttagtaaaatccctttcatatatacgtctatcctattagtcctgtccctctagagaaccctgactcacacaaactccttcttgagaatggaaaatggacctgcattctatacctcccctgtcccccaacctgctatagagccttcctgttcagttctctcacacagtggcaccagaagtcctcatctcttctctgtggcaccagccttgaaaacctagggatctgcatcactcagaatcactcatcaattcctttaataactcgctggggaattctaacctggagattttcccaaagcatgcttgaaccagtttgcattttctctcctacccatttgagaagagcacattctctctcctccagcatgtactcttcaaaccagtcagtcccaagtcctcacagtccttgccctggtctgtggctcctgctccttcccccaacgcagtgccctcctggctcttccctatagcctaccctgcctggcacagtagatgttgagaaaatgcatccacatcctgcctacccatctgtcaggtctggattcatgtttccaaacttcctagaaacctttgattatcaagatccacatttgcttctccatat

SEQ ID NO: 6927 - DNA, 1046 bp, Homo sapiens
tttcagggggtcctgtaagcaaaccaggtcctagaacaggaaggaaaagtgctttctggaaaatataattggccacatttgaacaaatggtaacccatttttcctgctctgctgtttcctgcctagattcctttgtgggtggagtcatcggcctcatttttgcatacatttgctacagacagcactatcctcctctggccaacacagcttgccataaaccctacgttagtctgcgagtcccagcctcactgaagaaagaggagaggcccacagctgacagcgcacccagcttgcctctggaggggatcaccgaaggcccggtatgaccagtgtcctgggaggatggacactaagccctgggcacatctgccaccctgacatcataacacaatagaaatggttttctgtagtgtatttttcatcagttgtttctcaaagtcatcgtacttctgcttctgtttcactgatggtgttcctgctactttaaatgtctacttccaacatccttgaatttgcaagtgaaggacaacaatctctgagagacgtgtggaagaggctgtgaaggtggggtttggggagcttggccgattcgtctatctgaaatgtttgctgtaacagccaccttcctatgttttcatggttgtaaaacataataaaacctcccacgtggaagacttggtgttggccacccagcgcaacaagtcatttggagatgcagcaggtttctcagagacccaaagccagctctgtctgtaggtcattccaggtgctgagcttggaagcaaaggctcagaacctttctgagccatcagcttctcatagcccacgtctctaaaatagatttgaaacttggagtgacagcttgagcatttccagggcttttgaatcattgaatctggaagcaaataaaattaataacttcatgcacagacttccaccaaacacaatgagcatgaagatgcatgagtgcatgtgtgggggatgaggtcacagcagttgcctgagggttcatgggcacaatatccttcccatcttccagtctaagt

SEQ ID NO: 6928 - DNA, 1031 bp, Homo sapiens
aaaatgagcgctggaaatcataggcaaatctttcttatgctgtgccttggagcaggagctacgaatgagtggaatccatccaccttccagacgccttagctatctgcaatgcccccctcaggagacaaagcccacgcagtccctctctttggacgtccactcatttgcctgcagctccatcaaattcagctccccagattacatttcaaatgatggagcatttcagagtgctctctgcaaactgaaccaggctttgtaaatgtgagagaagattgtggttgacatccatcattcagggggtgcattaccaatttccaagattctctgtgtttcagttgaatgttgtgctgctgtgctgcaccctggcctctgaccacagacatcatggcccgtgggaagttctgatgggaaatatttcacccagaaatgtcggggcctctgcagcctttatcttggagaaaagtgcaaagagggcagcagctcacttgtagtttgtgtttatagtttaggacatctgtgatctctcagcattgattccttttactttaaatcctgtcctatgcctaatgagtcattttcaagcagaaatctgcacagtgtgtgatatggttgcccactgtataataaccatgggttagagtctaggaatcattgtagctttaaggtctttgttaagaatgcaaaaacggaaatgaaaattaactccatagtagggcagctggtctcagcaaattcagttgttaaaaagaaagaagtggattcataatggattcctcagtcagccgggaatttaacaattacttctggaatgtttaagattgagaatttctgcagattttcaaaggaagttctgatagttatatcatgggctccactttatacatcactctgagttcaccctgggtaagtaagcatggtgtctacagttctgtgtatgagatggtccagatacgatcttctgccccaccagtttttgacaggactccctggagcagctagaatctgtgagaataaactgagcatcaccagac

SEQ ID NO: 6929 - DNA, 1048 bp, Homo sapiens
tttatcacccactcttagtaattatttatacttttcctttcacactatatacatgtttgtgtttatgtgtgtgtagacatgtatgtatatactcatgcatattctttctatttttggcaagttaatcccaatattctgtagtggtttataggaaggaaatttgtatacctttttaatgaacagtcttgatttcattgtactgtttagatttagcttttgttagaatgatttttattggagtcatctttttagtttgagacttgctaacctaagtacgaatggtatatgtgaaaataatgccattgaagtcttaactattgacagtgatggtgtatatattatacacgtgatttatgaatatatatatttgtatttgttttatatttacttataaaacattttgtaattacactgacacattaaggtttcttattagaaattatgaataagttatttaaatctgtttttcatgaataccaattttgtatgtactttacagagtacatcagattgaaaagtaaccctttcaaaaggcagtaaaatgagaaaaatgtggtacagtagttcactctgcagaaactgttctctaatgcaagttctcttgctttgttctgaagcctgtgtagtgctttaataccaggaacattgactgaaacagtgtttcttagaagacataggtccctgcattctggatagcaggactcgggagtaatctatcctttgaggtgttagttgatgcaatttaagtcctatagccaggtacagagtcattgtgtccttaataactacagccactaaagtactacattaactacattatacttttagacctgaagagcatttctactgaaaattttctttagctttttaagatcagcatacactgtagttaatatatttgttatttttattacaaatcagggcaaagtgcaattgctggggaagaacatcccagaggttcaattctgcgggaagtgcacctcaagttcctgctgacgggactgctttcaggactgcccgcaccacagtttgctattcgtatgtgtcc

SEQ ID NO: 6930 - DNA, 1174 bp, Homo sapiens
tgtcttatattgaattggaatgctgagtcttcatccacctgagactggacagtcgagtctctgacgctgtccattcatctcggaaataccaggaggctcatccctgcagtgctgaatcccaggctccttgtctgtaattggaccaccccagtctttatgtcatgtcagttttcgttgggtctttattgactaaaaatatagtcagggttaatagcttaataatagcagggttcttcttttgccaagagttatatattaaatattatttaaagtggctatggtccctataaattaagatttgccttttggtgtgaaattgtgtatttgtatgttataggtagaaaaatttatctgggttccaacttgctgtcacattgatttcatagtaatgtgatgaacctaattttctttacagcatagagaaaaaaacaaaatttagtttgctattaagtacacattattaaaatacatttctccaaaacttctgaaaaacagtgtatttgtttgaaactcaacatttcttcttaagatgctatcggctggcttctggctttctcccccagtctattaacatgtgatttgtggtgaaaacctcaccatatttattctgtggccaacatggctgacttctcagtgttaaagactcatttgggtattactgtttggtagtacccttctgtttttttctgtgcctatcttttgaaagcgatttgatttttatgattcaattgtctatatatgtgtcccgatttatataatgcagataaatgtttaatttttgctttagaaactgttgattaatatttcaccactaatagattttaattaggattcatcagtgtgcttcatatgtgcatgtatgtattatgtcagtgttcctgatttgtcagttaggattttgtcaatttcttggggaaaactacttcttgggatagctatgtaataagagctatggcaaggtctgagctttccattgtagaataagctgtattggtatgtagtgaatatcatttactgaatttagtataacaaagtaaaaatataagtacctaaaagtttgtctagaggtgtcactaagaaagataaataagagttcagctatggaattaattctccttgtggtgcccctagtgcattagatcataggttcagcattgttaaaactttcagattg

SEQ ID NO: 6931 - DNA, 1043 bp, Homo sapiens
acagagtaatctgtgaaggagctagatggaattcactctgggcctttgaagcctcagaacctgaactcttcacttatacttacagtgcatgtgctgcatctcctgctaaaatacgcacataggttagtaggaatcatgttggcagtaaaattaaaatgttggctgagccaagatttgtgctaagaatttcacacatgcttctgaaaaatcaaacatgttgtcttttcaaacacagaaagttttaatagctaattaatcagagaggtattaattttaagtaaggtttattatcctggattagtcaggttatagatgtcactaaatacttgacttatacatgttaagataatatttatggttgagtaacattgaaattgattataagtgttacttgggatactaactctgagggatatactacttatcagataaatgtgaatgatcatacaaagatactccatttttatatgaatttttcctcttcattgccattttgaaaataatttgtattttatattcagagatactgcccaagagaacactaaaatcctgctttgtgtttcagttaatgcaattttagtattataatcaaaagccattaagaaaatttcacagaaatacaaaaattagctgggcgtggtagcatacacctgtaggctcagccatttgggagcctgaggtgggaggatctcttgaacctgggaggcagaggttgcagtaagttgagattgtgtcactgcactccagcttgggtgacagtgagaccctgtctcaaaaaacacaaaacaaaacaaaacaaaactttcacgatgtattataaaaatgtctgaatttattagcagtaaactcaaaacattttagattttcatgtccaaataaggttaacttttagaaagttgtttttctaccttttattaagtgtgtttttaaaaaatcataatctaaagcacttgaaggttgtatatactgtgccggggactcatgacagcagatagcacaaagtgtgtgtgtttttaaaaccatgatgttttaacttgtgatgc

SEQ ID NO: 6932 - DNA, 1073 bp, Homo sapiens
taacttcaaactatttgggtgttttgccaggtatctttctgtaaatttctactttctgttggggtcacacatggtcctgagtggaagaatctcagtcctttgatacagggagtacagggatcttcctactctgtcacatttcctctatgtcagccatcatttgctgataatattttagttcctcataatgcttattgagtaatcagtgctcaaattatatttgttgaattgcactcgttgatgtcattcagtacttctttcaggcttaacagaaagtgaataaagtggcatttgttgaataccaactgtagtagaatgatagaaactttacatactttttcattgaatgtttaccataatctgtatatcaattaattgaggtacatgatgagattctcctgtcatgtgtgagaagttgagcctcaggagggttaacataagttgtggcatcagggtttgaatctatgccactctttcttccaagttggactccttgcctaattgtgtgagactgtatgttctcttacaggtcacttagagctttaccttcttatgactgttaatcatggtgctaaatggtagtttaaattgtctatatttagaatgcgtcagctgagtttttcaatttactgaactttttatttgctctaattcatggtgaaatttttgcaaaaaggggcttatttagtaattttgtttattttaggcagtatttggcagtcgtattcagagataaacccctggagctatgggatgttaggacttgtacccttcttagagagatgtccaaaaacttccctacaataactgctttggtaagttacaatttaagaatttaatagcttatttaggtatatatgtatgtggtgaatgttttgcttaagcttgaatcaaaatcattactgccaatgtcatttttttggttaaaaatgtgtgttcagagaagatgatctaaataaatggagataattcttattttcttggataaatcaacctaatatcatattagtgcaattccaattcaagtttcatttggatattttgaggaatatggtaaacatattcaaaaatgt

SEQ ID NO: 6933 - DNA, 1035 bp, Homo sapiens
atcgtgtgcacataagagatgggggaggagacgaggaataggcaatactatcattgaattcattattttcattttgtaagtattttataaaaacatcaaaaggtcagaccttttggaagtttgccataaaagctccaattaaaatgcattcatttagcctttctctaagtaggtaaaatctaaagaacaaatgtggattcatgtgtagtaataataaatgatactgggcagtggtgtgtgtgcccagctcttctggacgattctttgacagaaggaaacctagcacttctaggtttgtctgcatttgctttacaggagtggtcaccatctcacaacttgaagagcctgagaaagaagcaacttgcaactcgagaggccatggcccgccagaccgtagtctcagacacagagctgagtattgttgaatcatctgtgatcaggtacagtacagtgtttcttgacactgtcatttgtgccattagcatcatgtctgggaagttgacaagtatcatcggaaggtgtctatggtagcaagttggactctgcttttgaacatacttagtttcatctttcagtacatacccagattactaaaaagataattttatcatttttagtattgtactatactgtttgttataactaataacatatgcagtaatattcacccatcagcatctagtagtaaatgtgctcattccgagtgcccttctactccatacacttcagcttctgaaattcaaatgaacatagcatagacatacagatagatcatattatcatttatacacaccaaagaaaatgtgttgggaatcctaaatttgtgtatcatccccatccataccaatcttacagataaaaggcttcagagataatgttgggtcactgtacagcctcccttctgttgagcacagttctatagccaaaatctctatgaattttatttttcttgtgttaagtttagatcaccatttctctctgtgcagggtaaacttcctctgatgttgtggctgttaaggagtgattcatgtttac

SEQ ID NO: 6934 - DNA, 1031 bp, Homo sapiens
ccatttatcagtttaaaaggcagcttttggctgatgcaatacagtgttcatccttggaagatacttgatcctacttggagtggaggagggaacttcttgcctgagtattctcccagcaaaactttggtgcacactctaggctgatatgtagaaaatttcatgagacttttctgaacctttgtagagtcaatatttggcacttcagacacagtaaggttttaaaaacctggtttttcactttgtgttcatgcttgaggcactactgagttgctgctaatgttagcagggctgcctttaacttagttaggtatgctttggtttttgtcactgcccacccctgcccactgcatttgggcaccaccacttcttactatgtaactgactgccatcaggtgaagccagaattcaagacctacattcccatgtctgtccttgtgtcgtttgccagctctggggaagcaccaggatggcctcctaggaaagggcaagcattggtattcattttaaacctaaaggtattgaggacattgaaggaacttcaagggtggtttttgaaaaaattggttactaattctagataaagaagtgtggaactgctatctaaatgtttgaagagcttttccttcacttttaatataaaatttgaatctaaaaagctccaaagtcaaggtgtagcttgttcttaaattaaactgactacagaaatggagtccattgtattaacccatgttcaataccatacttgaacatctggcctgtggccagattttagatcacatgtttcttttaaaatttttctgatttttttttatattcttttcaatctctaatgttacagcctcagccagaaagagaaaactaaatagcaattgggaaaggtcatgcaattgtgtattcattccacaaattgaacttcaaattcagaacaacccttaataaatgttaaagaatgaaaactatggtagtgtaaatgtggagtgaggaaaaagacatctgtgtgttcacctccagattcatggccgatttggtct

SEQ ID NO: 6935 - DNA, 1042 bp, Homo sapiens
accaaagaaaccctcactccatagtaatagtcacagtaaggaaacgggaagtgggcaagaagcaaaagctcaggtggacagaagaatgccagctgacaaatgcggaaagaataagattagaaaatcaccactttgcagccccgatacaataattaattgtatacacaagcaaggatcacttgtggatgtcaaatcactgagtaaaaggatgtttgagaataggaaattcaatctgacaatatttcctccacatattacttactaattaattatacagtggagaaggtgccctgataagagctctggtgaataccccttatctagatgatcagatttagtgtttcctgtaaccagacagctaacatgttccttctgatgcaatgcagtgaaaagtacacagcatcctttgttcagactctgtcaaaaatgtttaacccgaatctgataatcagaaaacagacaagttagaacgtagggcattctccacagcagctgaccaggactcttcaaaaatgaaaaggtcacataaggccaaaaccaaaaaggaagaggaccattctagattggaatagactaaagagacatgacaatgcagtgtaccagccttgactggacccgatttttaaaaataatacagctgccaggacatttggggaataacaagggacttttgaatttggactgcattttaagtgattttactgaatcaatattaaaattcttgggtgtaaaaaaaaagtattattaaaaatatttccaatcactttctggcttttaaattgaaaaatccacataaaatattttgtgtataatttaatttttatttaactacatagaataaagttttctaaagcagagttttccaatagaaacataatgtgagccacataggtaagcttaaattctagtatccacattttaaaaagtaaaaagagatgaaattgattttaattaaaattttatttaagccaatatatccaaagttttatttcaacatataatcagtattaaaagttactagtgagacattttacttttttaa

SEQ ID NO: 6936 - DNA, 1019 bp, Homo sapiens
taattcgtatttcagagcaatatatctgtatgtatatatttcataatattttccccttgtatgtacctccttccctgtagacagtttaggctttctttcaaaataataccaataaacctcatgagaaaaaacatatggttaaccagcttgtaatttagacttccataatgcccagtggagcccagctatttgttttgttttgtttttgtgtctgaattgactggtacaaagctaaaataggcaattactcgagcacctagatacaccagcctctggctttatgtttgtctcaaaaaagtagtgtagcacctctgtttaatgtttgtatttgtaaacaaaatattcaattgcattttttgaaaatgagtgttttcctttagttttctaccttatgaattttaaaaagttatgttggaggaaaatgttctcataattagaaaaaccgtttctcttactagacagacagagctgtgcagttgctgttggaaacaagtgcagataaccagcattattactgtgattcactgaaagcctgtttagtcactactgtcacctcgtcaggcccctctcagagcaccattaagttggtggcaacgaatatgattgccaatggcaaattggcaggtaaggcacacttgatatgtttgtcatctctctgaaaaatgagaccttgttcccagcaaagtatctgattagtagggacatttctttctcttttacatatgctgaagaaaaatagaaaaattattgctacctataaatcagatgaatataattgtctaaaccagaattaattgtttacacttttcagagtgaaagggggcactgttaataattgctgagataataggcataaatccaacaatcctaggcaaatcagaacaataaaacctgtgagagaactatgctctccctacttattctccagactgtattgtgcttcctaccctggttacttgagtaataacagtaaaactcttaatattatgtttcagaatttaaatcaagaatgtcttcag

SEQ ID NO: 6937 - DNA, 1075 bp, Homo sapiens
tacagaaactcatcactgctatatatgcagattatgcccggagtttgaagaacctcggttttaagcagggagcagttctctttgcttcaaaagccggagcagctggcaaagacttattgaatgagcttgagtcccccaaggaagaacccattgaagagtgacagcttaataaatgccagggaatctgacctggaaggcagatgggagggggctggtctggctgtggccaccgtcacagtccaggatgaagaggagtacagggtcctgtgagctgtttgaccactgttctaagactatgtgtgcccaaaagcacataagcatctatgttgagagtaagtttgtatcctgcgttggtctcagaaagaacgtgaatgcttaagattttgaaagtacataatattttatactttgggagagagctttaagagtccctggaaatactttttaatttttttaacttaaaattcaagagactgaatcacttttctcattgattaaatgtaaagattattgagaaacctatagtaaatgaaatttgtgagatgttttctcaaatatatgctgtgcctgtacttatatacagtctttcaagagagatacaaacaaggcagaaacatttaaactagtattaaaggtagtttaccaaagcattttttgttttcttaccttgaaaacacagaaccgttaattccttggtttaagcagttgctaagttttgtaattttaggctcagaggaccataggaggttttaagatttatgtttagtccgataggtgaggtctttgatattttgaattttaactccttttatgatacatcacagtaacctcatttttgaagtctttctttgtactttaatgttctctctgttctaatagttgaagtatgagatgtaactattataaactgttgctgaaaacataaatgtctgtaacttacaaacatgataaataaattaaaaattccatccaggcctttgtgttctctgcattgctgtgcatgaggccaggtcatgaggtggctccttaggagtcatctggtcgcccagcctctaaagcctggctgctcctgctg

SEQ ID NO: 6938 - DNA, 1047 bp, Homo sapiens
atgtaccatcataaccatttttaagtgtacagtttggtggtaagtatattcatattattgtgaaacatctccagaacttactcatcttgccaatctgaacgactgtatccattaaacaacaatttcccttcttcccttctctccccagaccctggtaacactattagactttctatttctacatatattttttcctcttatttcttttaacagtctttcaagtaatgcatttatctccattttacaggttcagaaactgaagctcaaagaggttaatgaacttgcctagggcttataaatggcgagtaagtggcagagctggattcaggctcagatctatgtccagagtctgtgctctttgtactatacttgctgcccctgcccacctaagcccctggaccctccatgtgatttctgtgcccagtgttctggtgagtcagcgcacctgtggatttggtgcactggctttgggcatcctcagctgagatcttgatcccagaggggctggtccgttcagctggctttgtgctgttttgatcaggaggacagctacactttcactcacctgactgtatagcttctcccagcatctggctgagtttatttgtcatcttttgagaagaacatcaggctgggtatcgtggctcactcctgtaatcccagcatgttgggaggccaagacgggtggatcaccaaaggtcaggagttcaagaccagcctggccaacatggcaaaaccctgttcctactgaaaatataaatgttagctggactgggtgtggtggtatgcacccgtcatctcagctactcgggaggctgacgcaggagaattgcttaaacccgggaggcagaggttgcagtgagtcaagatcgcgctgctgtactctggcctgggcaacagagtgagactccttctcaaaagaaaaaaaaaaaaaagaaaaagaaaaaaaggaagaacattggctgccggctccctgccttgtcctcccggagtaatttcctctcctttgagcttgccgtaaaattcggtccttgggctcattaatcc

SEQ ID NO: 6939 - DNA, 1070 bp, Homo sapiens
aaaggggtgactcatggccctttgcagaagcacttgttgatagtacaggcttccctccctgacattccagtggcaaatcaaccctttgctggcctgactaaatttatagtgggctggccccagcagctggtggcagcagctggtggttgaaatctgacagattttttttttcctctgaaaaatatttcagtcactctagtcccagaaccaccaccagcagaacttagaagccatttatagcctcttacagttgttctgagaagagctgttttagaaaaatccccccatttccccagaaattagctctctcccatccttagccacctggaaaatattcagatcgttacaaagtcagaaagggcccggagctgacagcacaaagtcaatttgacagtttatttctttgtagcagtttcatatggttgagcctaatatatatgcgtctatacacatatgtgtttatttttaaattataagataatgatttggtacggaaggtttgtagatctttattcagagcctgttgactcctgatttatgcacgttctgacactctcagccatgtttcttagcctgtagcctgttagaagcagagaactgcaaggcagaaggtggcagggggaggcaggtgagtgggtaagtagaagtgacagctgacggcctgagagcgagggacaaggctgagtcagagttctcggtgatcaagtagtctggcgctttcacttttacagacagaaaggctaaagctcagagaagtcccctggcttagatcccatggtgggcctggactggaatccagtcccctcaacttcacatacggtggttacatttggtgccacagcactaatgtcactcacttatgtcatagttgccgaggacggctgagtgtcattgagcaagtatttaattatgttcaagatcctctgtctcaaaaaagtcagggaagtgtttatgatttgaaaaataattccattccaaagagtttaggtgaaaatgccatcacgtagaatatgtgggcagatatcttttattccagatcttctttgctgggacctcattttccagtggtg

SEQ ID NO: 6940 - DNA, 1064 bp, Homo sapiens
caggaatttgggaccagtctggccaacatggtgaaacctcgtctctactaaaattacaaaaaatcagccatggggttgtgcgcctgtagtcccagctactcggaggctgaggtgggaggatcacctgagccttaaagtttgaggctgcagtgagtggtgatcaggccactgcactccaggctgggcagagtgagaccctgtctcaacaaaacaaaacacaggataaacccctactgtttttaaagcaatttacattacaattccaagtgaaaccagaagcatgacttttaagtagcaggaacattgagataatggaaaacttggagcctttgagaaaacaaagcacaaagctgctcttgaacaccttgccatgaaagtaacaaaacgctgaagcatgtttataagtcagggctgaaaatcatgatgaagaggaaaagccaggtgactgctgtcagtttcaataccttatcctgtttcttttatcatgaaattgagtagttcgtcagcaagaaggtcaggtctgagcatctatttaaactcttaaccttgagactgtgatgcttatgtgatgtgggaaattgtatctgctcattagagctctgatatgtaattgaaatctgagattacttatctgccttgtcgtatttaaaccactgattatggctctgacatttttgttactcttcaatcaaccagtatataaaggattcagaatctcttggaattaagaaaaagctattatcttcctggtatcaattatagcgcaagtaaaaagcaatgccttttttagccaaaactttgcaaaagtacatgctgggatctcagatctttccttgatgcccttcactttaacccctacttttatgtgtgacacaaacccggccacttctcaccttggaggcgagcaagctccatacccttcttccactcctgctcctgctgctgttgttacagctgtcagaatggccttctaaaaacaactcaggggccaggcctgggggctcatgcctgtaaccccaacactttaggaagccgaggcaggaggatcacttgagcccagaagt

SEQ ID NO: 6941 - DNA, 1045 bp, Homo sapiens
taccttagagtatgagtaaagctgaaggagaaatttgggttgggaggcatgttaataatataattgtgtctggttttgcctcatgtaagtttcactaaaaatataaatttaagtggaaatacagtatttgaaactttttccttccattatttaaataaatcagttaaatctggtaaatgattcttgtctgatgaggaagaaacaactttctatctggaaacttaacgttaatctttgatgcagtaattatgggttacttcatccgtcgttcaacaaatagttactgagggtcttgcatgtgacagccactgtgttaggcattggagaaacaacagtaaataacaaatccctgctgtcatggagcctacattacagtgtggggaaacagacaagaatcaggtaaataagtaaactgtatcattcattagataatcaataaatgctaaggagaagaataacatggggaaccaaggtggaagtagcaaaacggtttggaggatttgcaattttagataagatctaaaaggcagtgttcactgagaacgtgactttgagttacaagtccccgagtgggaatcttgtctggtgagtccagcggccaaatgaatgagtaaggtgggtattgggatggggtaacagggcagacgaggcttagtggtctttatgagggctttggtttttaggtttttactttgagtgagatgggatcccattgaaacaggttgtcaaccttggccgaacattagaatgattggggaagctttaaaaaagtactgatgcctggatcccatcccagaatttctgatttaattggtcggcggtggtgggggaggtggtgttttaacgtaggcatcaggaatttttaaaattcccaggtaattctgataagtggccaaggttgacatctattgcactgaagagttttgagcagagtgaggtattacatagtattgaggagtgtgactctagagccagactcctccagtttgactcctggcactgccactcccaagcatgtgaccttgagcaagtgccttattagttt

SEQ ID NO: 6942 - DNA, 1043 bp, Homo sapiens
tcattgccaattccaaagtaagatttaccctatattttcttctgaaagttttctggttttagctcttaaattgttaatccattttgagttaatttttataaatggtgtgaggtagggggtccagcttcattctatgtggatatccagttgtaccagcaccagttgttgaagaggcttttttcccccacattgaatggtattagcacccttgttgaaatcagttgactatagatgtataggttgaaatcagttgactatagatgtataggtttatttctgtgctcttaattcttttccactgatctatgtctattctcatggcaagttgatagcttttacctgtggtatatggtagtatagagtattgatttttcaagctttgattacattgtaaacttttttttttttacaaacatggtaaatttattaaagaaattatttcctttaaagtatcagatttataagaacaataacagcaacaacacacaaacttattggatggttttatttaaaactttttggtgtattttatcatttctctgactgcatatggaatagtgatgcagatacatagtatatcagtgtgcattgtaattgaattttcactgtaagttaaatttaccttgagcctctaaataaatagttatgtaaattcatcctgccaaaagatgtgatggtgccagctatagaagtaccagaatagtaacagctgtctggtgcagatttgggctaagcatcacatcaagaaggaatcacatgtctgtagtctctagagaaacagttcttggcacctaatggttttttaactttaatcagtacaataaaagttgcagtactttaggaccagaatatgatacaccttttaagtctattttaatctataatgtctctctttttcttttttttcttgtaataatttacttgctaaagaaacttttttttttcctttgtttcttatagtctggctcttgctgattgaattcctttggtgcagtttagcatgttcctctgtgttctgcatctcctgtaggttggtatttgga

SEQ ID NO: 6943 - DNA, 1528 bp, Homo sapiens
gagattctaaatagaattctaaaaagacttctaagtagcttttgtggtcttgcaattttattttacctgttgaaatttttatagtttttaagataaatttgttggtaaatgattttaatgtttttataattcacatttggaaaatataaatacatagaagttatagaaatccttattacttaataaagtggttataactgcattaaagtgagtatagatttgatagtacttattaaaaataaacttttgatagacacacatttaactcataggatagcaatgaaataatttcctatgctttaataagatgctttatgttaattttattccttaaaaatatcttaccagtttcatgtgcattttatacatttaagtgtattaaagtgtggaatctccaatttgttatattttcctgtgaacattgctgatgatttacatgtagattatttgaaaacttaaaatgtacattttgatgtatgtacttaatacataaatctttctatgggatcactctcattttggtcaactctaatttagtggtctgctaagtactgtgtgatatataaattttaaaattttggaaatccaaaattagagtttggaagtgtgtggtttcaaaatagaggtggttagagggcaatgggtaagggaatgatgatttttaaactatttcctagttataatatcttgccattttaatccattatcctctaacgctatagtctgtgactttccttacttgagtctaggtgggtgccacttgaaattcttttccctttacagttgcttttcaacttatgatggggttacatccttataaacctattgtaagtcaaaaacacaagttgaaaatccatttaataccccaacaaacccacttgtaaagttgaaaaattgaaccattgtaagtcctggaccatctgtattaaacatacgcacaaaaaggaaaagagcaacagtgggagaatcagccccgaagggggagtatcaatgactggagtgaggaaaatcaaattttaaagtatgctttccactgttcatttatagtggaaatatatatagtggaaatatagtggaaacaacataaatatggtggtttctgttcccttattgattattaaggaatgtctaagatatatatggtttattcctgaacagagatccattatttttaaacatgtcttttttaaaatttaaaaataaatgttcgatttgaatctaaaaattagtactttgaatttgtggcagaaactccacaagtttgatatatttttaatagaaactggaaacaagtagatgtagaattctcagaaagattgtaagacccaggagtttgtgtctgcacgtttttatcctcagtgaattgaacattatgacaatttcattctttctttttatccttttttttttttttgagacagagtctcgctgtgttgcccaggctggagtacagtggtgctatcccagctcactgcagcctccgccaccggggttcaagtgattcttgagccctcagcctcctaagtag

SEQ ID NO: 6944 - DNA, 1035 bp, Homo sapiens
taaaatcatacaataaaagatgaaagccaggcaccagaaattgaattaggaattcaaagcctgggtagctagagagggatgaggtttaatttatcgcatctctaagggaagtaatgagatttttcactgcttggcatgtctgattgtgggttcatatcagggtaattaagtggtgactaacatttgacattcttagaaacacaagtcttatgtctgtgttcatctctggtagatgaaaaactggaagagaagatattttcaattggatgaaaacacaataggctacttcaaatctgaactggtatgttgttacgtcataaatgttgctataagaatgtttgaaaagtgttgcaatgtagtgattatatataatttcttgtactgttctgtagtttcagaataagtctagtttttagaggtaaatatagtttatttggttgtgatgcttttggttaatgatatttttcttaaatacatttttaagtaaaaagatcctatcttcaaagcagcattccaccttgaaagatctgaagatctcagaatcctctagtctataaatttcctctaaaggggctgtcctcttggggggttagccccacgtggagtagggagagaagggcatccacatggggaaggggtggtggcagagatgggagaatggtcacatacacagtgatttataaaatcaggaactatattaagtataatagaagccaagtcttttcagagaaacaatactttttggtgaatgaatgtatatctgtatatatgatgaggaatgagatatttacatagtttcaaagtacctatctactaaaataggtattaagtattgtacaaggggaaaaagagtaacattacagtgaggaaagtggtgtaaagaattctgtctgtaaaagtcaatatttaaccctctgtatttctttctcttgagattttctttacctatttcacattgactcataaatcacttcacataagatgtttttatcttccctgaaggtagaatcagaaattgaaattccctcttcgcct

SEQ ID NO: 6945 - DNA, 1047 bp, Homo sapiens
gtgttactgcactccagcctgggtgacagagaccctgtctcaaaaaaaaaaaaaaaaaaaaaatcaaaaagggatgatttgtttttgttttattgaagttaaatatgcttattccagaaaacttggaaaatatagaaagatttcagaaaaatgtggcttataaaacattcagtcccacattgaggcaaccattcttatgattttgctccctttcttaaggtatatatttttataataggtggggtcatactaaatatagtgttatatcctatttgtttcatatattgttatttttttcccatgtcattaaaaattatctgaaaaccttttagaactgcaccatactccattgatgttccaccagtaaattgtgtctgtattactctgttgctgtattgtgtctgtgttactctgttcatgtgcatagtttttgtacatttactgtaataaaatgatgaaaaacatctttgtgcattactttgcctgatttctttagggtaagtttctagatcgagattaactatcagagcatgaccctttctattttgtcaaattgatttctagaattgtatttccattagtaatgaatgaagtatactctacctttggctacttgtatttttttttttttttagtctttgttaatattacttattcaaaaatattctgcattttaaactttttcatatttctagattctagaagtgtaagggattctagaatctagaaacaagaggcagtatctctgcaccccgattggggccttatttaattggattaatttcatagtaaggtttaaaattcacattgaaagccagacgtatctgtcaatacttattgtaggatttagggtactactagaaattatttccagaaaaatatgtaaaagaatgtcagaatttttaaaaattacacaactacataaatattcttgtagcagattcagacagtgtagcagtaggtagagtgaaataagaagggtttttcttggacttcctcctctccttgttttctgtctggaggtattcattattgacgcctgttgat

SEQ ID NO: 6946 - DNA, 1078 bp, Homo sapiens
ccactgatctcaggtctgaaaatttaaagtatcttaaaatgtaacactgccatctgcggaaagtagtctcatatgtagcatgatagcctttattatctagatttactatgacatatatgctagttacttacacttttaatatttttttctgatagtattataataccgccttttattagttttctggtagtgataactacagataaataaatagaaatcaatgtttctgatttcttagttgttaagtcattctctctttatatcctttttgaaatatctaagaagtcactttcatagatgttcattttgtaactgcctgtattttatgtgactttttcagcagtcaagtatgagactctctgcaaaaacagtgtctgttgggaagaggaaaagttggagaaggatgtttgtgttttgtgctttgtggtgggggcagattggactatctagctatgactgtcagcacaactttctcttttcctccctctacccagtataggttaactctaatcttagctttgcactgtgttccagatgcggcaggccagaaggctgtcgaacccttgtatacagaggtatacatcaagagctggtgaatgcagcacgtatgtgggctctcacgcaaacgtgccttcttagtggagggcccagacttactacttacaactgatcatagaaagttgagttaaccaaactgccttttgcagttatcataactgattttgtcaatactaacgcaaactgtttcactgtagtcatcaggttggatatgtgtatttaaaaataaaaaataaaacatacaactttactaacagaaagagacattaacatataaaaattaatatactcaactgctgcaagagtttcaattttatattatgtatttaaaaatttttaagatacaatacttacgaaatgcaccattgttctaataatatatgcaaactaatgcatgcatatgcattggataaactgtacattactatagtttgcatggcatttaaaaatctctgaaatttagccatctaataggactctgtagtgttttggtaatttgtagcactttgatttcaaagcc

SEQ ID NO: 6947 - DNA, 1039 bp, Homo sapiens
aaagtgatagaataaagagattttaatgagttatcactttttcagctgatatattcattttaatggcttttttgaaagttcctttttcatgaacacacccgagaaatcttaaatagacactttgcaatatttaagaacctaatgctgtttaattttggtacagcttccacattgcatgttcactttagtatttgcaatttgatatatttcatggtggcaaaatattagctctgttttgggacattttaaaatagaactatccttgttcgatagcataggaaaatgttctggtgattgtcagggtctcctaatatttatctcaattcttttataagtctatggaaattatttaattattttaaaacgtacacacttttcttgtaaatatgtcacatctgagttcaaaaaaattactttgaataccttaatatttgctgcatttttttccgtatatataacatgtcttctttcagaatgggaatatatgtgtgcctcccaacatttactgttaaagtgtgttatctttatatgtcaaactggttgaacactgtaatgagaataaactgcacagagtttattctgacttatttctcattttgtttggttcagcccttgtgtgatgaagtaaatacaatgattaggggtgtgtttggttaattgacttcagtttacatatttaaggacagagtaattatttggtcatctttgcaagaataagaaacttcagatctgtgaattcttaatgcatccctgcatgtgaaattatagaaggaaaaatgatttttttttgataggggaaagaacttgcttatttttcttaattaaaaaacatgttctcaaaagcagaattatcatatgttagcctcagagcatcgtgtggatcatctgggctgctcacagtgctccatgattatttagacggcatgatgtaaggcggaaagcagagggcatcttaatctccgggtgggcagttgagatgcactcaaaaaactatgtcgggtgttagaggctgctccttgcaaacgttccctattggtga

SEQ ID NO: 6948 - DNA, 1036 bp, Homo sapiens
ggtgtgtcttctcctcctgggagtcccatctggatttgggtctggatttatttattcagcaagtagcctctttatagttactttttttttttttttttttttgagatggagtttcactttgtcacccaggctggagtgcactggcgcaatcttggctcactgcaagctccgccttccaggttcacgccattctcctgcctcagcctcccgagtagctgggaccacaggtgcctgccaccatgcctggctaattttttgtatttttagtagagactgggtttcactgtgttagccaggacggtctcgatctcctgacctcatgatctgcccaccttggcctcccaaagcgctgggattacaggtgtgagccaccatgcccggcctgtagttacttttaatttagccatgctcggggctgaaggggatgccaaagaaatataagatgagcccctcagacggctaaagatgaagatgaggcctccagtatgtacctcccacatacaccccaggaaattctgggtgtcactggattctggacctcccaaaagctgctggcacctggaggatggggccccgaggctggacctcactcctgctgggttgctggactgggaaagtactgatggcagctgaggagtgtgtcccagacttcactgagccattcccaaagattattccaagttctcctgacactgcactggaggcctgctgtgctggccttctttatttacagtttctgactggtgtctagcagccctgccagagagagcggcagtgtgtctgcaggcgaccaggagaaatgtctcaggctttagagcaggactttgagcacatagctgtgggggcccagcaggctgtctcctgcacggttacttctccttgtcctttcatggtcgagaggttgctgcctggcccttcaagtgaggatgggacatgctatccattggccttaatttccaacctctgcatgatgcattttatgctcctgcctttgaaagaacttttattttcttgtcatttatgcccagaccccaca

SEQ ID NO: 6949 - DNA, 1041 bp, Homo sapiens
ataagcatgattacttatgaatgggatatgtgcacctgttgggtgtcacatgacctttcaaatcttggagtcagattggacaccaccatgcccatttccagttcaactctgatttttgtgtggtacatgctttttatcacagtgactgccagaaatccaacttcatatggaatcatgaaaagggatgtagtgtgatctgatttcaaaactatgatcaatctagagctagtttacaaggtgtctaacagtgatcaagtatcactgtatttccctagaaaacctgaaatatcgatgaattttctgtggcactctggggtcccttggggcacactatgggaaccatgggattaggaccataaggatatgattttggcttcttcctgcctcagatctaatctttacctggcatttttgccttaaagatgaaagaagcatacattttgatgtatttaaagcacatattcggccaggtgcggtggctcacacctgtagtcccagcactttgggtggctgaggcaggcagatcacaaggttggaagtttgagaccagcctgaccaacatggtgaaaccccatctctactaaaaatacaaaaaatagctgggtgtggtggcatgtgcctgtaatcccagctactcaggaggctgaggcaggagaatcacttgaacccaggaggcagaggttgcagtgaaccaagattgcaccactgcactccagcctgggctacagagcaagactctgtctcaaaaaaaaaaaaaaaaaaaaaaaagcacatattcattttgtgcttattcttttgagagaaacacagataaaagcctatcctttaattcatactccccatactgtgattttcatttttactgcaacaaattttgttcagtgtgataatgaatgtcaaacacttaatgccttgctcttttcagtaacatgacatattggagaataatgactgaagcttatctacactgcctacgtctgttttcttccaccttgaaagaagttgttgaaagtaattaagaagtattatgtgtaaaactcc

SEQ ID NO: 6950 - DNA, 1030 bp, Homo sapiens
caggataaattcaaatacgtctatgccaagtcatatcataattttttgaaaatgaaaaaataaaaaataaattctaaaagaaagctggagagaaacaacatattctcatagagaaataccaagtttgttgacagctgatttctcatctgaaattatggtggccaataagaagaggcacatttttcaagtgctgtaaaagaactgtgagtcacaaattgtatatccagcaaaaatatccgttaggaacaaacagcaagtaaagacagtctcaaataaatgaaaacagattattttgcactggcaggcctacccttaaagaatggataaagcaagttatccaaggaaatgatgacaaaagaatgcttagaacttcagaaaggaagaaagatcaatggaatggataaaaacagaggtaaatatgacaggctatccttctcataagtctcttaaatcatatttgatggttgaagtaaaagttataacaccatatgatgtggtacttaatatatgtagaggaagtatctaagataattatattttaataattactataaatataaatggctagattcaccaattaaaagaaatgtatagaatgggttataaaatacaacccaactatatgcagttgacaaaacacacttttcaaatataatgacgtaggtaggtcaaaagtaggaagatatgccatgaaaacattaattttttaaaaagcagaagtcgtatattagtatcaggtgaagcaggcttcagagcaaagaaattcactagataaaaagagggacattacataataataaaaagacaatgacatagtgatcctaaatgggtatgcagtaaacagaggttcaaactacatgaagcagaaaactgatagatacaaaaggatcaatggacataaccataattatagttgaatacctaacaccccacgctcagttattgatagaactgttagacaaaattataggaaagatatagaactgaatagcacactatcagtcatcaggatctatttgacatttgtaaa

SEQ ID NO: 6951 - DNA, 1029 bp, Homo sapiens
tttaaggaatcatcttcacttttatattcccatttcaattgtatatttagtaaatgtttaaagaaataagtatgtgttcatgactgcggtcatctgttgtggatgtatattagaacctggaaatacactgtaagaagacagcacagtttataaagacacatttcagcaatatatgttggctgcttgttgtatagttcagttgttttgttaaaatattaaagaaaattgatatatttttaaaatgtatttccagaatggaagagcagcctgtttgctcctacttggaatagattctttctaaaaatatggaactgatagaaaagaaacttatagactacattgatcagcgaatatataaactccaggagcacattgatgataagattgctttgttgattgatttgctgcaaaatcccaactccccgcccagtaggctgcctctaagacattatgactctggagaaggactttcaaatggagaaagatgagctctcaacataaacagtgtactgcagatatttgttacatatttattacaaagccaaaacccaaaaatatttataaaaagcaaggatttaatgtccttttaaggatcatcatcttacttactgaagtgacctcagtgttcattattactacacttgtactgtatactaagacttaacatgatacagtattttatttttgctagtaatatttttcactcataagtgtatatgtacttctgtgttatatgttctaaatgtttaaggagttctaatataattcattagttgatatagtatatgtttgattgaagtactgttttaatttatatgaagaccttattttatagtttcagggatataaaaggaatgcttagagtatttgatttttttttcctaattgactcttagaaaactgggtacttaacctggaacctttattttagatcaccaacttgaattttatattgtttatttcagataaaaaattagatgtgatgtttggcatgtgtaaaatcagttcacattggggccattaattgta

SEQ ID NO: 6952 - DNA, 1097 bp, Homo sapiens
aaccacaaaaacagcaaaactaagtaaaatatgactattttcaatcaatgttggttatgttgccctcttgcaaaatgacaggcaaaatcatacttgtttttacatttgcatccacatatattacactgaaaaggattttcatacccatgacatcccatatgaatagtgtaaaggatgttgtctgcaaagtacatatcacagtgctggcagtggtgcagaagctgagggtcctggaccggcagggctggggctggggtgcttggctggctgtttcctatgctgggagtgctcgtgtgggcacttggctcactgcttggacctgccactggactatagttcctttgactatgggatggccgaggttctgggcttgtgggagaggagctctgaggaatacttgctgatacggcagaaactactgcttgggtagagggctgctgaatcatgaaaggcttttcatcagggcagggaactacatcaggggatgcagggttttggttttcgggtggcagactggacaactgccctgctagagtcgagagctgattcaaagggttatcaaccatgagttcttgggggtcccttggaaggccaccagttggtgtggtttttgccatactttcataggagtcagtctggatatttgggatttcgtgggtaaaatcgttaaggtagtctggtttctgaaccaccatggaaggtggacttaagttgattagtgctcttctgctatagcccagattgcttgttttcttctgtaaaaccccccacattttcttgctgcttaaggaagacctagtacctttaattggtaccattttatgcttgcgccttcgatgatgggacaagttacttcgatcactgcagcggaaggaacataattcacatttgtatggtttttctccagtatgagaacgcatatgggcttccagatgacgctcataagcagatgcaaatggacaaagatgacatcgatgaggtttttcacctgtttcaaaagaaaaatgatggagaaactacaagagtagttcatttatggaaagttttgcttgtccattcattggacaactggaaattgatcaaaaagaaaatgcttt

SEQ ID NO: 6953 - DNA, 1126 bp, Homo sapiens
gtgtgctatgccagatgtaataatgaataaaatactctacctccaagaagtttatcttttagaggaaaggttagaactatgtgcaactaaccccatgtcatgtaggtgtggaacaaatcctaaggggctacagtctgcgtgcagattcagaagatagaaatgactaggaccattggggaagtgataggctctttggaagctgggttagagtttaggaggggaaaggagtggtcagaaaactgcaacaaaaggggactgaggccactttagggaattgggggttgatccttttggattgttaggagccattgaaggtcaagagctttggagtttcctcatgccacagtgtaggtagatggctgtggacacaagtggcatggagtggggagaaatgcaaggtagggctaattttggtttctatccagaggcaaatggaaagctagcatttactcacttattgtagaccagggacagcattttacacccactaccctatttactcttcctgtaaacctctgaagtaggtatattagtggcttcatcttgcaaatgaggaactcggaggcaataaccagtgttcccaagtcacataacaatcagattgcaatgctgaccttcagcctacccctgccttctcagaaggtctctcctagtcctgcagatggattagaactgtcctgcccatttggtctaagcaacccaattagtggagaattggaccttgtagttaacctgtggttccaaagcattttaatgtagcttgatatctttttttttttttttttgagacggagtcttactctgtcgcccaggttggagtgctgtggtgcgatctcagttcactgtaacctatgccacccggattcgagcgattctcctgcctcagcctcccgagtaactgggattacaggcgcctgccaccttgcctggctaatttttgtagttttagtacagatggggtttcaccatcttggtcagcaagatggaaatggtctcaaactcctaacttcatgatccacccgccatggcctcccaaaatgctgggattacaggcgtgagccaccacaccaggccgcttgatgtcttttaagagatgattttttttttttttagacaagttttcact

SEQ ID NO: 6954 - DNA, 1042 bp, Homo sapiens
aaccacgacactgcactccagcctgggtgataaagcaagattctgtctcaaaaaaaaagagaagaaaaaaaaaaaagaaagaaaacaatgctaacacagaactcacacttccaccctctcctcagatacaacctccatcctgaagctcatctgtatgcttcctgtttgtgtttttaaacttttactatatctttatgtcctcataagaatatgtactatcatttggtgttttaaagtgtacataaatgctgtcatcctgaacaaatcctctcgctaactgcatctttaactctatactatattttcaagatttgtccatgttgatccacgtagctccctagttccctttaactgctataagatattctgttgcatcaatatatgacaatttatgcatgctttgttgacaggtaattggatttttagtgttttgcctttacaaaaatcactgcatcttttgcacatgtctacttgtgcatatgaactgaggtaaaattgctgggccttactgtaaatatgttgttttaattcactttgcgctgctgtaacagaataccatagactgggtgcttataaagaaaagaaatttatttctcatagttctggagaatgggaattccaagatccattcacaggttcggttgtctggggaagactttcttcacacatcctcacttggcagaacggaagggcctgggttgatgctgtgtgaaacctcttttataagggccttagtctcattcccaaggaggagctctcataacctaatcacctcttaaaggccccccactcaatactatgacattgaatttcaacatctgaattttagaggggacacatgcaaaccatgtcatatgtctttatctttactatcactaaattgtccaaagtgattgcaacagtgatttatatactcaacccacagagtataagaatttctcctttctagctgggcacggtggctcacgccagtaatcccagcactctgggaggccgagatgggcggatcacttgaggccaggagttcaagaccagcctggcc

SEQ ID NO: 6955 - DNA, 1082 bp, Homo sapiens
acagataactgctgtgaatttgaagtagtgaagagcacaaataatatttcaagatatttgcaccaaatcaatgtgatataaaagtatctgtaatttcttttgatgacagagtcacagatactgctaaaactactgtaacttgttgcttacattcataatagaaggaaatgctgtattttagttagaggttagtgaaatgaggatgtaattttacccacatccaagttcatggactttattattctgtccacgaggcccagatttgatcatcaacacttctaagtgcaacagaactctggtcagttgagtaagaaacagatcagactcaagctctggaaagtatttggcaaggcataaatagccattattccattcaagtagcaattgctgttctatacaaaaaaatgtgatgatgtggtacaatgggttataactgtggaaaatcattttgatggagaggacaccaaagctgcaaaggctgaggtcaacactgaagggcaggggacattagaaaatcaacatcaaaacatcaggctgtgcagtcaaaggccaggaaaagaaaagcttcttttattaaagactgtcatagtattaataaatggaaaattttttctgccgaaaaatgttaggtaatatctctcaatgctttggttaaaaatggattccattcacttagcatatgtcactgtattttatgaagagcatcttcaataattttaccctgtgatcctataccatttctaacctttttaagtacaattgtctctgttattgtgtctatgaatctaaaatcactgctatgttttgaatggtcctatactttgtcagtagcaatactgaaatcaagaggctcacagttgtgtccgtgggaaaaataggtattaatgtaagatccactggcttttaagtttctcagtagtgagctttcttttcttttctttttcttttttttttaagatggagtctcactttgtcgcccaggctggagtgcagtggtgtgatcttggctcactgcaacctctgccgctggggttcaagcaattctcctgcctcagcctcccgagtagctgggattacagttg

SEQ ID NO: 6956 - DNA, 1749 bp, Homo sapiens
gtgctttagggaaatgtaacttctatgaccttaaaaattaactgttaagagaatggttatttctgtatctggtgttaagaaccattttaactgttttgaaattacttccaggtggttctgatggctttgtaaatatttgggatccatttaacaaaaagcgactgtgccaattccatcggtaccccacgagcatcgcatcacttgccttcagtaatgatgggactacgcttgcaatagcgtcatcatatatgtatgaaatggatgacacagaacatcctgaagatggtatcttcattcgccaagtgacagatgcagaaacaaaacccaagtgagtatgcttcacctgtatttgagccttttcttgcattcaacccaggatttattaatttttctaaattcatgaatagcattgttgatgcctgctcgatattacagctgactgtagggttggagttgatgttatcatgttctcccaagctttcaatatccgtaggttgatagacgtctgatggataaaattgtgcctagttgttttgtagagaagaatgtcaaactcttattcttcttgaataggctctattatttgaatctctggagttattaccagctcattgcttcaaaattaagttgaggaattcaagaataatttattttagtaaattctatttaagatgtttaagaatttgaactgccaaaaatctttcctctccacagaggttgtttctttaatattaacacaaagtaagtgaccttcaggtcttattggaaactcagagtaatatggccttgcctggaattgcaaatttccttagttttgaaattttcatagatgtctttggttcttggttgtaactgttgactgagaagagccatttacattttttgataccaacagggcaaagctttttacttaattacctctaccaggctttaagggaaatctgatacttcagcatgtgttaaactataaaatacctactccaagtatctgcccagttccttgtcccctctccccaggcccttaaaggaagttctcgatacatatttgtagaataactgaatgttttcaggattcctgtactttgctgagttaaaatggatatggtacccttgctgattggttgagcccctaagagggggcagaatattaaatattccatatcagatatgcttttacaggtttgactttagaaaagtcttagcatgtgaagcctgttggataaagggctgtgtttgcatttaatctgtcacttttgtatctcctgtcctggctggccattttgatctcatgctgttctttttttcttttgaacttgtaggtcaccatgtacttgacaagatttcatttacttaagtgccatgttgatgataataaaacaattcgtactccccaatggtggatttattactattaaagaaaccagggaaaatattaattttaatattataacaacctgaaaataatggaaaagaggtttttgaatttttttttttaaataaacaccttcttaagtgcatgagatggtttgatggtttgctgcattaaaggtatttgggcaaacaaaattggagggcaagtgactgcagttttgagaatcagttttgaccttgatgattttttgtttccactgtggaaataaatgtttgtaaataagtgtaataaaaatccctttgcattctttctggaccttaaatggtagaggaaaaggctcgtgagccatttgtttcttttgctggttatagttgcta

SEQ ID NO: 6957 - DNA, 1143 bp, Homo sapiens
acattaatgaggtttacatatttctctgacatttatatagttcttatgtccatttcagttgaccagccgctggtgattaaagttaaaaagaaaaaaattatagtgagaatgagattcatttcaatgtaatgcactaaagcagaacacgaacttagcttggcctattctaggtagttccaaatagtatttttgttgtcaaactttaaaatttatattaatttgcaaatgtatgtctctgagtaggacttggacctttcctgagatttattttatccgtgatgtattttttttaattcttttgatacagagaagggtctttttttttttaagtatttcagtgaaaacttggtgtaagtctgaacccatcttttgaaatgtattttcttcattgcaggtccacctaatcatcctgtgaaagtggtttctctatggaaagctttgtttgcttcctacaaatacatgcttattccttaagggatgtgttagagttactgtggatttctctgttttctgtcttacaagaaacttgtctatgtaccttaatactttgtttaggatgaggagtctttgtgtccctgtacagtagtctgacgtatttccccttctgtcccctagtaagcccagttgctgtatctgaacagtttgagctctttttgtaatatactctaaacctgttatttctgtgctaataaacgagatgcagaacccttgaatgttggatgtttttgaatgttggtaattaatataatttacttaaaaaggcttgtgtaaggcaaaactcgtcatcacaggcatgttgggggatgacattttacctttaagtccactctccctcgtttaattgtctcctctgatgtgtgttggggattcagtcctgcataaagtgatttgttggagttcagccatttccctcatgcccccttgtgccctctcggtggatcagcagggcctttgagccaagtgtgcagcttcactcaggatgggcagagactatgtggcagcctctggggaccttttggctcagtgctttactagtgccagcgcagtagtgcttaggtagcttgtgcatccccgtgttgatgtagtcatagtccacacagagccaaataacagacccttctgtacttagccatcaaatactaa

SEQ ID NO: 6958 - DNA, 1072 bp, Homo sapiens
gctttgttcattaagcatttagtgtcttagaagtgatatgtttactgcagaaaaatttggatagcatgcaaaaaatgaaacatactatcacaatcctatgatataacttaaaaatttctttatagcttcatggaggtatttgatgaaaattgtatatatttaaggtatataatgttttgatacatgtatacattgtgaaatgattaccacaaggaggttactaaacatctccatcaccttgttaaattgagttaaacaaatttacaagttgacaaattacatttacaaatttatgtaattttttacgctttttttttttctcctttttctggagaacggggtctcgctatactgcccaggcaggtctcgaactcctgggctcaagctatcctcccgcctcttgcctccctaagagctgggattataggcgtgagccaccccacccggcctatgtcatttttttatgtggtgagaataaataatctcagcaaatttcaagtatacaattcattattactaagatagccaccacactgtatgtcagggctccagaacttactcatctcataggaggcagctacttttaacattcttggtgtatatccatccttcaggattttctgtatatttctctaacagcaaaagtttttgttagctacatcatgtgaaatgcctgggtagacaaatttaaagatgttatttgggatggtgtgacttgcacaagccacacagcctgcatggtgtccactttgagggggatgcccatagctatacttagaagtcatcctctagagcaagcttgtccaatttgttgtccatgggccacatgctgcccaggatggctttgaaggtggcccaaaacaaattcataaacttttgtaaaacgtgagattttttgtgattttttttttttcgagacacagtctcgttctgtcgcccaggctggagtgcaagtggcgcgatctccgctcattgcaagctccgcctctcgggttcaagcaattctcctgcctcagccacccgagtagttgggattacaggcacccgccatcacgcccggctaatttttgta

SEQ ID NO: 6959 - DNA, 1034 bp, Homo sapiens
tgataccacaacgtggccacattttgttttcaagaccttggccaacctttggtcttcacagccactgccctggtagtaagggacttagttaagtttggtgactgcttgaagtctaagatcaccaaagtggctaatgcaggcactgtgacaatctgggcactaggaaaagcaatgtgggcagaaattccttgttcgagagccttctggttatactttaaaaagaagggagcctagcatcttgtcaaatctttgagcccactcactcagagggcctgtcactcatccagaattgaatctgctggtttaacaggtcaggcagtgtgatttgacagcgtgaatcttagagtccagcctttgaacctggcgctgaatcctgactttactgcttattcagggggccactagctaagttaatttgtgagcctgggcaacatggcgtgacccatctctacaaaagatacaaaaattaactggatgtggtggtgcatgcctgtagttcatagctactctggaggctgaggcgggaggataacctgagtgcgggaggttgaggttgcagtgagctgaagttgcaccactgcactccagcctaggtgacagagtgagaccttatcttaatctaaaaaataaaatttctgagccttattttcctcatctgtaaaatgaagagaatacctagctcatggagttaggaacaagtatgttaaatatttatcagagtgtgcctgacagtgagttgaaaatatctactctctttggatgaaaaatatttaacacttcactctcagatataattattagctgactttttagattcttttttcttttacatgatgtagttctcagatatatacgggatttctagttcttaaatgccagtattttttttctgttaaaatatttatgaactatttcaaacattcagaaaaactcaggatcatacccataaacccactgtttagattttaaaaagttcaatgtttttctgtattttatctcttcattttaaaataaagttttgcacatgtttgaag

SEQ ID NO: 6960 - DNA, 1056 bp, Homo sapiens
agtggacaccagatggatacttgactcaagggcatttgatttcctggttggcctgaagacagtgaccttggactttagttgtccttctcaagaaagatgagctggatcaactggaattcattcctagggcactaaagagactgaacccattggtggtggtctttgcagctagttggagggtcctgtggatttgggggctggggaagccacttctggtccacatgcaagcaggtgagaaagttgagaagggagcagaggtatgcattgaggagcagagatcttgaggcccctgagaaatggaggtcttgccttcattgagacttggtctagggatatgttttgcaatggcatctgggctatattttctaacacacatcctgcatacctaactttgttgggtatgcagaaatgtaacctttgttgggaaacatacccttggttgggtatgcagatcttgtagaactgggatacaattctacaggatcacttgtagggcttttttctgttctgcattgtagttaaaaatcagttggctaaaaattgacaaatgtgatctaattaaactaaagagctctgcacagcaaaagaagctattatcagtgaacaggcaacctacagaatgggagaaaatttttgcaatctatccatctgacaaaggactaatatccggactctacaaagaacttaaacaaatttacaagaaaaaaacaaccccatcaaaaagtaggcgaaggatatgaacagacacttctcaaaagaagacatttatctggccaacaaacatgtgaaaaaaagcttataatcactggtcattagggaaatgcaaatcaaaaccacaatgtgataccatctcatgccagttagaatggctatcattaaaaagtcaggaaacaagagatgctggagaggatgtggagaaataggaacacttttacattgttgatgggagtgtaaattagttcaacctttgtggaagatagtatggcaattcaaggatctagaaccagaaataccatttgacccagcaatcctattactgggtatatacccgaagga

SEQ ID NO: 6961 - DNA, 1029 bp, Homo sapiens
aaaaataaataaaaatttctattttttttcttttgggctatacgaatgtcatgttattctgtaacattagattcttagggcattcattaaatctaatattcttttcctaatgggagagaactttttatttcaggcagtgcattatgtaactacatcttcctaatttccattttattctccagtctctttcaaaacataagttgagttataaactctgaactgctaatgtgggagtgggagtccacctctgaggatgcctacagtgctctctagtattaataaagtccctgctactgcagtgagatgccacctcacccattaggatagccgttattaaaattccagaaaatagcaagtgtaggtgaggatgtggagagattagaactcttgtgtactgctagtaggaatgtaaaatggtgcagtctctacgtaaagcagtatagtggtttctcaaaaaaattaaacagaattaccatatgatccagcaattctgcctctgggtatatacctaaaggaaatgagagcagggacttgaagagatacttgtacactcatgttcatacagcattattcacaacagccaaaagatagaaacaactcaagtgcccatcgatggatgaatgaataaagaaaatgtgtatacacacaatggaatattagccttaaaagaagagaaattctgacatatgctacaacatggatgaaccccctcagaacagtatgctaagtgaaataagctagatgtgaaaagacaactactgtatgattccacttacgtgaagtgtctagagtaatcaaattcatagagacagagagtaaaacggtggttgccagaggctgggaaaagggtggatttggggagttattgcttaatgagtacagaatttcagtttgggaaaatgaaaaagttgtggagtggatggtgagatggttgcacaactatgtgaatgtacttaatgccactgaaatgtacacttaaaaatggttaaagtaataaattttatgtacattttaacccacacatcttaa

SEQ ID NO: 6962 - DNA, 1029 bp, Homo sapiens
aagctgaaataggcaaggacggattcttctctagaggctctggaaggggcagacttctgacttccagaactgcgagagaatacattcctattgtttgaacccctcaagttgcggatgatttgttacggcagccctaggaaatgtgacaggctccaagtcacattttgagaatcctacactgaggcagaaactctgctgatgaggcccactttgtgaatagttgacatgcttccagctttataaacatcaattcaaatcttagaagagaatttccccctctgggcaaaatgggcgttgacgtatttttttaaaatgggagttaaatgctgagggtataaggcacctctggcccatatgggactggctgagtcccaggtcttctgtcttcccggccaggcctgagcatgtgcagggaggaggccgacgactggctgggcagatgcaaacctccatttgtgtattgctacctttccagagcctcggggatgctcggtggacacctcacaggaggtgagattgacagagccggttctagtcttagctgtcttcttccttcctgaaggttcctggacaagtcacctgatcttgtggaacccaagtttctccacctctaaatggaacacactaaattgttatgagtgagcatcagaggaaatcaagagtgtgtgatttagctctgcatgcaacgggctctgtagataattttcattgcagttattttgacttcactttggtgagtcgactaccccaggttttgaaatgaacacagggaggcagaatacgtgttgtaatcccaggctacagttctggagcctttattgaaggagaagacattttttatttgtaagaatgaaaaacggaaggcggggagcctatgtggcatggaattcaagaaatggagcaactggccactggcgatgggaaggcccatggcagattctgcaaatctctctggagtttctgcttgagttcctgttcgccgctgtgagcccctcactctttcgttgctgagacaccttcaccatggct

SEQ ID NO: 6963 - DNA, 1658 bp, Homo sapiens
ggatttgtatcagagtgttgtcttccagtgtctgcaccttccaactctcctgggagggagcaagagctgcagaaggatgaccacaggaagactgagtctcgagagctctttgtcagcccccttgacccgcatcccagggcagaggcatcgaacaaagacctaagtccatggataatccaaggcaataaatgcgctccacattcttggctgggggttagcaccaaagccatcacatgggaaggtttagggtttgagaaagcaccaccattacctatgtgttttcaccacccaggcatgttccctatttgttttgagaagaaaatgaaagaaacaaattttctgcacaaagtttccaactggcaaacatttttccagctgtgagaccttggacacattttcatctcagaactgttttttcttttgtaaaatgatgtaataattgcagttatctccctgggctgtggtgggtattagacaagaaaatgcaagtagaactcacagagattggcctgtaggaagcactcagtaacagctttgctttgtcttcttgtgattgttattcattaataaaatttatgctgctcacagagctctgttacttatttatttttttgagacagggtcttgctctatccctcagggtggagggcagtggtgtggtcatggctcattgtagcctctgcttcccggactcaagcagtccctccatctcagcctcccaagtaattggggttacagtggcgcactgtaacatctggctaatttttgtattttttgtggagacggggtttcaccatgttgcccaggctggtcttgaactcctgagcaatccccatgtctctaccttgcaaaatgttgggattacaggcatgagccaccacacccagctaactctgttatctttgacagggtggatgaagggttaaggttggagtgagaaggtggaattcgtcttgtcactctcggcctgcctagctcctcttgctcacttacctcccccattttctcactctgtttatcctccctgagtatctggggagacttgcaccctaccacctccaacccccaacacctggggaggcagttcaggtgggagcttggctaccacactgcaggctgcttcttttccccggaaccttgatttttactcctcagacgtcatctcagtgatcttcctgcactgggattgtggttaaatgtctgtactcaggatccacatgagggtgagccgctcatggagggagagcacttttcctccacctcatcccaggcctagctcggcatggggcctgccctggctgattcccagtgaacacctatcgaataaacagggaaaccgaaccttgaaaggaaaggggcgtctgcatatagacaacacctctttttctttttttcttctttcttatttttttctttttcttttttaactgtcttaaccatttccaagtgtaaaattcagtgcattaagcacattcgcagtgttgtgcaaccatcaccaccatctgtttcgagaactttccttcatcccttacagaaactctgtacccattaagcagtaactccacattctctcctcccccagcctttattttactttccatctttatgaatttgcctattctggatgcctcacataggtggaattgtacaatatttgg

SEQ ID NO: 6964 - DNA, 1107 bp, Homo sapiens
tggcagctggctttctggagagcgagtgacccaagagagaacaaggtgaaagcaacggcttttctgacccagcctgagatgtcacactccaacatttccacaatgtactgttgcttacacagggcagccttatttgatacagaggggactatacaagaatgcaagtatccagaggcaaggaccattggggggcatttgaaatgctggcaaccacccctggcctcagtgtcctcaccaataaggggcaatcgtgcctgctcaattgcctcactgtaggaataaaaggagatcctttgtgggaaggatgggaagtgccgtagcagttaggagctcagggataagacaggtgtgatggttaattttatatgtcaacttgatcgctaagggatgctcagctggccgggtgcatctgtgagggtgtttccagaagagattagcaattgaatcagtgagctgagtaaagaagatctgccctcaccaaagtgggtgggcagcagccaatccatttagggccagactagaacaaaaaggtagaggacaggcgaatttgctctctctatttgagctgggacatccgtcttctcctgccctcagacatcagagatccatgttttcaggccttcacactctaaggcttacccccagcagtctctccgtccctggtctcaggccttcagacccaggctgaatcacaacactggcttcactggttctccaacttgcagacagcatattgtgggggcttctttcataatcacgtgagccaattctcataataaatcccctgttatatatctatatatccatggttctatttttcttgagaactctaactaatacgacaggataaaacagggtgagatgtctgaattgagatgtattgtaaatgtaaaatatacccccagattcctaagacttaatatgaaaaagaatgtaaattatctcattaacatgttgaaatgatattttggatagtgtgtgaaagacattttttattaaaattaattttacctgtttcttttctttagttaatggggcttccagaaaatttggaatgatgtatatggttggcattctatttctattgggcagctctggcctacacca

SEQ ID NO: 6965 - DNA, 1068 bp, Homo sapiens
ctagagacaggttttcattatgttgtctaggctgtgtttctcatttttaacatgaagaggaaatgaaatcacttgcatgaatgatctgtttcatccactgaccatgagtagagatcatcaaatattgacagaatgagtaagggaaggtagtgttgacccacagcactgggcactcaccaggcccagcagtttaaattgtcaggagatgccaggagagttgtgacagcattggctgcagcaaaagagtcattagacttgagtttaaaagctaggagtgtgaggtcactgcagctgtcttaatatcctaaattaaaatcatattaaggcttcatgaatgttccagctgcttcttagttgcctttgagctgctgcatgaagaatgggaggcccttgggttgtttttcgcaggctcctggcttagactgggcaggagaaggcacagctgggtgtggcatgcacagggccaaggtagggagaccagaaacctcacttgggaaacttcatggtccagagacagaatgtatctcagtacaagggctgttgcttgtgtggggtagatttccaagatcttttaaaagccatcaatatagaggctccagagtccctggaccatgattatttaagtcatttattcgacatgaggctccctctcccgcctcatccaatttaccctctgtcttctctaggtcagcctagaaaggaggaactgattttctttaaataaatatgggttgcagcttatgatgcagagggtctaaggacgcttgtgatttctcagtccccttgtaaggtttaggtttggaaccgaattaaaacaccaaaggcaagaagtctaaaagggagagatgattcctgctgattccttctggcacctgcagtgcctgtgacaatctgccccacggggagcccatgccactgagagggaaatggttcaattcaggactggtaagaaattgggctcatataccagccattagggaactttacttgatgagaaaatgagaaccttttgtagttgctaaagagagcaccattcttaatttgacctcttcttggtcatgggagatg

SEQ ID NO: 6966 - DNA, 1068 bp, Homo sapiens
tcagcctcccaaagtgcctggattacaggcgtgagccacggtgccgggccagtacagttattcttatgctcattaaagattaagaacactgtggcccggtgcaatggctcacgcttgtaatcccaacacttcgggaggctggggcaggcggattgcttgagcccaggagttcaagaccaacctgggcaccatggtgaaactccgtctctaccgaaaaaaaaaaaaaaaaaaaaattagccaggcatggcggcgtgcccctgtagtcccagctacttgggaggctgaggcaggagaattgcttgaacccagggggcggaggttgcagtgagcctagatggtgccactgcactccagcctggcgacagagcgagactctgtctcaaaaaaaaaaaagaaaaaacaaaaacaaaaaaatacaaaaatttgcgaggcatggtggtgcatgtctgtagtcacagctacttgaggggctgaggtgggaggatcccttaagcccaggctgttgaggctgcagtgagccgagatagcaccactgcactccagactgggcaatgggagtgagaacctttaaaaaaaaaaaaaaaattaagaacactgagttggaccaaaggaaggaataaaagaaaatgtatatacagattgacagatttttgggtgttcaccctgttctgcatttaagataatctgaagtccctggtagtgaagtttggaatttgggtaacccaaggggttcttgcttgcttgcaggatttactctattttaactcaacatcaccctccgtaatcatcatccttaatacacattaaagcattggtgagttgtgaggagttagtgaagtgataaatgtgaaagcaccatgcacactattcagcacacagtacctgctcaataaatgattgttttgagtattaaacttccttgataaattccacatacaatggtgttttaaaatgttatacaggagagcatggctgcttgcattttcaagttgactgcgcagtggagctaaacagaaaatgctgtccctcttgcagccttggccactgggcttaggatgcctgggaca

SEQ ID NO: 6967 - DNA, 1047 bp, Homo sapiens
tgttcatttgtgaagattatttatttggttattttgggctctcttttgcttgttcctgtgattataaacatagcatacataattattaaatgaacactgtctctcttttttttaacttttattttaagttcaggggtacatgtgcaggtttgctacataggtaaacgtggggtttactgtacagattatttcatcacccaagtatgaagcccagcacccattagttatttttcctgatcctgtccctcctcccaccccccaccctctgataggccccagtgtgtgttgttcccctctatgtgtccatgtgttctcatcatttatctcccattcgtaagtgagaacatgtggtatttggttttctgttcccattagtttgctagggataatggccttcagctccatccacgtccctgcaaaggacatgatctcattcctttctatggctgcacagaattccatggtgtatatgtaccacattttctttatccagactatcagtgatgggcatttaggttgattccatgtctttgctactgtgactagggctgcaatgaacatacatgtgcatgtgtctttatagtagaacaatttatattcctttgggtatatacccagtaattgtattgctgggtcaaatggtatttctgtctttaggtctttgaggaatcaccacactgtctttcacaatggttgaactaatttacactcccaccaacagtgtataagtggaatgaatactatctcttaagaaatgttttatttttcctatttgcaaaaggcctatgttctttgtagaaagttcaaataatatacagatgtttgaaatagagtataaatatctccttgccctctactttagtattactccctaaagggttactattgaccaaagttaggtgtatattattctagattttagaaatgtaaatagaagcttcatgcacagctacttgtgaacacaaacactcatacccacacatccacacaatgcatatattgagttttttttttttttttttttttgagacagggtcttgttgtgtt

SEQ ID NO: 6968 - DNA, 1024 bp, Homo sapiens
aagctaagattaatttattattgacgaaataaaataaaaataagtttttataaatttagtgtagcctaagtgtatggtgtttaaacatctacagtagtgtaccataatgtcctaggccttcacatgcactcttcactcactcactgacactcactcagagcaacttccagtcctgcaagctccaatcttggtcagcgatctatacatgtgtaccttttaaatatcttttatatggtatttttactgcaccttttctatgtttgaatatatttatatgcacaaatacttaccattgtgctataattgcccacagtattcagtacggtaacatgctgtacaggtttgtagtgtaggagcactaagcactagtctatcccatatagcctaggtgtgtagtagcacatctaggtttgtgtaagttcactctgtgatgtttgcacagtgacacatttctcagaatgtatctccatggttaagcaaatcatgactatatattcactttgggagttcaaaggaatttagcagggataattgagtctgtaggaatcccttcagtgacagaagtggatgggttatctagttcttaaacttgtgagttgcagagttgaactagcagggttgagtcttagctttgtcagttattagtcattagccttggttttcctcttctgaaatcggtgatgatatcagtacatacttagaagatgaaatgagtctacacctgtcaagccggtaccaaagagcttggaaaaaagtaaacacttgaggacaggtcactgtgttcatcccattgtcacctacttccagcctctgcttgagagatggctatctcagttttcctggatgctcattccttagtttggtagcctgaagtattagaaagttcttcatttatggagctgcaatttgtctatttctacctcaaagtcattggtccttgttttgtcctctgatatgacacaagaatcagtaaaatctcttctctgtaagatggtttctcaaatattgaaggtggtgctatggt

SEQ ID NO: 6969 - DNA, 1051 bp, Homo sapiens
taagacaggtggctattatgtccccatgaaatctcttctctaggtataactctctgtttcctgccctcattcctcaaatgcatggttttgagagccttggtctttggtttgagtgaaacattggttggaacaataccctgccactcattcctttggaatttaaaacttattggtctatcttcagctgccgatagaacacatcagcacaccaggtaccccttgatgacaagaatctctccgtaccaaaaaaggacaaagtgtcaattttagaatacaatgtaatggacacacagcccatctaatcctccgggaattctaaattctactttttctatcatgttttacaggtcatcagagagcaacatgcccaaatcacgtgagcatatgctcttacaggatgttttttctgagttatgttgaaaatccatttctcattcttttcatatgaaagcagtgctatcaaatcgtgtttgctgtttttataaagtcatttgtgccaactctgtcttctttttgtccctacagttcccctgggaatctgtctgtgactacggagacctcacaccatgagaagggactatacccccttggcccatgcacctgttaggctccctcacctgaccattagagagcaccttgacagagagctgttaggggctgcccatcctctgtgtgtctgatgatcaaagtaaagaactctagtttgtcttagtttttaaactccttaaagtttttctaagggtagcttcaggcagagggaaaggaaatgttttcatagatctgctgggcatttggggattttgaatttctttggaattcagagaccttagcattttgtggtatcccatcccctttgggtatctttatgttatgcgggttcccatttgctttcctctgtgtagctaattaagcacttcatgcattagttgcatagaggctaattacgacagatgatgttttagctatggcacctgtatgtagagctccctgtagacaagatggcctgtttgtttttgcagagaccaaacaatcttaattttgagaataccaa

SEQ ID NO: 6970 - DNA, 1025 bp, Homo sapiens
agcagtgtgagaatgtactaatacagtgttcttcaatccttgaggatcccaaatggaagcccagggaatggtagctggggacaaccccagatgttcaccggggacagggacattaagtaactggtccatgattcacacaggtaattagtgacagagcctgaatttgaacccagatagtcttactcaagagccctttctctgacctgtggtccttctagattctccgactcttaaagtcttgtaataaatatcttacacgtatatcttatggtttcttcactaagaatgtcactctgtacctaagtgatactaacttttggcaaacaataattccagaaaaccatagaatgtatcatcttatggtgtgaagtggtagtaagggcactggattaagaactaagacttggtcccctgttaaccttggacatgtttcttacctcccagagcctctgttttcctcattggcaaatgaagggtgatgactccccttacatacctggctgtgtggttctaggggtcaagcaagacagtttgaagagcctgaaaagcactaaacgtttatgagcacataaattattatcactatacataggattgtgatctattttgttccaaatatgagaacataacactttttttgaatttgttaaatttgttaaattttcttcatttttttctctctctctctagactctctctctctatgtatatatgtatatatactgtctctctctgtctatatatatatacttgtactgctgaacttaaacatatacatatacatacatacatatatatgtgtgtgtgtgtgtgtttaaatttaagttcaggggtacaagtgcaggttagttacataggtaaacttgtgtcatgggggtttgttgtacagattatttcattacccaggtattaagtctagtacccattagttattttttcgaatcatctccttcctcccaccctccacccttggataggcccagtgtctgttgttcccctctatgtgtccatgtgttctcattatt

SEQ ID NO: 6971 - DNA, 1041 bp, Homo sapiens
ttccttaagattattattttgagttccttttctggcatttgtatatttcctcatgattggagtctgttactggagaattattgtgttcttttggaggtgtcatattttcttgctttttcctgtttgatgtgttcccacattgatttctacatatctggtgggacagtcacctcctctaattttatagggcagggaaagacttattcataggccttgggatgtcagtatggtggggtgtgttggttattcacaggccttggttctacgtggatgcagtagtgtagtctccatacggtttcttaagctgtgatccatgctagtggcatttgtgagtatctcaggggcctaggctaagagagtttgtggtgatcatggtgctgcttttctgagggtggactcaccaggctgttgctcagattgggggcatgtacatgcacacagtaggtaggccaattaggggtctggcttgctgagactgaggacatggaactgttactctggctggggacatgggcgggtgtgtagttgctaggccagcctggggtgtgtttgctggggggtggcctatggggctgtttcttaggccctgagcatgggtgtgtagctgcttttccagcctggtggcatgttagcttcttggtggctcaaggacctctccctctcaggggagggtttggctggctcaaggatgggttcaccctggccaggactgccagactgttcctccagctgtaagtacaggcagtggggggttggtttccccactgaacaagaccagagtcatagccgatcctgggctcaggttccacgcagttgaggtagtggcattcagccacttgtgtgggcttctgtgaatgaagatggagccccaatgctgaataggtgcagtggctacttatccccaggggagggcacacttcagagtggctctggacttaagagagtgctgtactgcagcagcttggctcacagtgggtgagtgggaggtggggagtgcacactttgtcctccaatctggagtaatgcagctgcattaattct

SEQ ID NO: 6972 - DNA, 1699 bp, Homo sapiens
gctctgggatccatgtttaagatgaagactacatgggcagggtggtgtgtgcttgtaatcccagacacttgagaggctgaggtgggaggattgcttgaggccacttgtttgagaccagcctgggcaacatagtgagacttcgtctcaaagtaaaagagaaaaagatgaagactacactcaggaaagctaagcagagaaatggaaagaaaatgggttcctgcagatgtggctacatccttgatcaattcttggcccagtaagagattatctccagatctccagactttccaatttcataaatttattttattgtttggtaacaagtaactgttgtgttacttgcaaccaaaagcatccttactgacctacgttttcttcccatcccttgggggttgctgctctgcagagggttatctttggctcttttcttctcacttccatacttgccctgggcactttggttttcttctatgacttaactttcctttgttttctccagctcacgcatctctcttgcattctctatctgtagaactggatgcttgctggacatttccacttggatgtctgggtagcaccaaaatcctgatatgtcccaagatgagcagaactcatcttcaccttgtaagctgcttttcctcttgtcttctctcttttgtttgttgattagcattgccatcatcctggtttctctagctaaagcccgggcaagttcttgtcctctccttctctctcacttctccccctgcccatgaacttattcactcattctggttaatactttccccctagttaactctcaaaaggatctgccattatccatggtcactgctattgctctagtcatagcaccaccataccaatatgaaccctctcaatacccctatctctaatcttgcccatccactcaagagccagagggatccttccaaagtaaggtccttcctttgcttaaaatctttagtgactctttatcatccagagaatcagcaacacttctcataatgtggcccagacccagctcagggtttctttcccacttttcctcccatatcctggctttatttacaattcacggtgttataagccatccctgctctccacgacatttgcacgtggttctttgcatgtgctgtgtcctttttctgaaatgtcctccctcacctcctttccttttatcttcttggctatcttctgtttgaccttcaggactcagcttagggggctactttcttctggaggcatctacagatccctgccccaaactcataccagctgatatcagctcagactggtttataatggtatgtgagagccaatactgggcatctctttccagctccaagttcagtgatttcaccttgatagcttaaaatcagaacggtggaagtatttacaccaccgaaatctgcaaatgctacaaatcagggtgtttttgtttgttgatttggtttttcccagagaggcagtttaccagcacaccagtgggcataattgcccgttgattttcccacttccttctttaactggtaagacccttcgggggcagcctcagcagcccatccaccctctgcccccagtctctgcacagtgcttgatctacaatatgatgcaggagttcaggatgatgtgggcatgccaccctcctctttccttactagtttgccacacagaaactaaaagctggcattttcttcct

SEQ ID NO: 6973 - DNA, 1058 bp, Homo sapiens
agcagtcccagagtatggagggaagactacatgtgtaatgtgggaactgtgctggcctcgggcgcaggggctaagctgcctagaagatgttctgatgggctcctttccccaggatgcctaggaggtacagccttggaagcccccatgtttctgcgtcatcatcatcatcatcatcatcatcatcatcatcaaaggccagagagaggatctccagggggattttgtgaatccaagttccactgatctcaactggaataacttttgctcttggtcctttggatgggccacctgggatttgtctggctgtgtgtatcacctgtgattttacacatccatcagttaaatcaaagatgcagacacaaagtcgagagccagggcatgttgggtggattcatgacactctctgggggactctgggtacttaaatgaatgaatggattttgttcaagacataaatataatcttttcatcagtgacagctatgcctagaatctctcaccaatgtgggctggctggctattgagctgaattgtttttggagaaacttgctgagatatcggagggtaccagggcagctttggggcctgggaggctggcttgctcacatgaacccaaggctggtgctctgggcagtagatggacagggcagtggggaaaactgactccattttaagccaaaggtgagcatagcctgagcctgtttaatcaacaaatatttattcagaacctactacatgccaagttctgatccaggttctgatgatacaaaggtcgctaagacatgacccagcccccaaggcacttgctatctaaatggctacaataatatgtaatattggaggtcctggactctgaaaccatgctcttccaagttcaaatcctggccctgtcatttactgtgtgatcttaggcaaattactgaacctttctgtgttccagtttcttcagctgcaaagcagggacaatgatggtaggtttgctatgaggattaaatgaactaatgtgtatgaacagtttggcacagggcctgtttcatagctagtgctcactaagggtct

SEQ ID NO: 6974 - DNA, 1030 bp, Homo sapiens
tcattgggtatgactcacagtccataagctaaatattatgatctcccttttacagatgatgacacagagaaaacttattgaagagtgtcccttgaaagattcttgttttccatatcaaagccatcctaaagtgggttgtcagggcacatatttggagtggttttctgtttttgtgctcatctggatctcccacacatttctcccctggtgacgaggagcctctgggctatcgtcctggacattggtgagtccagccacagtgtggtctcagtccagggcctggggtctccaggcctggaaccaaaggttaataggtagaaggtgagtcagtactgagtctcctgcctgacagactgggaaacacatgcagacactagtgtccattccctgggcactctcactgattttgatgagtatttacagaacaggccttgctaagcatgacttacctttcttaaatcacaagtttccctacgattttgttatttacctcagtttgaccataaaaactgcagactaaatactctcccaatgtactggttatctgttgctgcataactatacatataggcttaaaacaataatgaacgttctttatgtctcacagtttctgtgggtcaggaatttgggagctgtttggctgggtggttctggctcaggggctctcatgcgttgcagtaaagaggtctgctggggctgccatcatctggaggctctacaggggccccacttccaaaatggctcacatgaggtgggcaagatactgctggctgttggcaggagacctcagttcctccccaggtgcacttctccatagggctgcttagtgtcctcacaacatggcacccgaactctcccaaagtgagtgagccaattaagggcaaggtggaagccaccatgtcttttttggcccagacttgaaagtcacacactattgtttttgcaatatcctatcagttacacaggtcagctccattcagtgtggaaaaagattacatgaagacacgactaccaggaggtgggagtcact

SEQ ID NO: 6975 - DNA, 1125 bp, Homo sapiens
agtcaagcctgattaataataagccttaagcagaaaaaggtgagctttaggacagaagtctttgggtcaccctaatgactcttgagaaacaaattgccatctataaacccaaatatttatgtcctatttccatgctggcttacctgctttcagagcagatagcaggttaaatagcttgttttccaaattctaattcaggaatataaatatattcaggattttcatgagatagaaaggtgagctggatgcagtggctcacgcctgtactcccagcactttgggaggccgaggcgggcagatcacctgaggtcaggggtttgagatcagcctggcaaacatggtgaaaccccatctctactaaaaatacaaaaattagccggtgtggtggcaggtgcctgtaatcccagctacttgggaggctgaggcaggagaattgcttgaacctggaaggcggaggttgcagtgagccgagaccacaccattgctctccaacctgggcaacaagaatgaaactctgtctcaaaaaaaaaaaaaagattaaaaaagaaagaaaagtgaacttgaatctgagacacacattttcccaattaccttgatcttagctctgcctgcctcagaagcaggagctgataccagcgcttgtgggatgtgtgagagctggtgttaaatgtttgtcactgcatgcacttcctgtactgttcgtcttcaagtttacctttctgtgcagacactaagccatctcacctgttgccctcaattgggaggaccactctgaatggggtttccatgattaccatttctcttctatttagagagaatctgccatcttaatatcctgaaaaccaacagacttgaagaggctgcagactgcactgtacgggaagccataagcagaaggaaaataagcttagcaaagtatagaggaagttggagcaggggggtaggagaagaggagaaaaaagcagcttgaatttcagcttttgttgaaggaaataattgaaaattaaaatcattttgattttcctgggaaactgaattgactgggagctcacctgatatgtgaaaagcaagctcgaggttcacctaccatgccgaatgtgttctggtttcccaccagccaccccg

SEQ ID NO: 6976 - DNA, 1031 bp, Homo sapiens
ttcctttgatgaacagagctttctcttaagtaaacatttaagacctaattggatcattggtgtggtgtcacagtaattaatgcacagcctggagtagttacacaaatgttggtctgagcaataccaagtactgctgagaaatcagaggggcccgtgggatccagccaatgagcctggtgctcgattgttcttggtgatgaggaagaaatagcaggaatatctccaggatacaaggtgtattattcaaagattaagaaaaaatctcaacaatggctgaccagtgattagagctttattattttgtttagctaagaatagattaaaatgaccccaaagagagagctcagtgttctcattgattttatgttttgttatttggttgagattggggtgcagaaaccaacttgagctagtttaagcccaacaaaggaattcactgtaaggatgcagaggtttttgctggaacccaagagcagaagtacagctaggcttctggaaaggaatggtcttagtatagggaagctgggtgtgttgtctctatctctcctgcctctgtgctccaaagagccactacctcattttttccctctccctggaaattttctccactggtgttgtagtaaatgtctaatactcaattctctgatgaaagagatgccccgatttgcagtggttgccaatttccatggtgtaaatacttccaccatggctgattcaaagctaccaatgtggaggcagagttgggaagagatgtgcaatagcttatgattatatagtattcccaccttacagatatatggctgtaaagaatctcaggagcatagattataataaactataataaaataattaggaagtggtgcatttcagtacttattacctttgttttaaatataatttaaatttatataatttaatttttaataatggttgtgttcacaatttggcttgcagaattcctgctaatttaagaaatcagtccttgggagctggtacttatgagctgattctagcataccacatttcttccc

SEQ ID NO: 6977 - DNA, 1033 bp, Homo sapiens
caaagtggtcagaaaattcatttagctgctttggaaaaattctaatgactccaaaaacataaagcagaccatttagagtcatttaaatgtggttcaacatagtgaacacatactatctcccagctgttcagcttttaaaaggtgctggcaatactattttgtcctttttttttctttttatacttcttatggttaaaaatagcattggagtttcaactgatgatcttcagagatttatattacatgaaaaaacaaaatctaggaaagaagtaatatctgactttttaagatgatgcctttatttcttgatttctgaattttaacgtataagattttgtttacatttttcttttcaaataaaaacattttttttcaaaattttaaaatttacattcaatcatttggaaacaatgagttttatgaccatacaattgtatttcccattttgcttttgccacgaggaagctctgagcccaaattgtggctggcttctagcaatttgtaggaccctgtggtgcagaaccaggtgtctagaccctctatgccacccccgcttaccctattcttttctatttgttaatggttttgtttatggatttctatgagcctccctccaccttttaaaaagataaagtgaagtgtatagtgtgtgatactaaaaaatcatctactgataaaatggcaaaggacttcccagccccttaataaggcccaatttttctgctggagttgaggtctcccacccaagcatctctgcttcatttacagcccaccccaggacctcacccagagctgagccctccagtgcccagtggggagagtggtaaaaaagagagggatgataaggtggctgaggaatgcttagcaaggaggcccaggaagctcactttccaaaggactcttaattgtgccgggaggaagcaatcctcctctctgtaaatgaggtcttgtgagtgtcccggctgtggaacagggccttggcaaatgagaagagcctttctggctggcaggtgggggttctgcaccagctcag

SEQ ID NO: 6978 - DNA, 1050 bp, Homo sapiens
accaccaccattaccatcaccatcatcacactaccaccaccattaccatcaccatcatcacactaccaccatcattaccatcaccatcatcacaccaccaccaccaacattaccatcaccatcatcacgccaccaccaccaccattaccatcaccaccatcacaccaccaccaccaccatcaccatcatcacaccaccaccaccaccatcaccatcatcacaccaccaccaccaccattaccatcaccatcattacaccacccccaccattaccatcaccatcatcacaccaccaccaccaccattaccatcaccatcatcacacccccaccatcattaccatcaccatcattacaccaccaccatcagtacaccaccaccaccattaccatcaccatcatcacatcaccaccaccatcacaccatcactataattaccaccaccattatcacatcaccaccattatcatcaccatcatcaacatcataccaccaccatcatcatcacatcctcttccttgatgtcttatctccatggcgtgtacactggatgtagaatatagtcttgctgggtactacgggagctgtatctcagtagaaggaatgaagactagctcttgataagctgaaaatcccttaatagcctacattctaaatacgcatattcattgtaccaggggtttctaaccttgctttgatgatatcctagtgtcactgtctcaaaaccaaattaattttggacttgagtatttagcgttgggagaaggagtaggattgtatattattataaccaacattgatgtgcttttgaattccaaaaggacgttttatttctttttattttttctagagacagggtcttgctgtgtcacccaggctggagtgcagtggcaagaccatagctcactgcaggctccaactcctgggctcaagtgattctcctgcctcagcttcccaagtagctgggactacagaggtgtgccaccatgtccagctaatttttctattttttattttgtagagatggggtcttgctatgttgcccaggct

SEQ ID NO: 6979 - DNA, 1045 bp, Homo sapiens
tccagtcctctgataggtggagtcgttcatctctgcagtaaaaagctaatgcttagtctagctttattcatcctttttggcacatagggtatatacggtatggctccatggagccaaccaggagcctctgcctggtggaatgatctgtgtgccaggctggaagagacagacactctgtttgaccaacaaatgtatagaaaatagtggccagtaagtagcaattacgtaataatcttatccaaagaaaatgtgggctcaaattaagatgatttcaccgggaaaacattaaggtatacaaagagttcttaataaatagaaataaatagtgcagggtttgcgccatggtgattttcgatggttatctgccctcgccgctgctgctccagctgcatcttccgcggggctcagcgcagcattttgctctacaaaaacaactagctcctttccagccaatgattacttgtaattatgctttcccctgctattattctaatagacctgtcatgttgctcggaggactctggcatttggaatatacgacggcttttatggatggactgctggaacacttaatatagctctatttttgaattatcaagttctatccttttgaagtctgtgttagtggaactcctatttatgagatgtgctgtgcttaaaggtttgctattgatgaagaggtccaacagagcctttatcgtaagtacggcagcattctccctgagagataaatagccgtgctaaaaggtatgctgtgtacctaggctgcaaattactagccaagtacctcataacagtatacttcaaaaatacctttatgcttcttgtttgttctcttttccatagagatgaatgacatttcttaaaacacagaggggtggaagtgtgttggtcattgctggtcatcgacattaattgggtttgaggaacatgtttgttctggcacagggtgtctgagtagatgcacgaatgtggcttacatctcctgtgcttgctgttgtgagaatttgcttttctttatgttcccttaacctaaaggtggact

SEQ ID NO: 6980 - DNA, 1034 bp, Homo sapiens
tctagaactgtgagagaataaatttctgttcttcataaattacccactctcaagtattttgctatagcataatggactaaggcaatccccaactgaaactctgtacccattaaacaactcattattccctcctccccccagcccctgacaaccactgttctctctctacaaatttgatgactccagatacctcatatgagtggaatcatacagcatttgtcctttttcttttggtttatttcacttagcataatgtctgtaaggcttatccatgttgtcgcatatgaagaatttcctcattttttaaagctgaatcacattccattatatgtatgtaccacattttatccattgatgggcacttggcttgcttctaccatttggctattgtgattactgctgctatcaacatgggtgtactcacttactgcttttgtcattcacttatgatatttgtttagatccattagttcattatgggttacaaaatggtgattttctaatattttctctttaccagttttcaggataatgaagtgatagatcagtattccacaaaggtgacccattttttttttaaaccaacttttttttttctttaaatagctcttcgggttggcttctgtatcctttgacacaattccaggagccttttatcactactttgtttcctggcagaaaaagatgtaccaagctaatattgtgcattttctacccatccctcaaatccatcacttccccaataagacctggttgctttgggatggtatttagagactatatctgggcacttggtgtgctcattactaggggattgtcattgtttctaggtttttcagtaaacagagctaaaatatgtattttttaaaagataaattatgaagtcatactgttattttaaattcaaatttagagtcacagtgtttctacttctttgattctatactgtatctcttttatgatgaaaatcttcttttagattaacataattatttattttattctagactgtattactagtggcttcaaaataa

SEQ ID NO: 6981 - DNA, 1074 bp, Homo sapiens
gaatttttaaagcaaaattcttagtattttgtccttacattcacttactagatagttattgctgatcaggtcttggaccaggcccagggagatgagggaataaataagacaaagtccttatctcaagtatttcatagttaagatggaggggacaaattttaagataatgcagtgagaacacttaggcaaaaaaagaagcaaaaactatccaaatagaaagaaataagtaaaattatctcgatgtgcagatgacataatcttgtatatagaaaatcataaggaatcaacgtacacacaaaaaactattagagctaataaaagagtttggcaacattgcaggatgcaagattcatatacaaaatcaattatctttttgtacattggcaaagaacaattaaaaaatgaatttaaaaattccagctataatagcatcaaaaagagtaaaatatttaggaataaatttagcaaaagaattgtaagacttgtacacaggaaactacaaaacatcattgtaagaaattgaagaagacttaaataaatggaaggacatcctgtattcctgagttagaagacttaataaatggcaatactctccaaatggacctatagattcaatacaatccttatcaaagtccaagctgattctttttttattggcagaaattgatgagctgattcttttttaagtcaactggtcatatcacatgatgagctgattctaaatttcatatggaattgcaagtgacccagaatagccaaaacaatcttgacaaagcagacaaaaattggaggactcacacttcccaacttcaaaagttactacaaagcagaagtaactgagagaggtactgatatatggctagatatgtaaccaatggcatagaactgagagtccagtaataaactcatacattaatgattaattgatttttgacaagagtgccaagaccatttcatagggaaagaatagccttttcaacatatggtgctgggacaactggatatctatgtgcaagaaaatgaaattggatgtttatctcatatcatatacagaattaacttaaaatgattaaa

SEQ ID NO: 6982 - DNA, 1055 bp, Homo sapiens
gggctcaagaaatgaagacgatctctggctaatagcaggtgcattttaatcacaaggcctatttgatcatgtatggcttccctgtgccttacaaagacagagttttaaaagtgtgtaacattagaatatgcaaagcctcggccattccaccctgccccatgaagacttacacgatcccaatgcttaaaatatggagagaggaacaattaacattatgtttccagtgcgtatggtggccctaagtagcttatgggctctgtgtccacctagaagcaataaagtcatgttattatgcattaaataaaagaaacatcttaatcattatatatgaagatctcttttccagtggtcggcagaacgaggggtaaaaccggcttttctttcccttcacagctcacttgagaccgggagaacaggcagagaagcctggaaatccggatggcttctaattgtctctttacagccaactaggctaccaaaatgattgtctttttctctccaagccttactgacctgtggctaatgagatttgtgcttcgattagttgtagaacataaattagctaatcaatggcaatggattcacattatttctcatacatgagttccgctgcagtgatctgtatttaatattcaaatcaatttcgaatgctcaggatgattccgttaacgtggcatgctggaagctggcagcatctgtagcctcctggccgatgaggactaggccaagcctggatgatacacctgcctctcatcggcttccagagctttgcagattgccttgccttccattacacagggtgaggggcaaatggggttcagcagaaagcttgtggaaaaagcaaaagaaaatccaggagcacgtacagcagaggtggcctctttcctgaacaggaaatcaaaaagcaggcgagctaatttcaggtttctgatgtgcaaactttgcaaagagcgaggttgtcggtcagcgtcttcacttttcagcaccgagaagcatatttttgctctttgctgtaattgtctcatctgtacaattaactggcatcttggcataaa

SEQ ID NO: 6983 - DNA, 1024 bp, Homo sapiens
taactttgatactctcctgctcctacgtaaaaggtgcatttgggtgtgttccagagccattctccccttttctgagaattgcccttcacctccgctgtgtccttgcagccaggattgttctatgtgatttgtctccttgagcatggattgagccagagtggacactgaacccaagatgagtcttcacatcctctctaagaatgtgggttgggattccaagatgtgcgtcagtcttcactgtttgcttaaactcaggatgtttggagtcaggtagtggggaatgtctctgtttggccacatgatgtttgaggcagagaaaagtgagagttgtctgcagacccaggtggagaccaaatcctcaggtcctcatgctgcttcctcctgaggactatagtaaagctctctcttcccctcccgagagagtgtgaatgggtatctgtttctttcaagaacaggggtgcaatgtgaagatcacattaaactatgtctgtggaaagatatgttctgatctcaagacaaattctactttacaatgctttcaaagttaataggtagtaagccgttgcatgctttataatttagggttaacactaggatgaatcctctgcactgtgttaaccggatagaagtatcctttatttcatggagaagacaccatgaaataccatgaggccatgtccccacatgggtggtacttgtggactccagtgagactccctaataaagcccagctccccatagactctcagtcacattgggttgagttccattagtaatgtctggccacaacaaagaagtgggttcaataggttgctgtgggtcctttgtgaagaactgctaatctcccccaaattaccgccctttgaatctctactgcatccagcttttttttttttttttgtagattggctccatttaaagcgattaaagtggagatctgattggataacttcatccaaattctgtaaacgccacttccgcacaaacggttgcttgcaatcaatttaatttttcaaataaaatg

SEQ ID NO: 6984 - DNA, 1038 bp, Homo sapiens
accttggcctgcttcctgagcacggaagccagaatccaattccatattggccaagatcctgcacatctataatgctaagaagcttcaaggatcttattagcactgggaggttggggtgaggcttgtaaatacactaagtaggatgggtaatagttaacctagttaacctagacaggtatctcaaagcgcctcggtgattgtttctataaaccttgctccaaagagagtttcttgctgtgtatctgttgtcattcagttctaagcattcttttaatgaactctttcaacagatcctaatattttaccctgtgtccttcttgtttctttttttatgttttaagtttatttacaaacatatctagtatgtcataggagttcgagtttgatccatttttcaaagagcttgtacctctccattatttgttaaacggatgaatgaaaacatccttattttgtttttcattttctatttttatagatttagggcatacaagtgcatttttattacaaggatatattgcacagtggttaagtctgggctttttgtgtgcccatcatctgaatagtgtatgttttatccaagaggtactttctcattcctcagcacccaactcccatcttcccacatttggagactccagtgtctattattctactctgtatgtccacgtgtacacaccgtttagctcctacttatgagtgagaacatgaggtatttgactttctgtgtctgagttatttcacctaggatgatggcctccagttccatccatgttgcttcaaaaacaattatttcattcttttttatgactgagtagtattccatggtgtgtgtctctacacacacacacacacacacacactaatacatatatgtgtgtgtgtgtatatatgtgtatgtatatgtgtgtatatatatatatatacacacacacacacagatataggcattttctttatctaatcatctgttgacggacacttaggttgatgactttgctactgtgaatagtgctgcagtaaacatatgagtgtgga

SEQ ID NO: 6985 - DNA, 1051 bp, Homo sapiens
gtcttccccctgaaaacacacaactccagtttctaatcatgagataaacaccaggccagtccagactgagagacattctacaatacaggtctggcactcctcagtactgttaaggtcaccaagaacaaggagtgtctgagaaattgtcgcaggcaagaggagcctaaaagatatgaagactacatgcaatgtgggattccagatgggatcctacaacagaaaaaggacatgagctaaaaactagggacatcacaataacatatggattttagttaataataatgttttaaaaattagtgacaatacctacctatttttgagtgctcacacgtgccaggcactgtgtgtagcatttgacagggaccgtcacattcagccttcacatttgctagccaatgggaagcgaggcatctgacaccatacacccgacgctgtgtgcagactaagcctttgcccctgcctctaggaccagtttggactcaagatgggaaataatcccaagctgtagcacttacatccattttctctttctcttttgctaacaaagcctcaattttctttgggctggctatgtggcgtcctaaaaagcttctacatattttatcctgtcttagagctggagtgactgtattctatcagtgaaatgtgagtagaagcctttttggggggttaggggaaattttttgccatttaatgttggtgttgcccttcttcccatccaggatatagatgtaaggctggaggtggagcagctgctcggcgatctgtggtgacaagagtggtgatgagaggcacatgctgaggatggctgagcaggaggacagaggagccagggacagtgccgccttcttagagctcctgcccaggccctgagcagcccacctcactcctggtacatggatcccatctctagggctctgccccagctcagctttgctgctggctctgtactgaccagatagttgattctagtaactaaatttttactttattttccagggactccggttcctgatcttgtcttctctttgcctcaggtgtctgccaagtt

SEQ ID NO: 6986 - DNA, 1035 bp, Homo sapiens
atgttaaatttcatgaatcagacctgaaacacttttttcaggtagtggactctctggttgaaggtagaaagctgtaattaagcatgatcaacctaatgaatcacaacagaactagagcatgctaggatgtctccccggctgtgtcccccttggctccttgatgataatgtgtgacatgtttgcatttatgggcatacaggtttaatgtgtcaaaactgtgcatcacatgggggatggattgcctcattcttgaggacttgggtggtataaataaagccaagtctttcattttgaggaggtaatggaacccaagaatagagagtatgagaccaagacctaagttcaaatcttccctcagacccctgagcctctctccttaaagctgctgtctccacccaacgcagggactttgtacaggccagaccctctgcttggaaggttctcagcagatctgctcttaggggacattaaggcgttcatggaatggaaggggaatgacctggactgagcagggtgtaatctccagccctggttgcatgatgtggatttccttccttctcctcattggaaaggggagctgacctgggtgatcaggagggcaatacttattgaccttgaaagctgcagggggccaggcttgaggggattgatagtgaaggaggcaagacttgctcagaacaagctgtcagccaagagaaggaggtataggaatgcagctaggggaggggagatgacaggggtgcttggaagcttggcaagagggtgctaaggtcagaaattttacccaggacgtttttgtctacacaatggtaagagtgtaactcctcgctctgaaatataaaaattatcaggtgttttatacacctcttttagatgacccaattgccaagtaatctgaaaacctaaggggtaaaatttgatttaacaaaaataatcaaattgattccaaagtaatcatgcctgatattgagggccagtcctgctaagttgcttcacaagaagcatctcatttacttctcactacatctctgtgag

SEQ ID NO: 6987 - DNA, 1094 bp, Homo sapiens
taagagcccagacgtgggactggttcaggggccttggatgccatccctaaattcactaagggaagagtgggcagggctgttagaagctaaacccccaggcttgtgggcttgttgtgatacctcacagataggagcacatgagacaactaggaaggagcttccactcctgagtcctgtagacttgggagctcgtcctaagacacagaaggacttttgtttcctgcattgtcttgttgaatcttcctcgttaagtggaggagtcaaaagcatcctcctattgttgactcttcaggctttgacaggggctattagaggcatctaggctaccctttcccacagttaagcccagtgtccatattttaggtgggatgatgagggataggcatgtccaggaggaaatgaagggaaggtaatgagtctgagtacctagaaacactaagggtgttaagtttggagaagatttggggaagttaagcacaattatttgtttcaagtacatgaaggaatgctcttggaagggagggttgatttgcttcttaatgactatagaaagctgaactatgaccaaatggtagaccagatgagccttgagctacctcccaagatagagattctatgactttctatgcacaagtcccccttcttaccctttaattcctctgattgccttcttctgactttcctgtcccatagggacaaaaatggatcctcatactctaatgtctgtattaaaaataaaataaccagagatactattataactggcacaggagctacaagagagcacaattcagttgcttcattttcctaataatggataaaatcacaccagcaatttcccgttgaatacatttgtcaatcaaaaacccaacacttagagagatcccccatagtgtcctccaggtactatctgtaagtgagaggaagcacacttctcggcattgttataactggagcaaataggctgagagcttgtttaattttttgaaagagggttctccagcttttggctggtctaatgaaaactggtctgtgtctactttggctgaattctttgcacaatgacactgcccccagttctataatttctgcta

SEQ ID NO: 6988 - DNA, 1070 bp, Homo sapiens
gttcttgatgattcacaacagcaccttgggtagcagctggcatccctcctctctgcactgtgagggaagtgattctctgctccctagcttttgccccagtccacttatttgcctttttagttcaatgtgaaggtgtttcaggctataaagaactatcctatggttcatgggcattaccaatccacatttctatgttcttggccatgcatcttcaataagaaagatcctatcgccaaatgctttcaaaagaagcaatctcagtaaatgaattatgctctaataaaaaattgatgggatataatatctgaattaggagatctgaagaagcacatgagaagaagaataaagttctaatggttgctattgttcaggcagtgcccttcccagatcttccatcagccgacacagagctggagggccctttatttaaatgttctgagtcaccgacacggcctccactatgtttgtaggtagatgaaaaatgccttctattaatgagtgttcttggacttaattaaaattgataccactttcctcttaataagaacagaaaatggtcccaaatttgaatctgttctcgtgaagaagatagcatcaagaactgggaatgaaacaaatgcaatttttttctcattacaacattcacattttgacctcaaggactttcttagggccctattcttcgttccctcctcccagccactgcttttactgtgcaaagcaatggtacaatttttccctcttgaaaaagaagtcgttgccccgacgtcttgagttgtctgtggggctccagggcatcctctaagtccctaaataggttgagttgaacaactctgcagtaggtgagaaaatattctgccattcacgggatgtgattttgcataaaatggctactgaagaatcctatatagaagcaagaataggatgcatttctacctgctggtggccacattggcagttgctgcattgggctcacctggaattttgggttatgatgatactgcatccgttggctttaagtaaaagagggaggggtgaggcgaaacccaccaaaatccctaaaacctttt

SEQ ID NO: 6989 - DNA, 1087 bp, Homo sapiens
aagtgctcactgaggggatatctctccttggttctggcgttaacttgctgtgtgatgttggacaagtaacttgacatttccagacctagatccctgaattattagaagagacaaaagacaaaaaccctccaaaaacccaggcttgatctagaatacgcaggggccgcatctggcccaaggggacctgatttcccctaggatgagtatctcattaattggcctcaggatggtgggacctggagggcttttgcttcctggtatgttccagttctgcaattgttgatggaatatgccctgaacgtaggctctcgagacaagctgttatctcattactccctgggaggaagaactccctgtcctttcgttttggggactggccccccttggtgaggacttctagtgctgcaggtatctggtggcccatttactgtcctcaccagccctgtgtggaggctgcttcagcttcatgttgtgcacaagaaaataaactcagagagatgaagactgaccccaaaacactagttgatttgaaccaaggtaatcttgactccgaaacccaaacttcagtcattctctttatgattgttgccctgtctatatagcatctgttctattgcctactaaatattttaaaatgaactcactatttgtattacttttaaatggcaaaaaccacaattacttttgcaccaacctaaatacttagattccttttaaaaagatttcctttaaaatcaaatttattttgaactatgaatttgatgtgctatttatatttttactgataaatatcaaaacaaagtaaaaaggagatcgttatgtgcactctcggatatcatcttaaaagccggtgagtcatcaatgttgctcttcagagacactgctctgtgctttgtcccagctaaatgtggctggaggcttggcatcaggtgggtcctttggacagtcaagcccttcctgtgggcttggggaccatttccagtttccatttgtctctgtgctgggagtaaccacttgttaaaagactccctcccatctcctccccagcttgccccaaagtcagcttccacggctgctagatcagctc

SEQ ID NO: 6990 - DNA, 1029 bp, Homo sapiens
acatagcttgctgatattgggtggttgtgactgaggctcacaggaaatggtatctgctcccagtgttaggttatgcatccttgcttgcatgggggttctctttcccattctctagaactgtagaaaaattgagcatctcttatatctatcgagtctgatcttcctaggagttgagcccaagaactgggtcagtgggttgtccctgcagaatgttccttagtggcttcctacacagtggacccagcacccggtgcagccagcctgtcaccgagacagacgggcaatgccaagtgaccctcacctagactcacagagataagtcactacctcctcgcctctctgaggattcgtgcctgttttactactgttaccatcagagttgttctactcttagtcataattgtctcagcacaattggttgagcacttactatatgccatgactttccacctggcatccgcctttaggcattcctttatcatccaactcctgcttcgggaaaatttgtttctgtctgtctccaagatacaaaatcaaaaaggtgttttaatcctgaggaagagtgtgagtctgggaaaattttggatcaccgaggtgcagccataccttccacagccatcactgttgcttacaactcacatgccaagaattgcaagatgaagatggtgatcaggaggcatgacttggtaatactgctgaggctgggagtctctgggaaattctgagtgtgggcaatgattgtggcaatctggttcccacaggcattaatgattttttcttttaactaaaagattagaatttgcaaaattatgttaaaccaattaacaaggggaatggatttaggaccacatgtaaaatgatactttccccaatatagcttaatagaaacatgtcatttgtaggtggaaaaaaccttcatattcatatccccaggaagtcaatggaaaatgaaggtcgatggaaaatgaagttaatatctatgtaaagcttaaaattaaaaagtgaatattaaaaagaaacatgaataat

SEQ ID NO: 6991 - DNA, 1040 bp, Homo sapiens
gacagttgtgtgatcccaatagaaatgtctgcaggcttgagttcagttgagtcctcagcagaaactggcagttgtatcaaggagctgtttgctctgtgctgtcacccattctagccagaggcatcggaaggggcaactctgccctaactcctccttggtcaatgctggcaaagagatgccaacagggtgaggccgatcatggttctcaagatggggccaccctggtcaaaggttcttggaggtctcatgtcctgggctgggggcagcaggaagatcgatgctgcattgaaggcactggccgctagtattcagtaaagaatgggttccatcctggctgacttggaaagttttggacatttccatgtaactgtcatattgaagctggttcactgagttcttcctcggcctttgaattgctgattttttttttccagttaaaaaaggacaagtaaactgatgagctcttgggtggcatgtgctgttctcagccatgggaggtggtggtaagctggggccacacggcatgctgggtgactgttgaattcagccaaggccatgctgagcaggagggggcatggcagagtcacacgtgtagaagaaggtgcccgcctgagaaggtgagaatggaaatgtttccttgatgggtttgcacagctccctggaaagaggagacttgctgagagcagcaaggagacagcaaggcttcacagctgcagcacactgtctgaatcagtgcttgcccctgtggagttctgtatggattttataacaagcctgtgacactggcaccatgtgcctgccatgggccaccacggagacctgccgagttcccatgaggaatttggggtatgggggcctcctgctttggtgccatccctagtgatctctgcttggagctcgtatttctccctttacctttgagtgggaccacgcccctctgcttgcccaaggctccctgtgcctcctgactcttctctgctacctgaaaccctcctcgactcctccctctccctctgcattccccagggtcttcagggtca

SEQ ID NO: 6992 - DNA, 1082 bp, Homo sapiens
ctctgggaagggggtgtcagaaagtaaacctgagaacagctagggctggagggtatgttttcatcttctaggaagttgcagagaacgttggtcaagctgcgagggtgggtgagttcttagaggagtgtttgcagctgtgggaagagtctgcctttgggaagctggcggcgcctgcacaatctctttagtgcaactcagcctcactcacaggctggctgagaggagtgtgtggctctacgcctctggttgttctggaacagtctgagttgggggaagagggtgagagttactttttcagcggaggcaagtgctgtccacactctctctagttttctatccagaccacgtggaagagaataaatgtgggaccattggggagtctccgtggttctttttgggtcccaagccctgattgcttctcatgctatcgctgtggccccagcagtcctcgtaaggagccaaggttcggggggaggtgcttgatctgtcacgcagggaggaaggaacagctgagatgcaagccaggtatgagtgctccccaggggtccccccatatcttagccagcacgtggtggccagatgtacccaagacagttgtctggcagcaccacgggactggatatccacttaaacctgaggagcctggacttgtcttcccacctgggtagggtgtggtattctgcgatgttatccatgcttctttctctggcatttcctcctctccttcttccatcttctagtataggcagcagaagagcaaaaatacaaataatctgcttttgacttccagcagcttaggtcttagcacaggaaaatatttgaaagaatgcaaatcagtcaaagccagttcttattgccctgtggctagataacttttggaggggattgaaagaagaagtgagagaagaagagagagccttggtgcttgtgggaagggaaggagaagcagacccctctctggatctggggactgagagcagaggagacacgcacctccaattcccctggggaaggcctgggaacttgtgaaatctcagtactgcccttgactcattacggtgcaagagctatagggcagaaag

SEQ ID NO: 6993 - DNA, 1353 bp, Homo sapiens
caggacagttttgagagtaaaaggggctgctaatatttatgctggtgcaacaggtgttttctcaggacaatcctagtttaccatgtacatgcattttaaacaaaatctttaatgaagaacataagactttagaaaactttttaacccccaggcaatccccccctatacttcatacttatgacttacaggctgtggttttttagtattttagttcagtatttagttaaaatagaaatttgtgtagatttacctgtatgttttccatttgatttgctcagtttcttcttgtagcatagacacattttctgttatcttttatttttttccctgatgaatgtcttttaaatgttattttactgactatagatctgttggtagcaagcattttattttttgtttataaaattttatgaaattactttttatttcaaactatgttggttacaaattttaggttaacatttatgttctctcagtactgaaatggtatggttccactgtttcctggttgttattatcattgttgagaagtctgctgtcactttaatgtctttgtgggtggtctgtcttttctttctggctgtttttaatattgcgtctttgtctttggtgtcctgcaatttcaatgcactatatctacacatatcttttattctttttggatgtatacttcctggatttatggattcatgtcttttatcaacttgggaaactttcttggccacttttctctgaaaaaattccattttctgtattctttccttctgtgatttttatcagatgtgatttagaacttttaattttagccttcatagatcttagcttctctttcatattttccatctccttgactgaagtgctacactaataggtaatttcttcagctctgtattccaatacactaatctctcttcagttgtgcctcatccattatttaactcatccattgcatttctgatttcaacaatagtttcattcctaaaagttctattgggttatttcttagatatctttggttattttgatggtcttttcttgcttgcttatttttgtaatgccaattttaatttcctttaacagttaatgcaacattatttcatattatctaactagtaattataatttctgaaatattggcagtccaggtttactgttggatgtgtttgctaactttaagtcatagtgacttattttcttgtgtatttggtggtcttttattatggggccatgtttgtatgtgcttaattggtaggaatcctatagatctaaatgctttcctccgaaaagtctttgtattagatttctttctgggacctaaaaacgtctatgaatttggggtcactttagactgtt

SEQ ID NO: 6994 - DNA, 1050 bp, Homo sapiens
acagcgcccataactcctgtgatgcttttagctgttcttgggaataaactaacgacccctctccttcccttctgctgaatgaaacaccggaaggaaaaagtgcaagccaatgggaatcataaacagagaagagagaaatgctttttaaaaaaattctcaaaatatttaaacccagaaaagtgcaaataaaatccagcaccactggccccaggagtcggagcgctggtcttttctgtgctacctgaggtttgagtgtgcagttgcgggcatatgggagggaaggctcctgctgtcagcatcgaaagcagatactcatttaaattccagttgcatgcctgaacgttgtttcttccggaaatgtcagctctcttaattctttccccttttaaacagatccaaatgatttccccttgattgaagtaaaaagagtgtaaatattttagcatttcataaaactggaaacattagaggctactttcacagtcatttgaataacagcaagcatttcctagacattctaatcaattaactttccagggtaatttttcaagggagcagaatggtccaaaaccaggccagtcacactgttgcctgctcacgtttctgtcactttggtcatggggaatttacctataaagggaaagggagacttctcttgctttgaccacaataaattgagtgtgtttgcgaggggcagagtggtggccgtggaagctagcgtgtgtttaggccctgtctggggcacgtggaggaacagctttctccttctcattggcatcaggattaaagagaagaaaatgggttgctgtcttttctacctacgcagcagaaggagcattcacaaatgagaatttccccagccccagcagggtgtctaaggagctactttgtagagtgtaatttcatgtagtatctaaaaaaaaaaaaaaaaaaaaaaaaaaactccttgccagggttccctccactaaaggccatttggaagaacttggcaagcttaacgatgccctgaaaggttgcagagaagaaaatgtatggacatcagcaagtacc

SEQ ID NO: 6995 - DNA, 1826 bp, Homo sapiens
catccctggtccaaggaagggcagggtagctccctcctctttctacttgtctttcctcactacaccttcagggccccgtctatgcaggttggctgagggccagcccaaggaaccaagaaaaatctcctctgtcacaaaaccttgtgccttgttctgttgcaaagttctattttgaaggttagaattgaaatgtaatctccttccttctgtaacaaattctcatcttcccagaagcaaatcgttcatgcaggccaaagagagagaaggccaggtactcagtagaagtaaaaagagaaactcatactaatatttagccaaacatttatccttctatttatttacttgcttacttatttattaactcatgttcaccatttaaaaattacaaaatactgataggtatttgatatgttgcattacaggcttttcctaagtgccttgtatacaagtctactttccacaaaatgagattatgctctacatatcgatttaaagctcactttttgcagtgagtgaacaatttggaactgtaagaacatcttgcccatctagtagacttctccactcttcttcctggctgctgagtcttccatttttttctttctaagagtgctgtcacttattcaatcaatcctttattgttggaccgatcacatatctgaatgttgctgggctgcagcacagctgttttgcgatttggaggaacccaatctttctcctcccacctgtacggtgaatgcttctgctataaccaatcagaataacagggcaaacatctgggtatttgaaacagtatctgatgttaactggacagaaagaccacccgcaaaatgaagttttcatttcacccagatatgtttttccagatatttggaatctcgtagaaggcatcccagagaggccactcctctctttttctggtttcttggacttctgcatcaatttcttggattagggggttgttctgtgtctactcattcttgcttcgtgaaattctagaaattctgggtgcatctttttatctcatcccagagtatgttctgttgtttgattccttcttgtggtagctgagactttaagagtttctttctcaactttttatcttgaaaatctttaattagacaggaaagttgaataaatgtcacaatgaatatatatatatatatacacacacacacacacccatgatttagatcaaactttgtttctgttatctctttctgtataacaaaccaccccaagtgcaatggcataaaaaccacaatttcacaatttctcattctcacgattctgtgggtcgactgggtgattattctgctttacgtggtgttggctggggcactgggatagctggaatgtccaaaatattcttacatggctaggagttcagagctcatggctctctccatgtggctgtttgggcttctctgcagcatggtggctgggttcctagaagaaatggaccaagacacaaagcagaaaccacaaaggcattttatgacctcaccttggaaggacctcacctaggaagacctcacagcatcccctgacacttttgttcacaaggcctgtccagatccaacagtggggagctccatctcttgacacaggtcgggtggagggagtggggaaggaacaagtggcaaggtcacagggcaaaaggtcatgtagacgggggggatgttgttgccttggaaatgtaatctactacagcttttcctctggctacaaaaatttacattcctcccacctgcaaaagactcattcacttcctcccctaaaagtctcatcccattacagtgtcacactgaggctcgaagtccatc

SEQ ID NO: 6996 - DNA, 1031 bp, Homo sapiens
attccagagaaatagaaccaatagggtgtgcgtgtgcttgtgtgtgtgtttgtgcgtgtgtctgtgtaggatgagatttattttaaggaagtggctcacacaattatggaggctagcaagttaaaaatctgcagggtataccagcaggctgaagacccaggggaaactgatgttgcagttcaagtccaaagacaatcaaatccactgtagaattccgccttgctcagaagatgttgttttttgttctattcaggccttcaactgattggacggggctcacccacattatcgagggcatctgctttactcaaagtccaccagtttaaatgttcatctcatcctaaacaccctcacactaacatccagaatagtgtttgaccatgtatctgggcaccacggaccagctatgttggcacataaaatgaaccattgcagccctctttctctgttttgaggaagacaatcatggaggtatttggggatttacacagtacagtgtcattatctacaatgggctctggagtctgcattcgaatcttaattcatttacttaccataagactttaggaaagtagctcaacctcccgcattcactggaaataataagtgctgggaggagtaacaccccaggctgatggggagaggaaatgggaaggtgcatggaaatgtgccctgaaagtgttaacgcatgaagctcaggaaatgagctggatttactattttctgcttggacatgcacttcctccgttgaccccaccagaatggtgtttccagccaggaattcccaatgatgaggctgtcttgggtaccatgggcagctctcctttagtggacatcacattgggttccctggccatggctgatcatgggcagccagagagtggcctaaagtccggttgagtgatgcagagcaggcccgggcgggagcgcatcctcagaagcgatccttcagaggcagcactttaggagtggggcatgtggacaccacctggtggcttgcactacttttttatttttctgaaaaactttgg

SEQ ID NO: 6997 - DNA, 1092 bp, Homo sapiens
agttcctccaaaggatgacatgatggcagatggaacggcctggacgtttcctcttgaattagtgcccgcttcatctaaggtcctcagtgaagggtcagcatggaggtcacaaccctaatgaagagagttgggatcaataaaggcagggatcgttgactcacattcaagccaataagtattgattcaactccttgtggagagaaaaccagccctggagtggggctctctgagactggaacttgtttccaccatttatgaattgtatgacccaggccctgttacctctctctgatctttagtttccccaactgtagaatgggaatgatcataacagaaactcctttgggggttgtggtgagctggagatgagctaaatgagatgatgcaggctaagcgcttggagcagtgcctggcacgcaggcagaaggttggccacgttgtcattggtgcccatctggtgtgagctgtgctgatgccttcttacactaattccttaggtcagtgtttcacagaggcccacccatctcacaggagtcctcgcatgtctgatgtgctgctgacttagctaactctatagaggtaatgctctattagcttgaaatgatcctgccttgggggctggaagacagtgctggcagatccttctcctccatgttgccaaatccttcatctcctgagaacctgtcatctactgcacgtgagaggactttgcatcggagcttccctgatgctcaagggatgttcccagaaacactttactttttaaggctaatgaatcagacttagctcacagggcttttgtgcaaatgttcttagttttcaagcctggctctgcctgggctgcagccctcccttgctagaaactctctgcccacaagcacttactcttatactctaagtcactgccttcctccttccatggaaatccttctttacttgccaggccccacatgaattccagcctcccatggagcttttttttctctacccaacctgcagattaatgagctgttcccaatccacatgggtgatttcacaagtatgttcaccagcaactcagttagatttgcacaaataagaccttgccctgag

SEQ ID NO: 6998 - DNA, 1070 bp, Homo sapiens
ctgaagacctccagaaccttccttttaggaatagatgggggagggcttgggtgtggaagagagatgaacaactacaagggcttagcacaaagggtgctgatatggtttggctgtgtccccacccaaatctcatcttgaaatgtaactctcacaattcccacgtgctgtgggaagaacctggtggaaagtgattgaataatgggggtgggtctttcctgcgctgttctcatgatagtgaatgagtctcacaagatctgatggttttaaaaatgggagattccctgcacaagctctctttgcctgctgccatctgtgtaatacgcgacctgctcctccttgacttctgccatgattatgaggcctccctagccatgtggaactgttaagtccattaaacatctttttcttctcaatctcgggtatgtctttatcagcagtgtgaaaacagactaatccaggtgctctacaaatgtttaagtgtctagcatcagcaaggcctctgtgacgctgggcctgggggagctccacaaaaggctcctgttcatgtctgaccacagaatagaaggtgggcctgcagctgagagtcctgattccattaggcaaggacgtcattatccctaaggttaaggaaaacatgaagtcctggcccatgtcctgcaagatgatgatggagaagagggaacatctcaaagtcactgcctcccttgcccacacgggcacagactcagaggcctgggagcagtgaatccagcaaactctccctccctgctgtgcttttcccatggctctgagcctgatatatggtgttcacattccctaccccaccagcttctcaccccaaggataaaggtcattctgagcttcagcggtttgagctagtaaagatttttataaaaactcactgtcttgatttgtgttcaagtactttaaagttcacatatttcttatttgaactttgctggctgcagtcatttcatccgcaatcagcctggattggttctgcttattcagagcccatcaattacccagaactggactggagcacacgctgcccattcattggcttcgcc

SEQ ID NO: 6999 - DNA, 1105 bp, Homo sapiens
agtgcgggtgagctggtgaatcccaaataagtgggctgctcagggatctctctcctcttcaacccactctttgtcatgcaacactgctctgagtgttaggatctccttcctccttcctctgcttctgttgtgccttttttcttttcctaaaattgttttatggttggtgttttaagatccctttcatgttgagagcccaaccttggggagaatcccaaatcaagctctgacatagagaaactgtggaattgcaaatcaagatggggaagctctatataatgatgaaagttcaagttaaccaataatgaccatggaggtgaggaagacaagatctctgccctaaaggacagggcactgtggggtgggagagcagacatggcataaatcattcagtcccagaccggctgagctgaatgctctaatagaggcataaacagagcataatgggaatgttcggggccggggagagattgataatcttggtttgcaccttttagttctggcttagacaatgaatgcatattcacacatttgaccaagtaaggaactctgatgttttattaagctgctttacagtttccttcgaataataagacaaatgtattaaatctgtttctcccttacaatggtaaattccattttcctgggcacattttgtacgtttatcctgcctaacttgggttctcatccttaaatgctccttatgacaaaagcttcactaaacataagaacacaagttggaatgtgaaatctgtgctctgatcattcagagcatttttgtgtgaagaagttaattctttgctactttcaacactatttctaggattttcttccctgggattttcactaacatttcaggtctttttactcacaagttcaacgtgtgctctcacatcagcatatgaaaatctttttcactaccctcaacagtggtggttttttttttttaaatttagacactgaattctaggttctttcacatgttgctattattgtctttctcttgtgtagcttctgcaaaattggccccacagattgtctccttctgtctcctagggaggtggttaaagatgcagggtctcagcaaccacccctgagattctga

SEQ ID NO: 7000 - DNA, 1079 bp, Homo sapiens
cactctgacccctagaagggccagagtcccagggtggtggactacaataaacacaggaaaacagtcagcatagaaatccctgttgtggtgcaggtaggcatagcccatgggatcttgctctctccccagtctaagaaagttgtacgtttcaggtcctttgtggcgacaaagctgtacttggcatctgtgtgtctactttgtccacagatcctggctgctctccattacctgacccatcctacatctctggccctttctcctgcccctgcctgtctggcaccaggctctcccagcacggtgagctgaagtgcctgtttctggatgctcccccaactcagttcttcctttgtacctattgctccctctgccccaatagcctcaccttgcccctgtatgctcaccatatcctgctcctcctgtagaacctaggaccaccatcattcctccaggagccttccgtggcgtcccactcctacatgggattggttgcctttctttaagctaccagactcctataggctgtgcctccattttggttcttactgtcctggacttgaattccgtgatggtgctgccatctcttgcatagcattgtgatctcttacaggataaggactgtgcagattcacctttctgtttccaaggtggccctgggagcctgctgtgtcttaggtgtttctgaggatttaatgatggagagaatgcatggaacagcatgaacacaccccagtgggcctttctcagcagagaccgtgccagggcaggattctttgtgtctcagaatttcacttctgatagcttaaagcagaggttggaaaactctttctgtaagagtcagaaagcaaatattttagtttttgtgggccagtctctgtcataactacttaactctgccatgtagtgtaaaagcagtcatagccaatacatatacatgtgagcatgattattccaagaaaactttttacaaacacaggcagaaagctggatttggcccagcgcagggatagtctgccaatctctggctgagggtttgaaatggaaccatcttctatgactgcaggtagattttcccttgtcgg

SEQ ID NO: 7001 - DNA, 1052 bp, Homo sapiens
cccgtgctgcccactcagagggcttgctcctctggctttggactcttgtggatatggaaagggcagtggcctggaggtcaggaggccacattctaggtgactgtgggcaggttgagctacctctctgggctcagtttctcctcaagacgctttacgatctgactggcttagttctcaccacttcccacgtgcccccctctatcccccttgtgccttcctcctaacacattctgctggaaaactgcggcacttaccaaatatccatgcacccactgcctgcatttcccagcatctcctgcagttagattgggtcatatgactagctctggccaatgggcgatgggagaaagtgacccatgacacttccaggccatggcagttgagagctgtgtccccagcccctgccacagaagcctcaaaggccatgacatgtttcaggcggacgagaaccaccagatcagaccaagacggaagaccttgctgggcagagccactgagatttggggatttctctgtaaccgctccttgcttgagcttccttgactgggtctcaacagaacttttgctcattctctgggtagctgagtccatccctgcctctgggcctttgtacaggccatttcctgaatgcttttcccttcctgctgttggcaaactccttcccccttcagccccagctcccttctgtgctgtgtggcttctctggccgaccacggccaagttcctcgtgctcttcccaggattactgcagagaaacattcctgcccctggttcatgcataacttcactggcgctctctgttatgtgcctgtctcccccagtaatttgggatgtccacaagggcaaggcccatgtcctctccttcttcatagccttagggctttacccagtgctgggtatatatcaagtgctcagttaatatttattgcatgaatgaatgagtgaacaactggagttggggtccttggtggctttgctctctgagccttgcctgcctcccttgttcccttgttaggatattccacattcgtggctgagcctgtggagcctgg

SEQ ID NO: 7002 - DNA, 1035 bp, Homo sapiens
tctttacttataaacctgcctcccactacgagcctgtgatggctgatactgcaccttgagccatctttgtattcccaacactcagaacagagccgtgcattcaggagtttctttatctatgtgacggttgaattgaatatcctactgcacaccagaaccctaaaccctcacctccttctgctccagtgtgcaaccatatgcaaattcagtgtgtcaatgagatagacatctgcttaaaagtaagatgaatgtgtgtcagtagggggcaataaaagtgggggattgagaaagaaagagaacccagagccaaagaccccacaaaacccaggccccgtgactctcgagtacctcaaatccatggaagcaaaaggttctgagggcctcctggctctacacttcctgcacagctgaagccagctggcgaggtggcagctctctctcacctgtcagaatttcagaacctcattatgacaagcaccacttccaccccacgtgctcctggtgtctgctggaactgctcactgacagtgcttaggtccagaagaactcgaaaatgcttaattggttaaacgaacgagtgactgattaaggaataaaatccaacctgaaacagttgacaaaagtaaaatgatgactctgtcatgtaatgatataggaagactaatgcacagacatctgtggagctccaggatttcaggaatgggtcaagccatagacgccaccaagctctcattttaaggccatggaatctaaagtccggggaggttgtgacatttccccaaaacacataaagctaagttcattcatgtatttaatatttgttgaaggtctgttatgaccaggtacccttttgcatatttggcatgcaacagtgaataaaacagacaaaaatccaggttctcatggagcttccattccagctgggagagagagaccatcaacaataaacatagtaagccacatagcatgttaggaggtgatcagtgtagtggggaaaaagtagaccaaggtaaggggcctaggaatgtgttgttg

SEQ ID NO: 7003 - DNA, 1025 bp, Homo sapiens
gtaggaagggaaataccagtgtgaaacacctatattctctatgcccgtgaaaatcccagagggattaaagagttcagtggtttgttgttgttgttgttgttgtttttaaaaaacacaatatcataaaaaggaactagaattacaataaacatttaacaaaatttgtaaatgaggagggatttctaagttccgatttaatgaagaaaaaggggaaaagagtgagatatttaattactaaaaataaaatttacatgtggcaaacaaaaccaaatcaaaaccaaaactacttaagaagaagtttcccaaaatatgacaaaagattgtgagatttaatatactgtgcattcattcaaattgataagaaattatcatgatcttgtcttttgaaaaacagataattacagccctttaaaatacaaatgactggtatgcactttgaaaaatgtatttaaacttactttaaaaatcaaataggtaaaaactaaaacgtcaatgaaacaaattttaacatcgagctagcactttaaaatgagagttgtggggctggcaaaggtgcagagaactgtgaaatcatatatgtactgatagaaactggcccgatcttttcttttggaaagcaattcagcagtatctaaaatattcatatgcattcaatcagtagttccacttctgggaatgtatcccaaggaagtactaaggaatgtaaaagaaaagctttatgatcggagatgtgtactgtagtattctttatcagagaaaacagaaaagaagctacaaaaatatccagttcctggggaatatcctaaaattcccatgaaccaaggtggaataaaaaataaaaaaactttaaaataaaaaattctaaagtttttaaataaaaaatttaaaaactaaataatcagatcaaaaactactgtatactctttgttataaatcttttgagagttttccttaaaaagctttttgaggtataattgacatacaataaaccacacttctaaaatgtacaatttgatgaagtgtgg

SEQ ID NO: 7004 - DNA, 1047 bp, Homo sapiens
ctgagttggctgacactggcttccttccagagcgcaggggtgcatccttccgaacctcgcattcagtgacgtcaccttggtgatttgaagtaggccctggtggaagtatttacaccatggacatcagcaaatgcaaccaagacctcccgctaccctggagagctgggtttaagacatttgccagcacaccactgcccagggaccagtctcagctccagagctgtgggttattggtaaaggatgtgatttcattgagcctcagtttctgtatctgtaaagcaggaatctatcacttatgaaatatcctgtgcaggcacaatcttaggtgtggaggatacaatacaacgtaagtaagataaaagtatccacctgtgtggagcttgtattttggtggggagacaaacaagggaactataatgatatgtcatgtcataatacatgcaatgatgacaaagccaggtgaaaaggcgatgatggtcattaagttcaagatggggaggggttggggtgagggctggcctgtctgaggaggggcatttgcagtgctggagcaagccatggaggacaggaattgctccagtcagaggaacagcaaggacaaggggcccaagacggcatgtactagaggctccacgcatagaaaaagccagccatccccagcgctgtaactgagtggccagtggtgggaggtgaggtcacagacgcggagggggcatacatggggtgagcgtttcagtctcaaagtatggacagccccaggggcttttgcagaacaaagtgataagatctgatttgccatttaaaataatccttctgagttcctgtggggtaaaagactggagaggagggtgtgtgaggtggggccaggagcccagggagctaggtcggggcccctctgctaagtgaacaggggagaacagtgccttgtggtttcctgacatttaaagtggaggctttaaggtacatgggtgcctcacatcttcaggcattccagacgccgcttcctcccgctcctgattgtacaataacctttaccctctgtggggt

SEQ ID NO: 7005 - DNA, 1075 bp, Homo sapiens
gggacagctctgaggagaaggcactggacagacccggagggataagagggaactgtctgcaggaagaggcggaggaagcgcattccaggcagaaggaatggtagctgcaaagacctcaggaagagagcacttggcgagttcgagggcgtggggtgggggagtgggtacaccaggcaggaacttgaggggcacggagaggtgtccggactttatcctgagtggcaggaagtcagtgaagactctagataggcatatcatgtggtctgatttatatgttttaaagaaatacaaatgtaaaaagtgagacatacaagtcaaatgaaagcaagggagatttcctttgaaaccttggagagaaggcctttacatccaggccttgaaatctagaaagcaaaaacaacgaacaagcagcccaatagcaatatgagcaaaagatgcaaacaggtcatggaagaggaagtgagagaggctccgccttactcaaataagaggtgtgtgatctcggctcactgcagcctctgcctcctgggttcaagccactcttgtgcctcagcctcctgagcagctgggactacaggcatatgccaccgtgcccagctaatttttggtatttttagtagaggcaggattttaccatgatggccaggctggtcccgaactcctggcttcaagtgattcacccaccttggcctcccaaggtgctgggatcacaggcgtgagccactgcgcccagcctgagaaatgcaaattaaaactatatcaagctgccctgtttcatcaatttgacaaaattggccaaaatccaaaagtttgagaacactttctctgtgagagtttgtggaaacagaccctgccacacattgcttgcagaagatacatttgacattatctaccagtggttgcgcttctgagaatttgtcctatctcgtgtgagaaaggacacaagtacaaggtcattcctggcaatgccttttaaatagcaaaagactggaagcagctcagatatccatcagtaggggagttttagggtctgtctgtttatacagcagaataacatgcagtgtaagaaggaatg

SEQ ID NO: 7006 - DNA, 1054 bp, Homo sapiens
cggtctcaaaaaagcaaaaacaaacaaaagccaacgttttcctttttttttaagtttttgttttcttttcctttttaccttaaactatcaggagataaaagccaacgttttacttattccatatctaggagctaaaggagcattttgttgttgaagggtcaaataattttgaagagtgggttgctttgccctttttttttttttttttttttttttgagacagggtctcactttgtcacctaggctggagtgcagtggcacaatcttggctcactgcagcctcgacctcctgggctcaagcgatcctttcacctcagcccccaaagtagctgagactacaagtgcacaccactgcacctggccaatttttgtatttttagtacagacaaggttttgccacgttgcccaggctggtcttgaactccagagctcaacggatctgcccacctcagtctcccaaagtgttgggattacaagtatgaaccaccgtgcccggccatatgaagtcttgtagttgttgaactcggtgtacatgctaaaccaaagcacacagttctgctcaaggagctgtattttccacatctgtttgtattttcatgaagccaacataaaaggattctcatcccagttctgtccctagacaagtcactgaacccctccaaaccacaggtcccatctccaaacagcaggtcccatctctaaaccacaggtcccatctccaaaccacaggtcccatctgtaaatggaaacatgaacccacctctcagactgtcaagaggattcgatgtgaacatgccgttggggctcggtggaggaggagccagtcaccgggcgctgctgtagccactgctggggctcagttcaccctgggctccctgctggtgtaaactttcccctctttctaaaggtgcccctgggcgatacactctgggctcctcctgctggcctccttcccagggcacctggcttcctctcagaatgtacctgccccaacagtgggtttgtcagagacgtggttgtcattgtcaccaccacagcaattactgccatttat

SEQ ID NO: 7007 - DNA, 1047 bp, Homo sapiens
tatttttatttcccctgacagcgcacctcctgacctctatcttcttgccagtgattttttaaatcctaaatgatttggcaataattgctcctccttgcgtgattattgcccttcaccgatagtaaatctgggaatcccctggggtcctgagcgcactttggtatgcggagcccacaagctggcctggacaggcatcactgctccaggcagctgtgcacccagccggccctggcgtcccggcccccagcctccgcctccctcgccgacagcttcccggggctctgcctggaggcagcctcgctttatcccgcagaacctccacgctgttcctgcatgagaactcttcctccaagagaccacgttcctctggtcctgtctccgtgggccacatccacaaatgttccagcccaggaagaaccaagtctgtattctgggagggaaacctgtgtgctgtctggttttgtatgtgggaggagcatgcacacagtttcattttccccggaagcatggaggtgtaggatgacatgtaatatttggaagacccattgcatttccaaggaaccttctagcaggatggccctggagtctctggcagcagtggacatggtcctgaattggagtgctgtgaatgttcactgctgacctcacggtttgaagacaattccttgagaagggcagaggggacccgaatacgggggctctggccggccctgctgccagatgccagcagccgtgggggcttgcccggccagccctggcttttcccaaccctcagagtgccccttgtgcatgcagcagacactggtgctggtcccattcccgggagcacgcggtgccactggctgtgtcttgcctggccaggtgttggtttgatagactcgaaaacctcatttggatttggcaggattttccctaacatcagtcattctggaaaaaacactttgaatttttaccatatctgggtatttttaccatatctgggtacttgccactagctctatttacttcacgtttcttaaaattgattcattttattacttaaataaa

SEQ ID NO: 7008 - DNA, 1069 bp, Homo sapiens
atccgcccaccttggcctcccaaagtgctgcgattgcaggcatgagtcaccacgcccagccattatgatatttttttgaaattttttttaagctcatcagctagtgttagtatattttatgtgtggaccaagacaattcttcttccaatgtggcccagggaagccaaaagattggatactcctgccctggtggatcaaaactataaaacccactcaccacattatagacttatttactaagtaaaggtttgaaactgggtgcagtggctcatacctgtaatcccaacacttcgggaggccgaggcaggaggatggcttgaggccgggagttcaagaccagcctgggcaaggtggcgagaccctgtctctacaagaaatttttataattagccaggcgtggtgttgtgcttctgtagtcctagctactcagaaagcgaggtgggaggattgcttgagcccgaaagtttgaggctacagtgaaccgtgatcataccagttcactccaggctgagcaacagagcaagatctcatcttaaaagaaaaaagacttgcgatgtgtaagacggtatagttagtctttcgtcgaggatgtttttggttttttttttttgagatggagtctccctctgtcaccaggctggagtgcagtggtgcaatctcagctcactgcagcctccacctcctgggttcgagtgattgtcctgcttcagcctcccgagtaggtggaactacaggtgcacgccaccactcccagctaatttttgtatttttagtagagatggggtttcaccatgttggccaggatggtctcgatctcttgaccttgtgatccatccgccttggcctcccaaagtgctgggattacaggcgtgagcgaccacgctggcccatctagggtgtttttatttttcttttcgttttgcttaattctttaaaaccctaaaacagccgggcgtggtggctcacgcctgtaatcccagcactttgggaggccgaggtgggtggatcacgaggtcaggagatcgagaccatcctggctaacatggtgaaaccccgtctctactaaaaa

SEQ ID NO: 7009 - DNA, 1030 bp, Homo sapiens
tatattagaagtgttgaaggcattgtttttatagaaattattttagtaaattcttttttattattgggcacctcctatgtgatttgaagttgcttaggattttctaaaagattacataaaatactgttgaaaagatgattgcatacaaaacataatctgttcattgttaaacgtatacgaaatgttgggatacatctgtgaacaagacaaagtctttgctaattgtgttctatttacgctctagtgtggagagacaaatgaagaaagaaatgtcagatagtgataagtgctgtgcagaaaattaaagtagggtgatgtgatggagaatgcctgagtggtcagagaaaatctttctgaagaggtgacatttaaactgatatctcaatgacaagaatgatgtggaaaatctggggaaataacattctaggcagaggagatttctaatacaaagcacctaaagggagaatcatcttgacttgtaaaaggaacagaaagtcactttatgtaaaaatttgtaagtaaggctggggagttttaattttattctgtgtaaggatggtggatagagtggaagtgctagatcacttagtctctgcagtaatccaagtgacaaataatggtggcttggaataggggtatagcaggggagtctggaatgaagcaaacttttggggacttgtttaggaggtagtatcagtggtagctagctaatctgttttgtagcctgataatcttggacaatgtgtttataatcatggaaggttgtggtgcattagcaagagggtactggagtcagaactggggttcacttcctagccttgtgaccctggacgagatgtttcacctctcctgaaggcacagattcttttttttttttttgtaacggagtctctgttgcccaggctggagtgcagtggcgagatctcggctcactgcaacgtccgtctacagtattcaagcaattctcctgcctcagcctcctgagtagctgggattacaggtgcgcaccaccacacctggctaatttttt

SEQ ID NO: 7010 - DNA, 1027 bp, Homo sapiens
gtctagttatatctctccatatttctgagtgcatggtaaacctttggtaaatgttgtcataggttgttacattagttttgtttgggattgtgatttaaggtacgtgattgacctgggatgtctcaaactgtgtaaaggaactatgctctaagataggttctgctgaagctcaagacatacctgtattacacccgctcactttcttgttacgattgaggaactgaagtgttcagatagagtaagtatgtaaagagctagaaatcctcctgagatgacaagatgaacagaaagagcattaatattgtttcatgctagatttgacacaatgtaagttaactttttgtctttaagatcttctttcattctagtcagtggattgctaattgtctagtggtttaaaagaaaacaagaccattagagttgtaacttttattacagttttttctaatgtatccttgacagattaaaatgtaacatttaaattcgttacattttgaagatttaggtttggttggaatgaagttagttgtagttgtagagggtaatcacctcagttaattaaggcatagtgctgataaggccaaggtcaccctggcaggtgttatttaattttaccttgtccaacttatccacaaattcctgggaagagtacagtgtgtttagttcagatctactcatttgatacagatgccatagataatagtgacctctttttataggaatgccagctcatttttgagatctaattattgattatttacatacaatttcacactaatttaggacttttagaagatacttaatgattgcaaaagttttgtacttgtgtcattgtcatagcaagatttgaatagttaaccagcttatgggttgccacagtgctctggatggtagactttcagagcagtgacgaaaggaacaaacatttattgaacaattttgcggcttttagtagtctaatccctttaatttgtagatgggaaaactgaggctcagaaataggaaattctgattacgaattgagttt

SEQ ID NO: 7011 - DNA, 1717 bp, Homo sapiens
ccgggctggagtgcagtggcgcaatctctgctcactacaacctacacctcccaggttcaagcaattctcctgcctcagcctcctgagtagctgagtagtataacttctcatcatttgaaactactggcaattgagcttatctcagtttgtttcctgagtttgcacttgaagagaattatttgtgtgtattttttttttttttttttttgagatggagtttcgctcttgttgcccagactggagtgcagtgctgcagtctcggctcgctgcaacctccacctcctgggttcaagtgattatcttgcctcagcctcccgagtagctgggattataggcacctgccaccacgcccagcaagttttgtgtttttggtagagacggggtttcgccatgttgaccaggctggtcttgaactcctgacctcaagtgatccacccgcctcggcctcccaaagtgctgggattataggcatcagccattgcgccccaccgagaattatttcatttcttcagttctctatgattgtttagtaggtggttggggaaatttgtagtgtagctacaattttgaggaattgacttcaatataaatataattcttgtacagtgtttagtaatgcttcacaaatattaaacatgacagtataaaaaatgttccattatgtaagtccctttcccccgcctgctattagtacatataccatatttctgcacttttattatctgaattggaaagtatataattaaaaacagttacgaatttagtacttgtcaatttagtagtagtaaatggttgatatatttagagacattattcattctacaggcagagcttgatgcacaaatggattcctggtctccttggtccacaggatgggaactgttggtattgcatttgaaccaaggaatatttgtcttaagagtagcagttttgtcccgttctccttaaagaaggcctagattatgttgattttattgtggttttattttaccaattaattgaagtttgagtccttggatagaatttgcaaatctgctttgcatgcaaaattaaacttgtaaactaaatttacttgggcgtatgaatatatttaatacttaaagtgatatttggtaagttttatttcaaggtagagtattaacttttagagctggctactttggaaataattttatgtactttttggaatgttttgacatctggaaaaagtgtactctgttaatttctttgtaatactgcaaaaaaacacatagttcagttgatgttatccttactgttcagtgctgtttactaattaccacaggtagaaatggctgtctcagataatcttcaatgaattttttcttttcttttttttttttgagacaaagtctcactctgagtgcaatggtgtgatcatggctcactgcagcctcaagtcccctgggctgaagcgatcctcctgcctcagcctcctgagtagctgggactacaggcatgtgccaccaccctgggctaatttttgtattttttgaagagatgtggttttgccatgttgcccaggctggtctcgaactcttggattcaagcaatccacctacctaggcctcctgtgctgggattacaggcgtgagcacctagccactcttcaatgaattttaccttgcagttactaaacaacattcctgcaatgtttcaagttctctcagagtgaacactgtacatcattacgtttttt

SEQ ID NO: 7012 - DNA, 1060 bp, Homo sapiens
tgggatccttccagcaccgaaggaggaagtagtcctttgatatgtccagactctagtgcaagaccaagggtgaaatcttcgtatagcatggaaaatgcaaataagtggtcatgccacatgtgtacatatttgaactggccaagagcaatcagatgtacccagtgcttatcccaacgtaggaccaggagtcctacagaatctcctcagtcctcaggatctggctcaagaccagttgctttttctgttgatccttgtgaggaatacaatgatagaaataaactgaacactaggacacagcactggacttgctctgtttgcacatatgaaaactgggccaaggctaaaagatgtgttgtttgtgatcatcccagacctaataacattgaagcaatagaattggcagagactgaagaggcttcttcaataataaatgagcaagacagagctcgatggaggggaagttgcagtagtggtaatagccaaaggagatcacctcctgctacgaagcgggactctgaagtgaaaatggattttcagaggattgaattggctggtgctgtgggaagcaaggaggaacttgaagtagactttaaaaaactaaagcaaattaaaaacaggatgaaaaagactgattggctcttcctcaatgcttgtgtgggtaagtttctgtattctgcattttttgcgtgggatgggaaaaggtagtaaaaatgatatgaaaagagctgggtgcgctgacacacgtttgtggtcttagccacttgcttgaaaccaggagtttgaggctgtagtatgccatgatcggtctgtgaatagcacttgcactccagcttgggtaacatagtgagactgtgtctccacgcacatgcaaaaatgtgagtgtgtgtgtgtgtgtgtatatatatatgcgcaaagtcactagcatttgattcattcagcacgatagctgtactttcaagtatgcatacataaaaatttgtgtatttgtgatcttgtcgtaactttgtactaaattgcccacaattaattgtgttcatgtctctccattactgggggcagt

SEQ ID NO: 7013 - DNA, 1033 bp, Homo sapiens
aataccacaaaaatgtgtgactccaagaagttgaacaaacatattgaccttgaaaatactggtgttaatttaacatgaatgtcatgtagtaaatgtttgcaaactttatggaactgattacatgtagccagctgattccatacttcaagttatggttcatatgtattgtgacattttcctcaggaaatgctgttaaaggacagagacataggagagcagagtttttcttcagttcttgaccttgtgagttaattgtgatgtaattcacaaaagcagtgacttgagtcttcagtattttttttttgagtagattagatgtttgatttttattaaattatttggatgggctgcttgctttgacatttggtcttatgagggaaattttgaatgattactaagtttaaactttgtgtggaacaatagctaagctttaactataccttagctgtatgttttccctcagtaccaatttcttttatttatccctctgggtacagcccaagaatatggaaagtttaggtgtatgaacctgtgagtcctaggaattgatttccaagaaatcgtgagttttaaaattaaattatatatatcattccccccccccccccgccccaagatgggatctcactctgtcacccaggctagagggcagtgatgcaatcatggctcactgcagcctcaacctcctgggttcaagtgacctgccatctcagcctccccagtagctgggactccccattagcatgtaccactatgccctgctattgttttaaattattatttgtaaagatgggggtctacctatgttgcccaggatggtcttgaactcctgggctcaagcgattctcccacctcagcctcctaaagtgttgggattataggcataatttgctgtgcccagctgaaatcctgagttttcaattttagctttgttctggcaaaaaagaatatcccagcagatgaatccttctgacctccagacttagtaggcacttagcaagtcttagttctagtttcctcccatcctgaggat

SEQ ID NO: 7014 - DNA, 1053 bp, Homo sapiens
gattcatgtcttttgttcactttcgttcactttctttggtgattttatcaagttacatgaaatctatatgaaaaatacacatctccagtcccagtctgggcaacataaaatcatttttggcctcggcctccccaaattgctgggattacagcggcgagccttggcacctggcctcagttactttgaaaaattgtcttagcttttaccttttctttgttcattcattcatgcattcaggtactccctgagtgtgctcccaagcactttgaaagaagtcatgtctctcaaagagtttatagggcaaatagaatttagcaagccaggatagctcagcagaggaagtacagggtcctagaaggagcatagaacctaatctcattaggagatttggagaggacttttggtgacatctaagctgaaacttgaaagagaagaaggaatagtgtttctattagtgagaattttatgtgttaaaaatccagggtggagagaccaaggcatgtcaaataacccgagagaagtcagttggttggagtgtagaatgaggactgtgagagagaacctgtagggaatattgggactatttaacctggttaaataggttaattccttaacctggttaaggaatttagctgttaacctgagggcagtggtaaactttttttttttttccccctgagatgagatctcactttgtcacccaggctgggtggagtgcagtgacatgatcacggctcactgcagcctcaaccttcttgggctcaagggatcctctcacctcagtctcccaagtagctgggactacaggtgcatgccagcacgcctggcttattctttaaattttttgtggagattgggtttctcccaggctggtcttgaactgctgagctcaagcagtctgccctccttgggcttccaaagtgctcagattacaggtgtgagccactgcgcccagcctagtggtcaacttttgaaaagggaatgccgtaattaaatttgtagtttaagaagaccacactcaccctagtgtagagggagcaacacttgagatgg

SEQ ID NO: 7015 - DNA, 1041 bp, Homo sapiens
cctaaaggtaggtagaagattattacaaggttttagaggggccattgtgagtcattgagctcctgagacagtctgaggagtaacagtgggatgatgatcgaacatcagtatatttattgcagtatcacagattgtctggaaacttagcagctaagacaacaaatgtatgttatctcacagagtttgtgagggttagaatccaggagctgcttagctgaatagttttggctcatgatgtcatgaggttgcagtcaagtggtccagggctgtagttgtcaaaagactcaactggggctagagtatctgttcctaagcccactcaggtggcttttggcaggaggcttcaatactgtgccatgcaggcctgtctacagggatgctcatgatacagcagctggttttacccccaacaagtgatccaagagaggcacagagtacaagagagtgatccagtgtctttgaaacctgcagtgtcttttataaattgatttaggaagcaacataccattacttttgctgtattccgtgggacgtgtagaacaaccctggaacagcgtgggagaggtggaggggatttgttccaggcaaagagcaaaattggtcatggattcagtctccatggagtaaatactccaaaggacagaattaaaggggccagtagggagactggaagtgggggagtctggactaagtctagactaagggggtgtgttgcagagaatgctcagccaagttcttttggaatgagaacaggagaacattagagttggggatatgtatgtggggcaggaattttcatcggtttctgtgtcatggaccatgttggtagtttcatgaaacttatggactccttcccagaatactgtttttaaatacaaaaaataagaagtaaatgagattacaaaggaaatcagttgtattgaagtaatagctaccaaaatactaaactaaatttgtgatatataagaaaatacattttaatataggtaaaaagttggggataattgatttaacttgaattaaaaccaaattcccattaaa

SEQ ID NO: 7016 - DNA, 1786 bp, Homo sapiens
ttttaaatgtagctactagaaaatttaaaatttctgtatgtgactcatgttacatttctctcagacagcactgctcaatgaatttagaattcatgtaattctaacagtagtgcccttagttctttgttttgtcgctattagaccttgttaccactttgttaatataaatagggttcacattccacacttcaggatattaaagcatctcttaaataaaggccagtaaaatttcttttaaagagaaggggaaaaagcatctcttaaaatattccctcagtcatgctcccaacagttttacaccatccttaccctcggttgtctgattgacaactttatttttcactgttaaggctatttgttgtatcctgttcaaatcagtaaaggtatgtaagatacgcaatttttctttgaagagccaaagtaattttaattgtagccacatttgatttagagataaagattatcctagagaccaaactcagaaatgtttttgaagaaaaatagtaaaacattttgtttctgactgaaatacctaattgctgactgaggtggcagtgtttagtggaacttgagtggtttatttggatgttagaaatggtgttaaagactattgtctgtgattaagaactgataaatagtagaatgggttaaatggtcatatataaatgctaattttaagagatatcagaatggacttttccctttttaatgtaatggttttttttttctagaaccatagattatatgataaatattagttacctattatagagaaacttgaattaatttatagtttgtaaagaaaaattctggtttctcacttggcatagggtggtattaaatttttgttaatattttagttatgacactctgtactcaaaagcttttgtttgtctccagtgaaattcagttgacaccttttaagagggagggctcagggtggagtaatttcgggaaataggaaatgcatcagcctataaagattttgcagagcatacccagagtatcagtagctttgaactgggaacatttctgtgtgtgttacagtctatatggtggaaacagcctgtgtgcagacctcctcctaaaattcgttagtatggtagtaaaattcatgtattttttgatgacagtaatttacacatatttctctctttttcataagattattgcttccgccaattacatgctttcagaactttttcaattggatgaacctaaaaaggaagaaaattcagaatctcctttaaatgagaattctgatgaaagttatagtgaagaggaggaagagatgcccgacagtgatgaaaatggatcctatagcaccagctctgatccatcagatgatagcaaagcagtagctataatcaagtctgttggagaactatcagtaccagaaaaatacaaatctattcatcaaatcagagtaagcctttagaatttatattaaatttttatcaaggaaacataattgttaatcgaatatagttagcctttcaaaagataccattacttcaataaacctttcatggtctagcatctagtaatcattagttttctgaattcttaaagttggttttataattgttcgagggtaactgacccacattatgcaagcctatagtggacaggtgtgtaaaccaggtgtctgtctattcttatgtgaaggattttcctttccagtgaccagtgtgtagtcatagtcatgtctcattactagggcacttctatccggtgttggggttgctgggaaatgacatatatagattgcttggtgaacatagag

SEQ ID NO: 7017 - DNA, 1060 bp, Homo sapiens
acttttttcgtaaagtttgtacttgattatgcaaattacacttgtttgttggtatctaaatgttattctgaattgtgttctgctgcgatttttttttccttaagcataaagtgaaaatcagatttgtttttcccaaatctttcagatcaaacatagtttttgaaagtctgtttgtgagatggaaattttcctaaacgtattcagtagtccagatactgtcttatatttagttttcagttgacctgaagttagatagatagtgaatgcttttcctttttttgcagggtttaaaatctgtcgatagcagcatcaaaaaagaaagcgaccttccagcagctgaccccagcactccaatcccgttaaaatatgaagatgaatcctcaagagggggtcccgaggggctagagaagcagatggccttgtttttggacaaaagtaagttgaattgatgtgcaaataaggccttcaatagaataatacactggttctttatcaacagcagacttatgtcaattaaggcattaattgaaaggcattgagaaaaagatatcctgtgaactggaattaggggtagtattctttcatttgaaatataaaaaggataattttgatgtttcatggacatttctaataagagcataaggagcctgcatcttcctgttacccacagtggggaactaatgcttcagcctggtggagttctcgctggatcgtgtaggagccacagacttagccagactgcctaacttcatatcttggctttgcgagggcaagttgctccacttctttgagtcactttttatctctttcaaaatggagacgataataatggtttctttaaagggttgttaaatgattaaatgattaatatatgtaaagtgctcagaacagtgtacataataagcactatagaagtgtaggctgttgttactgcacagtacttgaataagctacaaatgtcacttttaaattatctagttcttcaggaatataacatcatgaagaatatatggacttcgaagcagaagttgtgaatttcttattttaacctaagttgtat

SEQ ID NO: 7018 - DNA, 1047 bp, Homo sapiens
tgatccctggctcttggcaacataaaatgaaacttcagctgattctcaagtcatcaaaggcctattatgttttgtccgatgctgccatgagtcttcagaaatacggaagagcattacgatacattaaattagctttgcaaagccatggtaagccactataaatgaatatgtttaataggcactgggaagagagaacagagaaggcatctgaatcacagtggaagtttactcctatttttctagtaaatctttattttaaaatgactgtttccaatcctgtgtgtgttaccttctattttagtttctgctcagtggtttaacatctctttgctttgaactacatgaagccgtaatatgtattgttggacctaaaataaacagaatagatacagtgctacaaagcgttcagctggtaacacagtttcttcatatttcctatgatcattaatttttttctgcatttgtgttttttcttcttccctccctttctaaacagatacttattgctgcctctgcaccaatatgctttccgaagtgctgttgtttctctctcaatatttgacactttgtggtgatatccaactaatgctggcccagaatgcaaataatagagcagcacaccttgaagagtttcattaccaaacaaaagaagaccaggagatcctgcatagccttcacagagagtccagttgccaaggtgtgccacaggcttggaccacgtggttcacagtgggactgtgcagtctagctcatgcttatttgagtattcagaaaaggggtagaaatattagagttttgatatttgctctgtatttatttatttattttttgagacggagtttcgctcttgttgcccaagctggagtgcaatggtgcaatcttggctcactgaaacctccgcctcccgggttcaagcaattctcctgcctcagcctcccaagtagctggaattacaggcatgcgccaccatgcccggctagcccaccttggcctcccaaggtgctgggattacaggtgtgagccaccacgcctggcctgctgttttat

SEQ ID NO: 7019 - DNA, 1057 bp, Homo sapiens
tcggcggtctccaagaccaccctcaggtttgagaatttgctaaaggactcacagaactcactgaaagctgttctgcttacagccacaatttcttaacaatgaaaggatgtacattaaaatcagccaagggaagaggctcgggaggcagagtcctggagagttctaagcgcggagctcccagttcctctgctgctggagttacagatagtgctaactcaccccggcagtgatgcatgacagtgctcaccaagtgtatcaatcaatacatgtacaactgcggaagctcacccaagccttggtgtccagagttttcattggaacttggtcagatagacatggttgactgccacgtggctgatctttgtctccagtgcctccagaggtcaagctgttaccctggggcccaaagtccccacagtaaatcccattgttaggctatccattgtgacccaaggacccccaggtaaacaaaggcgttcttaccgggcaggacatttcaaggacttagtggttaccttctgggagccaaggacaaagactaaacctctgtacaagatttaatcctctactgcacaccgcacacaattgagttctaggagaacaggagcaaaggtgtcctgtagtatctgatagctctagaaaaattgtagttagaaggctctagaataaaacaaaaccttgttcatctggtctgacttcctgcctttgaacagagatgtaataaactattttacagataggacaactgatactaagtgcttatgtgacttgaccacacaactggtaaaatgtgaggtgggcctcgagccccagactcttttctgctggtcccttttcctaaggctcctgttctgaaaaagtggcctgtcttgacaaaaccaaatggtggggcagggaaacaatgattatttattgctttgtccagacttagtatttttgtcaagggaatattattaaatagaagttggatttagaagatttaagattctcattagcttcctttatagcattttgaaagtctgaattttcattaatacattaacattagatgggtttc

SEQ ID NO: 7020 - DNA, 1054 bp, Homo sapiens
actagtttttaccttatacagttatctttaagagcaattaaagggaacaggaaattttatttaccttcatttattccatttcagtactcttactttttgtgtaggtttctgtctagcatcatattccttctgcctgaaaaacttttagcatttagcatttgtaggtgtgctagcaatgaattctatcttttcaattgagagagtttttattcttttttcagtcttggaagatctttgagcagagtatagaattctgggttaacagtccttttcattcagtactttaaagatgtcactccattgtctctggcctgtgtgttttctgaccagaagccagctgtgtttcctacttttgttcatctgttagaaatgcatcttccttgcctgtaggcgcctcaccccccagcagtttaactatgataggcttgagtgtgtcgtgatggcttttacctctggcttcagcatttttctttcttctgttccattctctctcctcctctgtagcccgttatgcctatgttagactgtttgatgttattccacagctcttggatattccgttctggtttttttgatgccattttttcctttttgtgattttgtttgggtaatttctgttgaactgtcttcaagttcatggattccttacttggttttgtgtcatctacagttgaactttttgaaggcattctttgtctctgttacaatgttccttatttctagcaattgccctgggttcattcttacagttccagctctctgctgaaatcaccaatctgaccttgcgtggcatccatcttgtccattagtgtcttgaacatactaattatagtccttttaaattccctatgagatagttccaacatctgtgtcataattagctggttctgttgattctttgtctcttggaagtatgttgttttttccttgccttccgtatatctcttgtttgttgaaaactggacaccttatgtatgatagtagagaccaagagaaatattttttttttgcctggaattttttgtactttccccctgctacggctttagtgtgg

SEQ ID NO: 7021 - DNA, 1030 bp, Homo sapiens
ctcatcctatatccagcccatcagtaaatcctgttatccagacatttctcagcactaattctgagaccatcgtagtccacacctctatcatctcttgcctggactactatttaatgtaacagcttttaaccggcgttcttttctccatttttgttcccctacaatcagtctatactccacttacagtcagagagatcttataggtctgatctcaggcctctgcttagattgctgcattggctttctagttcatttacaagaaaatcaagagtcttcacaattgagggacggaaaggcagcctagatggctggatcagaataaggaagagagagtgataggaaataaaatcagagaggtaatcatgagtcatgatgagcatggaggggagcatggagagaagcatggatgcaggattagaggtgacaccatggtgtgggtatgtgatcaatcttccttcccttacaaattttactttggctctatgccttgaatgccatctcaccatttttcacttagaactttgactggctcttttattacttttgggttatagaaatcaatgctgcttgtgttaacatgggaaatctatcacaccaccacagtcttaattctaaatcacctgggaatgagggacagggctcttttctacaaacgtgactgttcctgctgaagccatgtggagatgagcccatacccaggaaaagggtgctggacagataatccatttgccgcccatttccctggtggtgccataatagtctgggacagaggtccgagatgtctgtctagacaaagaaaaaaacactagatgagcattatttacagaatgtatttatatctaaggaataagtttaagtcctgaataatgacagtttgttatttggtttagtttgatcctgtttggaacactcccacccgaccccttgtgttttgctgctcacataatctggctaagttagcatttgaagtctgcaaagctggacttaaagagttcaaattggagctggaattgctctaagcaattccagg

SEQ ID NO: 7022 - DNA, 1050 bp, Homo sapiens
gaagagctttctttatgtttagagtgttttccttggagccaaaagcaggttctgcatagggaagctcgattcgcttgataatttctaagagttcagctcgaataacatctgccattctgagtgctgaacagttgaggaagtaatcacgacaccacttttccacacagtctaggagggaaagaacacaaggctatttagaaatgatttgtcagaagctctgaagagcccaggccaggcagttgccatctttaagccctgtgctctcctctcctacaaaggaggccacgtaggtgagtggcaggaaggcagcaaggacaaggatttctggtggctgcaaggtcagctgtcagggcactaccaggaagggagacggtgccaccgacagcacccatgccacctgctggggttctgtgatcccagccaactgtggaaactgttcctagtggtgactgaagatgtatttcactaacccgtggctcataaaggccagagaggattttgtaagatctatgttgtgtctctatgcatacagcatgtatgtatgtggtcccatttaatcaaactaggcaggaaaaagcccacagtataaattcctctgatctatgaaaatatctcatattttatttaatgataagaacaggattactaccaggttgatttgggaattaattatgttatagttaagctcatctatctaccctagctgtaacttttatcttaaaattcaggcatgtgggtgagtttgaagttagtctttctggccacctgtaattacttaagatggacctgggaatgtacatggccatggcaccatggacagaagaccctcatttaccctgtcctgtccactcatgctgctcggagcaaccacagcatgtacttagtgtcacccattcagcatgccctcaaaaggtgccaccagattcctgtgtacctgctggctccactgacaactttttcttctcagctttgaaacactaactccctgttctttatacaattctgtctttcaaattgctgtcatatttttcacactacttcacatatttt

SEQ ID NO: 7023 - DNA, 1038 bp, Homo sapiens
gagggctgttactctatctgcatccttccgctcctctctcctactcccttgtcaaatacccttgcaaggctggcttttaatttgtcttcatatatgggattatttaatcattagtcctaaaatgaacaaagggctaggggctgggcatctggggttgtgatcttgactgggttgcatgatttggggccatgtgcataacccctgaggctcttttttttcttacctacaaaatcatgggttgtctggctcatttcacagttaaatgtgaagtttccatatccatgtatgagatttcaatcactgctttccactgtctgctttagggattggggagtagggtatttagaggtgaaacaggaagaaaggaattatgtgtatgtgctttacaaattcacatgtgcttgaatgtatttacccttgatgtgctcattttatttcatttctatgatttttgacgtgtttatttttcccacgtctagaacagaataggtgtgctggcagggatgctgttaggaactgtgatagatgtatttatggttcctgaaggtttacgaatacggtcatgctgagctggggaagtccagcctctgccctgggcttccttcacctgatgcagttatttcttgttaaagattcactgtaaaatgccaaataaacttaataactaactaataaccatctttgtcagttgaggacacttacattttatgaattttggggaaaatataggaagatacctgaggaaatagaattttcaatatcataggtctagcttttgatattacagaatttttgtgcacatgtggcaatgtgcttgctttggctttctaaaaagaattcaggtagcggtagacatcttgatagcagtaaaaaaaatacaaccaaaaggaaggccttcaccgttacctgagtgttcaccatggaccccattgtgccagatccaacaggggcatcattttctctaagacacaaaacacacacgcaattctacgaggtcagtatccggtccttattttggccattgaaaacctgaagata

SEQ ID NO: 7024 - DNA, 1141 bp, Homo sapiens
ggctaaatgaaccaaaattagcccgaagcttcgtgtcttacaagcagccccagaattgccccatcagtagaagttgtctaagctgtaactggcagctcaaatgtacttctaaatgcttagtggttgcctagaagcatttcggaatgctttggccaacgtgaaaatggtcccatttactgtctttgagttttaagcgtttttcttaaaacaacctgtttttctcatctgcaagctctctgcttgttcaaagcagccaacagacatcttacctcctggtcaggagagatttatcaccagaaatcttccagttggtccattcttacaaaagatgtcattacttttgcaaaatattctgtgccacctttggtataacaatttaaagccaaactgttttctgatgagacatgttgaatctgattttcatgcttttttcctgtttcttgttaatttgtacaaatgtggttgtttttgtcctgtttcctgatcccagtggaatcagtcaaatgaactctctttgtgttcagatttctagaacttggtataactggatttagctgcatgtgccactgaatgcacttgcccttagtaaacatcctctggaggatgtgttcagaatgtgtcactgtatgtgtcctccaggctccttcgtgggggctccctgggtgaagtgagattcccaagtctttgcttctcagcttgtgtgttgccttactcactgaaagagacccactggttgctttgcactaaaacatttctttttatctccgcctgatataatgacaagtagatctgtttgcaagaggctggcagtgaattctgaaactggtgttgttcctctgcagaaaagcctttcgttgccaggtctgggtcccagtaggccaggccttacagtgccttggttgtttctggccttgttttccccatttctctctcttggagaacatggaaaccgtaggtgcatcctgagtttgttgggcttcataggaggcacgtctttgggcttgtcaaagcaagacagctctgtgtggtccagtccatgtgggactggcctgaatgaggacaccaggcctgcgtcactgcggccatttgctcacagagcattcagccttcctctgcccttctgttctatccaggccctcaa

SEQ ID NO: 7025 - DNA, 1050 bp, Homo sapiens
tggctgtttgtcctcctagttcctgccagttgttcctaacgccgtagcctggagggctctagagaggccatccaaatcctccctaacctggcctccctccacgattatcttgttttctttggagtctgctttgccaggtcgggcaccctggcttccttcacctcctcctcgcctgccttttacgtccttgcacctgtggctctcaccttccatacagagggctctctctcgccagagctctgtccttaccctcatcccggggtcccagggtaaggggcatgcatggaggtgtcttcagcagcttcacactcctcccagtctcccagggcctggtgcagaacttgtccttaggaggtcccttgaaaaacacctgttcaattaataccctttaggaccccaaatggaaagggctaaggcatttttatcaaagtggttgtttaaaattccacctgtccttgtctgggcacggtggctcatgcctgtaatcctagcactttgggaagtcgaggcgggtggatcatgaggtcaggagtttgagaacagcctggccaatatggtgaaaccccatctctactaaaaatacaaaaattagccaggattggcggtgcgcgcacgtagtcccagctactcgggaggctgaggcagaagaattgcttcaacccaggaggaggagggtgcagtgagccgagattgcaccactgcactccagcctgggcaacagagtgagactctgtctcaaaaaaaaaaaaaaaaaaaaaaaaaaaaattccacctgtccttgaccatcatggatcatatcaaacagtgaaagcatggagtacacagcaatgcgtttcacaagctccccctctctgatgtcagacaagtggtgtggagccttgtggcgttcccatccagtcaggttccaagcccactcattgatccactgcagaattattagtgtcacttgaggccactttgtgtggtggctgtgatgatccagaaatgaagcagacacagcgtgctccgggaggatgtggtcactcagggcttgcaactgatggtaggaat

SEQ ID NO: 7026 - DNA, 1044 bp, Homo sapiens
taaagccccaggcagccgggtcttgaacacagtatccttttcatctccctgggccaggcattactggaaacacggtggatagctatgctgctcggagagggtaattgggtttcgagtgaaaagtggtgtttaaatgcaagacaggcagggtcaaattcatttccctccagggcttttggccttccagaaagcagggtatgacattacaatgtgtgaacactggcagctgtgatggccccacgtgttctcaagcctctgggacaaccacagtcatgtgacattttaagatttattttgaaattcctttaagctacccaatcccggggtgttccaggcatcccatggtgcatatggagaagtgggttgtaatggtggtgtagggactcacaggaaagttcctgaactcccggattcaggtccttgcaactaagagccaggctttgatctgacagcaaggactgtaacctgagctatactttcccctgctgctggaattgtgtttctacagattcatatgcaggaattcaaggaggacttggctgtaagtttgcatgggagaacaagacatggatgtagatttgtaaagcctttgaaatttggagacaccctctggctcacttggagtctatacttccgagatgctgtggccacccatgtacactgctactgagtcacctgaataggtgactcctcctgcccaaggaactcactgggttctgaacacttttctaccgaagaaacttctattcttaagcttctgacatttgggggtgactcacagaactgaccgcaagctgcgaggtcatccagctcaatccccattgctcaccctcccctttctctttgctcagtgggaccctgagggaagtgaccctgtgtatcagcaactctcagccaccagggcagaatcacacagaccagtgcttggtagtcagataggattacataagccctcttagctgatgtgctagattaaccatatggccctgtcctttcacgacataagtggtgcacccatgatgctgggacccttaactaactggc

SEQ ID NO: 7027 - DNA, 1059 bp, Homo sapiens
tctggagtttgagaccagcctggccaacatggggaaaccctgtctctactaaaaatatgaaaaattagccgggtatggtgacgggtgcctgtaatcccagctacttgggaggctgaggcaggagaagcacttgaactcgggaggcagaggttgcagtgggccgagaccacaccattgcactccaccctgggtaacaagagcaaaactccatctcaggaaaaaaaaaaaaaaagacaaagagtattataaactaatgaaaagagcgagggtgatgttgggatccatatttggcagggaagcaagatatttgtactctttcttacaacttccactgtattttgttaagacctgaatacacctctacagtggacagtccaaataaataagccattcccgtacttaagaagcatgcatatggtggagctttatgtgcaaaagcaacaaagccctctagttatattttagctcctcagatacttttctgagtgattattcctgctgcttaaatctctgtactactcccttttgcccaagttaaaatacctaaatcattggttgtagttctattattgtattcagtaatagttcctttgattggaaaagaaatacctcctttttagaattccctggcagtctgtaataactcccttttataatatttgtaacattgtgtcttaattaattgttgtcatataagtcttctcactagattgtgagtagaagctgttttcctttggctttttgagatgtttcatatgtacaaaaatgttgaatcagtattagtgttaaacacacgtacccacctaaattcactacatattaacattttgccatgtctgcattatccctgcatgtgtaaactttcttttctgacataccaaaaagttggtcacagacacagggacacatcattcctcgcttcatgcaactcctatgaataactgctctgtaggcacaggaatattatgatgcctatgaaaatgaacaatgattcccgaatagaatgtaagatctcttccctgtgaggttttccctttgaccttaagggtccccaccatt

SEQ ID NO: 7028 - DNA, 1048 bp, Homo sapiens
aatttaagttttcagcctgggcaacaaagtgaaaccccttctgtgagtccattttgtgttgctctagaggaatacctgaggctgggtaacttgataaacaagaggtttatttggcccatagttctgcaggctgtacaagcgtggtaccagcatctgctcagctctcagaggccttaggaaacttttactcctggcagaaggcagaaggagagcaggtatgacacatggcacgagcaggagcaagagagggagaggaggaggtgccagcttcctttgaacaaccagctttcgtgtgaactatcaaaccagacctcactcattgccacagggaaggcaccaagttattcataaggtatccactcccatgacccaaacacctcccactatgccccatctccagcattgggggtcacatttcaacatgagatttggaggggacaaaacgtccaaaccatatcgccccctccctacaaaaaaaatttagaaatacctaggtgtggttgtgtgcacctgtactcttagctacttgaggggctgaggcgagaagattgtttgagcccaggaatttgaggttacagtgagctgtgattataccactgcagtccagtgagacactgcccaccccaccccgataaaaaaaaaaaaagaactgtgattgggagggtttggggccaaggttgcttaaacaaacacagcccacagctctgtgccaattgaggtttgggattcctgcctcacccctagataaccaataaagtagctatgatacattaagttccttttgttcttaagagaaggtgatgggtgtaactagagtgttgacaacatgaaaaacctaaaatcaggttggagataaatatttaaatctcctctattggatactgataatgatgctcttaagtaaaaataaatatagcaggggcctattaggggagacaggctctggctttcttacagcatgctgttgctgtgtggtttgggtcacgtttcttaacctctctgggatttcctttcctctggtctgaaatgagcagttgttgtacttgcc

SEQ ID NO: 7029 - DNA, 1058 bp, Homo sapiens
acccacccaggtgtcctggggattgttttattcataaagtaattcggatgatctcgaggtggtccagggagatgggatagagtcagccaaggtgtctattgtaagatagattgtgaacccctcaaagataggctgaagtccttattcctgtcacctgtgattgtaaccttatttggaaatagggtctttgcagatataatcaggttgaggtgggtgcatgttggagaaggatgggctctttattttttgtttgagaccatgtcttgctctgtcactcaggctggagtacaatagcatgatctcagctcgctgcaacctccacctcccaggttcaagtgattctcgtgcctcagcctcccgagtagctgggattacaggcatgcgccaccacacctggctaatttttttgcatgtattttggtagatacagggtttcaccatgttggccaggctggtattgaactcctgacctcagatgatccacctgcctcggccctccaaagtgctgggattacaggcgtgagccgccgcgcccggccaagaagggtgggctcttaatccaatggctggtctcttataaagaagagaagacacagacacacaggaaaaatgctgtgtgaccgtggaggtggatcagagtgaaacatctgcaagtcaaggagattgccagcaacaccagaaactaagaggaaggcatgggacagagtcttccagacgggcttcagagggagcatcgccttgccagcacctggatttgggacttctggcctcttgaactgcaagaataactttatattgctttaagccccccagcttgtggtcacttgtcatgccagccccaggaaactgacatgtcatctctccgtgtgactggttaagtcttgatgtgatctcctagacctacgtactttggagctagccagggtatgatcagcgagaggcttaggacttggttagttcaaccaagctgttggagcccattcttgcctcaacctagtgaaatcaaaccttgcatccttttctcttgcctttctgaagatgtggatttgaaaaaaaga

SEQ ID NO: 7030 - DNA, 1011 bp, Homo sapiens
acaggtccctcctatccccaaggaggtgctctgaacccactccccatggctgtggatggctccccaaccttctgcatgaggtagacacccagttacctctgcagcgtccttcccttcagccaaacccctccccccgccgcccctgctaaatttactttgtcaccctttctagaccaggtcagttccagacatgacctggatgctccttctccttaaagagtgaatgagcaagaggctgggcgcagtggctcacacctgtaatcccagcactttgggaggccaaggcgggccaatcacctgaggtcaggggtacaagaccatcctggtcaacatggtgaaaccctgtccctacaaaaaatacaaaaatcagccagatgtggtggcacacacttgtaatcccagttacttgggaggctgaggcacgaggatcacttgaactcaggaggtggaagttgcagtgagccgagatcatgccactgcactctagtatgggagacagagcgagactctgtctcagaaaaagaaaaaaaaagagaatgaataatgagcaagaatgataggccatggcagattggcacacacataattttataatttcccttttttttttttttttcctggagacagagtcttactctgctgcccaggctagagtgcagtggtgtgatctcggctcactgcaacctctgtttccagggttcaagtgatcctcccgccttagcctcctaagtagctgggattacaagcatgtgccaccatgcctggataatttttgtatttttagtagtgatggggtttccccatgttagccaggctgatctcaaactcctgacctcaagtgaaccacccatctcagcctcccaaagtgctggattacaggaatgagccactgcacccagctggcacacacataattttctaaaccaggggttgacaagctgtaactgatgacccaatccagccctccatctgtagtgtgtatgcatgtgtgtgtcccacaagctaggaata

SEQ ID NO: 7031 - DNA, 1038 bp, Homo sapiens
tcttaaactggttctttttttagcgatttaggagaactcagaataagctggggcaagggaaggggactgtcttagtccactggggctgctgtaacaaaataccttagactgggtactttataaacaacaggaatgtattgttcacagttccggaggctgggaagtccaagatcaaggtgccagcagatttggagtctggggagggccattcctcatagatggcgccttccacctgttctcatggggtggaaagggcaggcagctctctggggcctcttttctgaggcactgatgactttcctaagggtggagcctttccagaggccccaccttctaatactatcaccttggtgattaggtttcaacatctgaattttggggactacaaacgttctgaccacagcagggatcaattgattcagtgtcatagaatctctcttaatccttttgaaaatcctttagttagacaaattttaatttgacttcaatcttagtctttagggggtaagtgtaaaaatatgcagcaaaatgctgtcctctctgtctgtctctgtctctgttcgtctccctctctggcacctgtccaggaatgactgcagatggggcagggctgcagctgacttgggagcagccaacctggaggttcttcccccgtgtcccctgatcaaagaacagaagcacctcagcaaccacgccccgtcctggaaagtgttacccccccaaccccagacttctgtttcttgtacccctgtggcttctgctcgctgtcttctccttgtggcagttttcatttcggttgagacagccccagatgggacaggatgggtggggggaggcagaaggcttccaaaaccagcagcagcattacactaggtactcattggcccctttctgtgaccgagttcacactcagaacacacgtgttgaaatcgggaaaaaaacggagacctgttgtatcttgcaaggaaaacgttccttacaggtatatttacagaggactgtgtcacactcaggcagaaatgacctcaacaagacagc

SEQ ID NO: 7032 - DNA, 1075 bp, Homo sapiens
tacgaggacatcaagagtcacccacagtggcagacctagaatgcaggtcttctgtctccagcttagttgctggctggaaacctcagggcatctccaagcacctgtgagctggccctggcttgcttctgactgagccatgcaaagtgctttcacctgaaaacaaccgtctatctgtaatcatagagccttggtcaggatcaaggtagcagacatttctttgcattgacgtctatttttccccattaaaaaatagacaaaatatttctatataaatctctaaaagacgagggttccccttttgaaatatgccctaaataccatcctcccatcgtaaatgaacaattccttaatatcatcatcaaatatccggtcagacttcacatttgccctatcgtgctaagtgttctatctttttccagtttatctgtgttgggattgaaacacagtccttgcatctggtgactgtgtatctgaagtcacccttggcctcccttttaaatcactgctttcattgtaaatgtcttcgatggattgtgagtgactttacacgtgtctgtgggctggaaagcaattgctctcctattaagacgtcattgacctttcctttaggtttgccctggagcctctcctgccaaagaaaatgcactccaggtcccaggacaagctggacaaggatgacctggagaaggagaagaaggacaagaagaaggaaaaaaggaacagcaaacatcaagagatatttgagaaagaatttaaacccaccgacatttccctgcagcagtctgaggctgtgatcctttcggaaacggtaacccgacagggtatctttcctcgctctgcggtagcttcagggacctacctttgccccacctgtagccaacagggctgacggtgggctcttattgaacttgttataaattagcaactcagaaacctggggtcctcctcccctaacctcaaatgtcccaaggcagtaggacagccagagccacagagagacctggaggaaggtgggcttagcatttgtcccccttccgcagggcctggggcgaggccgctctgctgctaggctctg

SEQ ID NO: 7033 - DNA, 1051 bp, Homo sapiens
ccaagtaggagaggctaggccatcactcttaggaagctgtgtagtgatgatgtataagaatcctcctcactgtcatgggatgttgtatccagcccctccttgttccagccggtggtgtgacttcgttggttgaggtgtgtctccaacctacatcagaccatgaagttcaacccctccagggaagctcctgatttcccctgcataattgaaaataggatatttctcagctattgaacagttactaatttatggggtggaaacagcattaagaatactgaatcaaatggaaaaacaaatgaatacaggaagataagtgttcgttcttttctgaaaaagagtatgtgtaccacaagagctggttttaattgggtgaattgtttttgtcctcattctgtacagaaatttgtatatatgatggttcttagaacttgttttaatttttgtggtccttccgtttattataataggcgtccaccaatgattatccatatgtgttcttaatttttaactgctggaagtgttaaaacacacacacacacacacacacattttttttttgagaactccaaagtcctgaaaattttggtggacaatgatttttaaaaaactaactttgtataacctaatatttgtattctctcatctatatttttttattcactataatcatgatactcttctaatagacttaaaagttaatcattgacaacgaaaaataaaatgttattttaaaagactcacagtgtctgaccaattatgttttcatccttgattgtaaaatacagacgctgctgtttctgttctgctatgttaaagtgcttggtgacacacatttatatatgcacctcttcctccaacattgtttttaatcctctctgttaattgtgtctgatctggagcccagatgggaagtgcccgtgtcccgtgcatggctgcatgtcctgatagacaggagctaagcagagaccagctgagtgcttccccatcaccaaagccagagggctgtggggctgcagatcatgtgggcctcttttcagctgctaatttaaga

SEQ ID NO: 7034 - DNA, 1049 bp, Homo sapiens
ccaacccacatcccaggcttgaatcccattaccaggggcaaccgatccttcttgtcctttcccagattggtgatggatgtccactgtgtctccatgcagctggccactctgtggacagctgtttgtgactcagctcctcccagcctgagggcatctgggccctgcaactccatcctttgctcccctttcttcccgcggggaccctttcatctccctggcaggaccctgtctccacccgagggcacgttctctgacctcttctgcggagtaccctggcttgatgacgcttcctgttccttcccagggttgtgctgggggcatcagtctttgaacagtccctccctgagggctgccgtgtcccctcagtgcccaggcacatcaagcactgctacaaacccagacattcacagggacccctccacctgaagtccaccataaggtagaagcttccggaaggggtgatgcaaaggggtcaaacatttagactacgcctcagagctgcatgattccttcctctaactgtgaagcaaatacagcgatttctctgggtctgccatcgaggccttcttccctctgctctcacctcaggtgccttcctaatgtgcaggtgacgattgcctctgagctcaggcatgcagcttctgggatgcactctcctttcacggcaaagcattctgcataggaaaaaccgtctctgcgtctccaagctgtggcctagcccttcattcatcaaatgggatacaactttcatttcttattaaaatctggaagtcactctccatttgtaagatatcccaggggttgatgtcatcttgtaaagggggacagtgccattttctatcttacactttaaaaagacaaaaccactagctacaaacatcattcaccacagcatgggagaggcaaccccacagcaaaggttatgtcatgtttcataaatgggtatggatttgggggctggtttttttaataaaaacatattttggtactttggaacttgacataatttgagctgtttatgttgtagatgttatgaatagatgttatgg

SEQ ID NO: 7035 - DNA, 1070 bp, Homo sapiens
cccgcttcccagcgtgctgggattacaggcatgagccactgcgcccggccaaaatggataaaagtttaaatgtaagtaccatttggatgttgtatccttgccgctggcctgtacttgaaatggcccaggaaacaatgtgcactttccttagtgactagttcaaacggacacgtgataaatgatgtgtggcatctggggaaggagcacatttctgcagcttttttggtgaagatggagacatttaagaatattaggccgggcgcggtggctcacgcctgtaatcccagcactttgggaggccgaggtgggtggatcacgaggtcaggagatcgagaccatcctggctaacacggtgaaaccccgtctttactaaagaaaatacaaaaaattagccaggcatggtggcaggtgcctgtagtcccagttactcgggaagctgaggcaggcgaatggcatgaacctgggaggcggagcttgcagtgagccaagatcgtggcactgcactccagcctggacgacagacgaagactccatctcaaaaaaaaaaaaaccaaaaaaagaatatcatggtggcttacaccagcaaacccagcactttgggaggatggcttgaggccaggagtttgagagtagcttgaacaacatagaacccatctctacaaaaaataaaaaaagtagccaggcatggtgatgcatgcctgtagtccccagctactcaggaggctgaggtgggaggattgtttgagcccaggagttccaagctgcggtgagctatgatcctgccactgtactccagcctgggtgacagagtgagaccctgtctcaaaaaacaaaaagtgcccgaattttagtacttgtgttgatgtaataattttaaatctactttccaaatcatcgcttctccaattttaaaatttgacatgaattgaaatttttttcttttaagtagttgaatcagatatttacataagttgctgaaatctcagctggtttgtacaatggggttattaatatccatttgcagagtaagcaggtttagtatatgatatgtttaataagcagtagctggt

SEQ ID NO: 7036 - DNA, 1029 bp, Homo sapiens
ttcatgagaaaatgatactcctcatcccttttttgactctgggcgtcttcatgtgtggttcttgcctgtagcctggtgatgcccttggcccatggaggctgtgtggtctccaaagacagctgtgttttttatatgcttgtatttgctcttcagttgattttccttctctgctgagtgcacttgccgctgttaatggccttgtctccatcagacctccgtttcctaatgtgctgcttctaaatctgtgcttgcagacaccaaagggtaacgggctagaattatgtcggaaggaaaattcagcatatttggagtaataatttaaagggctccgagtgagcagagtgtaggaagtggagttcatggacttgtgacatgtattttggcagtactttgtgagctgtggttccctgtatccaggtgactgggttagttagttgggttgtcagggtcagcattgtattcctatatctgttcatatttttctgaacttgagctaatcccactcggttggcaatgtaagtgatacagctttgtgcgtgattgatgcatttcatttgggatgagtttataaggatatttattattatttttttttgagacggactctggctctgtagcccaggctggagtgcagtggtgctatcttggctcactgcaagctccgcctcccgggttcacaccattctcctgcctcagcctcccgggtagccgtgaccacaggcgtccgccaccacgtccggctaattcttttgtactttttagtggagacggggtttcaccgtgttttgccaggatggtcttgatctcctgacctcgtgatccacctgcctcagcctcccaaagtgctgggattacaggcgtgagccaccgcgcccaacctctaaggagatttttgagctgtgaattgggagaacatggtggcgtgaccccatggggcttaggttctttagtgacccgttgtcccagcactgacttttcttgagatttgtgactaaacttgtggctgtatacagataattaaaattcctg

SEQ ID NO: 7037 - DNA, 1057 bp, Homo sapiens
gatggataagtgactttacttcttgattgagttttaaatggacgttactttgcatgtatttaatgtctagaattcagggcaggcccaccaactaacacctgtgtgctctgtagctctttgattagcccaaaacaataaacagaagctgtagctttaatatctacacacagaccccactgcaccccaggcccactgtgggcatggtggcatcgaggagggtggtagctggttgggtatagagaggagctagacaggaatgctgggcaggaatgccagggtctgctcaggggcatgaacaaaactgccccgaaaagtgggttgctgactgccctcaggccttcctcttgcctcaatccatgagagaattttctgaggtcagatcttcgactttttatgtggaaaacaaatagcaagtagtactacttctagttatgttgtaaaataaaagttttttttttttttttacatttttttttgagagagtttcgctcttgttccccactggagtgcaatggtgcaatctcggctcactgcagcctctgcctcccaggttcatgtgattctcctgcctcagcctcctgagtagctgggattacaggcacccgccaccacgccccactaatttttgtatttttagtagagatggggtttcaccatgttggccaggctggtcttgaactgctgaccccaggtgatccgcccaccttggcctcccaaagtgctgggattacaggcatgagtcaccgcgcctggccaaaataaaagtttttaacacgtgcttttgtaaagtgaagcactagcctaccactgaaatgacatcagcactttggaccaatatgttttataaaaacaaagcttgagttccattgatgcagaggctctttttgtcctttggtggcctctgtgtaggttttgtttcctgtggagttccaggtttgatatcatacttcttaaacaagccagtgagacatttttcctggggaatggtctcactcctggaggaaaaaatttttaagactattgctcttgaatagccctgaagcagcagaaacagatc

SEQ ID NO: 7038 - DNA, 1047 bp, Homo sapiens
tgcctttcctcacccatcacaaggggcacagccaacacctagaatagattaccaaggaaaagtataaaatgtatgtaaagacttaggtgacacaggagccttcagaaataaaaacccaagagaaactgcatgttcacactcagattcaacgaagagtgggtggctgtgcagaaatgtgattggacagaagggaaggatctaatcgtagactggatggggaagccttgccccgtgtgtagctttcttccttccaggtacagggcagggcccttctggaatgaaggtctgggatccattttcagataaagtagtgttgaggatgtctttgtggccggctcctgtagtggacctcagatccgggtgctcgccagttacagagtccagttgacaagagcaaggtctggtagaaagaaagtgactattaaccagaactagtcatggggatatggctggattcccacccaaagtaactactttgaattctggagagaaggcaagggtttaagaagtggggagtaggagcttgagctgggaggcgcgcagggatcgtgctgagtacaatgtgtgtcttgttccggcggctgtcctgggcctccgtccacctggagtgcgggctggtgtcatctcaacaagtggccagatttgactgctcaccttgaggtaagctctgggattttgcagctgggtttccacgcttggtctgtctcaagattagtccctagaacttcgaagtaagcacgtaattagagactagctcacagacacatgtgaagagagtatacggtgagaaaggggaggggtatggagtctattttaagattaagggaaaaggcttctgcagtttgctctaaggttgcatctcaggactaaagagaaaggaaaaaaaagtctaaaaatgcattttgaagttaagctgctcagttacactcctacacaaaggccagggaaagttagagtcatatttctagttttttttttttttttttttgagacagagttttgctcttgtcccccaggctggagtgcagtggcgcgatctcggctcac

SEQ ID NO: 7039 - DNA, 1043 bp, Homo sapiens
cgtctctcaggaggcatcgggtgggtgggggagcgccgtggtctgggctgcatcagagctctctgagcactgggacccctcctttgcctggacccttcccagggcctcctgatgacattcctgggcccttactctacaaaaaacattaaaaattgtattttagattgtgttggtgcaaagatgagtatagtgaagaagttcaccattttgtttgttgccagaaatgaaacatttccagggtccccagccggcgtctgctatgcctgatggacaggcttctggggtgggggcgggaagctcccatcaggcccccttcccctcccctcccactggggacccctgcctccagacggcctccaatgcccggtactctcctgctctgatctccttctgtggcaggacggggctcacatcaatgtcctcccatcttacccctgccagtccccagcgcccagcacaaggctggacacagaaataaacatcgccctttggaataaacaaatgtgagagtgactcctgacctgaacagcccagccccctaccccgggcctttcccagctgtcataaatctaatggcttttattgccctaggatttttacagtacccattaccatagcagttgggaacttaattggcaaaattaaggacatgtacttaggaacttctagtaaatatttgctaatggattcatattagcaggtcctgctgggacatctggtacagtcagaacttgtctgcctaaaaacttgtcccaaagctgggggaagctgtttcctggcctgaactttctctggggctgtgagaggcgagggctcaggaaaagatggtcaggttcagtggaatttggatccttgaaaggaagaaaagggtgacggaaagggcagagggaactgcaactggatcctaagccaccccgtctgtgacctgggccttgtcaccgcaaggctctcgtgttggttggaactccgagagcgccgacagacaacacgaggcggtgtggagcgacaggctgtttcagcgagcgcccaggtgcgggcggctc

SEQ ID NO: 7040 - DNA, 1050 bp, Homo sapiens
atgccatcagcaccatcagaagcagcctgggaggtgaggccttcgatgtacccccgtgggctggggtcacaggactggtcctgctcgctggcagctctatcaaaaccagctccagcttccttggaggccaagagggcccaggcggtgaatggctggcccggccatcctgggtgtcctaacctggcctggcaaggtgtggccttggctggtgggggaggcctgcaggtgcagaggcacttcattggtggagagtgaagtggcaggtgcagaggcacttcactggttgttgcttccccagtcagttgcagcctgtttgcactaaacatcagcttcacgttgacagcagaatctgatgagcttttggacagacaaccttgggaatccccacaggccctggaggtggtgtcgcatcctgtcctggttgccttcattttgtgcccttgcttcatagacctttatttagcaaatttatttgagtcaaagttgacttccttttcagctttgtcacacactgccgctggagtgggacttggcgtggcttttctggagggcgacctacatcaaggggcatgcatgcgccctttgagctacagatttctcagctgggaatgaattatgaatgtcctttagccttggccgagagggtgtacagctctgcagtgttcctgtcggaaactggaaatagcctgagtgttctccattatgaattagtgcaaatgaaacacggctgagccttacggtggcataggatgcagtcattagaatacaacattcgaaaaaggaagagctggtcgtttggtaaaagcttgtaacagataaagttctaaatggcatcaaaagaacagacttagtaaatctcattttggttaaagatgagaaataaaaataatacgcctgaatatgtaggtgtatatacatatgtgtctgtgtacacggatgagtctgtggaagtatataccgtacaccaaaatgtcgggggggcgtttctgggtggtgtggttacttataacttccattttcttgtgtgttttaaaatgttctgtgatacaa

SEQ ID NO: 7041 - DNA, 1021 bp, Homo sapiens
caacatgatgaaaacccatctctattaaaaatttaaaaaaaattagccgggcatggtggtgcactcctgtaatcaatcccagctactcaggaggctgaggcttgaatccgggaggcagaggttgcagtgagacgagatcatgccattgcactccagcctggctgacagagcgagactctgtctcaaaaaaaaaaagtgttttcctcacttgacccagcttgcattccttcctggcaccttctgtcttctcggttggttttgtaaaatctgtgtatgtgaaccttcacttttgtgatgcacagtcttgtgggttttgagaactgcctgggatcttgcctccactgccctactgctgcacagagaattccgtgcccttggaattctgctgtgctttccctttgcagtagccacactgtcctttgccagtgcggatgtgcttcccatcccttcccaatgccacgtgggtgggatctacatgacggggccttgttgggctggctccttccacttagacctgcccctgttgtcgcatgaattaacagcatgatccttttgagccctgggcagtattccatggcatggatgcaccagtgtttatccattcccagactgaaggacatcttgattgcctccagtttctgaaggttatgagtaaagctgctataaacattggacaggtttctgtgtgaaaataagtcttaagttctctgggataaatgagtccagtttggggctgtgacttgcatgggctatgggggcttttatagctttggggaacattctgaggcagaagagaagtgttgagttggagaggagacaccccacccaaccactgccctgcttggcttccctggtcctgagtgagcttgcccctcccggggatcctggaaggcctctcccatgggctggcctttgaaggagtcggaatggacacaggaggtgtccacagcaatgtggtgtgatggagccgatccctcaaagggagggacacaagaggagccagcagtgagaccctcagtga

SEQ ID NO: 7042 - DNA, 1080 bp, Homo sapiens
ctctgatatacagcgcggactgaattgcagtgaaactgtttcccacattccctctatccatagggtttttctgctgtgtgagtcctctgatatgtagtgagttttgactttgggtagaaagttttcctacattctttcatatggtttctctcctgtgggagtaccctcatacatcctgaggtttgacttcttgctaacggttttcccacactaattacattcacaggggttatcctctgtgagagttctctgatgtacatggaaggctgacttctcacagaaggttttaccacacttgtcccattcatagggtttctttcttgtgtgaattctgtgatggataataaggtgtgacttctggccaaaggatttcccacattcattacatccatagagcttttcccctgtgtgaattctctcatggatttcaaggcctgactatggctgaaggatttctcacactggctgcatgcacattttttcccctctatgtgtcctctgatgtactgtaagatctgattttggccgggcatggtggctcatgcctgtaatcccagcactgtgggaggccaaggcgggcagatcacgaggtcaggagatcgataccatcctggctaacatggttaaaccctgtctctactaaaaatacaaaaaattagctgggtgtggtggtgggcgcctgtagtcccagctactcaggaggctgagtcaggagaatgatgtgaacccgggaggtggagcttgcagtgagccgagattgcgccactgcactccagcctgggcgacagagcgagactccatctcaaaaaaaaaaaaaaaaaaaaagatctgattttctaactaggattttctcacattcatagaatttttgtcctgtgtttggctcctctcaattaggtcatcaactgtctgaacatctgaaatgagaaaaaataaccacaacattaagcacatattaaccatttcttatgggcttctcatgtaaggaaaaagaagttatttcttatcccactggttttggtagtggttttataaatatatggttttccttactactgacttaatgtaatgaatcacagg

SEQ ID NO: 7043 - DNA, 1050 bp, Homo sapiens
cactcctagcaggtgaccctccctcatgcctcgtggaaacagtgcagcctgaggggctgtgctctgcccgccacacctgcccgctccattctcacagcagctcccggctgtgctccgtgcctccctccccgccaccaccggcagctgactctccctggggcacatggtcctgacttctagggcatgttttacagatcccactgactccgtttccccttccccatccacagctccttagtctgcttcctcatagcacccgaatgtcctttaaacctgggacctcattcctcgtcacctgcccctcctctcttgccacctgaggccgccccggttgtaactcctgtgctgggactgctcacttttcattccgtggtttcgaaccgtcagtgccaacctcctgtatggcaaccgatgattccgccttttactgataccaccttcagcccacgtgtatccccactccccacaaaaaaagaggttgaaagagatctattgcaagtttttgttacatagtattccgttaacaggtaaatattgtgtattactgaactgtgccttttctttttcacacaagttttcactttcctaggtctaatgattgcctgattttctcatatgcttagttatctgtgtctttagtgcatttttttttttagcaaacacttcaacaggtctatcaaataccaacacatcagatcagctctcagctcttcttgtccccagaccagtctccctggcctgaacggccactctgaggcctgctggccgcctggctcatgtcctgagattctcctcaccattttttggaagtcagatctgccatcttccttctcttggctttttctctcattttgccaaattgcctctcgcagcagtttcctgagaaagcatttgtttgttttggctctttgcatattcgaaaacatttttactgctccctcagatttgattgaaaacttgactaggtctagcatttcaggttgaaaattgttttctcccagaattttgagggtagtttgaggtttcatccaccatgtttcctgcaacctg

SEQ ID NO: 7044 - DNA, 1062 bp, Homo sapiens
cctaacagattttaggttagaaaatggaatttctcttgtttttgtgaatcgttgcttaacctaaataataatagtctcaaatataaaacaaaccctgataaaagtcaagcatctcgttctaaaagatattgggtattatagagtgttaagtgcttttttaagatgaagttgttatgtgagtgacagatttatacaggagcaagtccctactgaagttgttcagccagctgcaacttgacaaaccccaggcagccttttttctttttcttcgtatttcggttcacgtctgaaaggctttcacggtccatccattttagagcattcggctggttgccccatgtgcccttccctgtggacttgagtgtgtctgtgggtaagggcggcagtgcacgtgttcatccatggccggaggccgcggatggtgttgcagccgccaagagggtgaagctgctgcccatcaagcgaccccagctcccagttagaagctgcagcaaggttcacaggcgtccacgtgtgcgtcttagaatcgaaggagcgtggaggattcggaaggctagtgagtgagcaccagattgtggaaggtgcagggcctgagattcaggagtcaggtccatagaggcccgttgggaagctctggctgtgcagaagacgaggtgggaagcatagtcagcaccttgagtttcaagcttttcttacttttctgtgcagattaagtcttacaggaaagcccagccaataaaactaaggcccacagaacgtatgggtgtggctgtgcggcccactgccctccaggctcagctctagccgccaggaatcaggtgaaatcagaaatcagcacgtccaaaaagagaaggtgctcgcttcctcctcttcctgtgtgttacttccctgctctcctgcccgtgtccccatgaggcttcctttagaattctctcctagcagagcggcactccatgagatctgggagtgttggagaaggctgaggggttgcttgggtttggggtgactgggatgggagttggaacccgttcatggcagagagacaagcctgcagcctaggga

SEQ ID NO: 7045 - DNA, 1226 bp, Homo sapiens
aactgggctcgagcccaggtgtgtcttggtgagaaaccagcacctgtgcagaggtgtgtcccctggaaggaaactctgcctggtcccaagggggtgccgttactagattggaaaaccgttggttgtttgggtggttgggtggtttggttgcggggggtgggtggttgagttgggtggtttggttggtttttaatgagatttcagccccttttacactattgtttatcaagtgaagactgagtgagtgagcccattccacattagtcttggagagtgctacagaggacgctgtaccgcagaagcctttccctaacacatgtgcctctgggagtgatgttgggtctgttctgatgccatttctccagctttgccgtgtggggtggctacacctggggttgtgcattcctcaggaggagtgtcctcagacttctcacatcgatgttgtcaccgtatttcctatgagttcatcaaagcgagaaaggctgtggcatttgctgaaaatctagtttatagggtcctaatttgaaccaagatgttttgatccaaaatgttggtgatgtctgatacacagtgctgccgcctttgcacccctgaattagtgtaaatcacttttagtgacagtaacacgagttgtgcagttccatcatcatgaaactgctgatcctaaagtagaagtgtgatgggacccccgagggtgggcacttgaccccctccagccttgtccatctcttctgcagccaacaccacctcccacccagttacctgtgcacaccccaccctcagaaacccctgttcctcctgatcagaccctgccacaacccatcagctcacgtgctcattttgggagaacagtaggcctttactaggcccagtcttggttttattcaaggctgcttttgtaggtttagcctaaataaaacgggtataattggtggccctactgaaggtgtgtgagaagtctagttatttcattagttggtgcatggggaagagaccacagacaggtaattctgtacattgacttaggtcggtatttgagatcttacctctctaacagttcagagtgggctatttatgtatctgagcctaactgggtaagagtcagacatgttgctgtttttaaatttttgctcttaaattattttagtgccagaaaagggatataattaaaagaagaaatcttggccaggtatggtggctcatacctgtaatcccagcactttggg

SEQ ID NO: 7046 - DNA, 1784 bp, Homo sapiens
accagcctgggcaacatagccagaccccatctctaaaaatgaaagcaaattattttatatgcaaattaaaatgttttcaataaaagaaggaatctttgtaagtattgcagctatcatatgttttgattaatgggaaatttgttagaggattggggtaggtgtgtgtttttaagcctgaacttggtagaactgactcttcttgctctagagaatccaagggtgtggtcagcactacctgggttaaaatgagggaagcctccctacacacacttttccaagttggttttttacagaattcagccagacaagactcagttgagagcttttctttttcccctaagctttcaaggctctcccttttggtttctaattacaagaataacaaaaaatactatcattaattttttgttttgattttaaagcttatgtttttcttccagctggatgttagtgagacacaggcctttttccttttttcatgtgtgatgctattcctcacgcctgagctctcacctctgaccataggcggcctgcagccagcgcccactcctctctgtcctttctatttctgtgcgaattgggcttccctaggaagcctccctgaccacagcactcaacacagagatgggggcgggaggtaccttctactttttgttttaacctcaagtgaagtgtaatatataatacatacctccagataagacatctgccctataagtgaccagctccatgaatgtttgtagggtgcacatgcccatgtagccagccccagaccaagaaatggaatatcctcagctccccagcaccctgctgtgcaccctgccagtacctggagccagtggaggtttgtggggtttgcaccgagaagcatagtcctagtgcagtgagaagaggtgtgtgcatctagctgcaaggagaggacaaagggaggggtgcagctgagccacccaggaggactttgctgtccagcgcctcagtgtggccactggaggacacacaggagagggagccgcaggcctcggtgcctgggcagtttgttaccctgccagctgatcttctcttcagcaggaacatgtcgacctcggtaatggaagcaaggggaagacttggaatagacagtattccattttgtagcatattttcataactctgctaattggttatttgggggtattgcctgtacagaattattacttagccatgaatataaacttgtcctctttcgttatctactataagtgttctaattatgtgctgctgtgatctttgttttgaattcctatttccttccatttttaggtcccaatattgaagcccatggatcttatggtagaagcgagtccacggcgaatttttgcaaatgctcacacatatcatataaattccatttcagtaaatagtgatcatgaaacatatctttctgcagatgacctgagaattaatttatggcacttagaaatcacagatagaagctttagtatccttcctcagagggacactggcgtcttcccgagggtgctctttagatagtaatttctctcgtccctttatacacctgtatctcggagtctagtcttgtaaataccatcactgcacagcagcctgtgatgtaagttctctgtgatttgaaatgtttgtccctaaaaatacaaatttctttctacctttgggaaaaagttatctgtataatgggaattacctgaagtccactgcctgcctggtttaatcagaggcagttttaaataggctacatttgaaaaaccaacattatgtgttcttttttt

SEQ ID NO: 7047 - DNA, 1211 bp, Homo sapiens
gggtgagacttgggcgtctacgcttctcatgcccatcccttgtccatagctggtgctagaatgtcttatccgaagctcttgcccacggaagtcacagaagatcagaaaacctagagaatcagaaagatcagaagacctagtgttgaggccaagcccttccagagtctctctgaaggggccacttcctacttgaacttgaaaatgatttgttctctgatttttaaacagaagctgaaaacattttattttgtttttcagtttttgaagagcctgaagatcccagcagtaggtccttcttctcagaaataatttcatccatatccgatgtaaaattcagtcatagtgggcggtacatgatgaccagagactacctgtcggtgaaggtgtgggacctcaacatggagagcaggccggtggagacccaccaggtccacgagtacctgcgcagcaagctctgctctctctatgagaacgactgcatctttgacaagtttgagtgttgctggaacggttcggataggtaaggcctgcgtggagatgagctgtcgccccaagcttgctggtttccgagagtgcaaggtcagtgagggaggcgagctgtcctccagcgtcagaggaggacgctcatagggtgttgttttccagaccttttgattgatggatgatagtatcaaggtagagaaaataggatctctgagcaagtttctcacctagcttgtcattccatttatatttagacaagaagtatagcactaggtacaggccggctatgtgttaaatgcttagtgaatgatagtgtattactttttattatgctgataatgagtgaaaaggaaggaagtggggaagtgattcacctcactggaatgaccgcgttgcagtctgcctttccttctggagagaagtagatgaaaacaccccagagccactgcctgtcatgcccagacacagcgtggtcatggctggtctgaaacaccaatgtaatttgtaatgtgatggttctagtaccttgataatttattttgtatacattctttaaagatagctatgattagtgtggttgagagttacgttttttttattatgcaaaaagttacgtttcagatgatggaagattgtcttgcaccatttttatatagaatttttgttcagaattcaagagaacagaggagtctattggcaataagtgattgactggatattctgcaaaa

SEQ ID NO: 7048 - DNA, 1650 bp, Homo sapiens
agcatccatccatctcataatgaaattgcaggacaccaaacgcaaagagaatatcttaaatgcacccaaggaaaaaacgcaaattacctctgagagcggacaccgagactgagactcggctttgccacggccacagtgggagccagaagccgtgtgacagatccagcaagtgtgactccttactctccaccgccagcttagaatcaagccttgaagtagatgctcgttcaagaatctgcttgtgataaaggcattttcaaatgggaaacaatgtatcacaacaggaaactcagtagagcgagctgtaaagggagcctggccctgcagaaaggggctgagacagataggcagaggaacgcagcctgcagggaagagcagtgcaaactctgaagctctgccacctggacggccttagttatctgtgtttgggggagaaaaattagagccctcaccagccccacacaataaataaataagctctgagtgtttctaagcctaagacatctttgtgagctctggaaacaagggcttctttaagaaggccccaaaagcccaaggaaaacattaagaaattcaactacattaaattttaaacttctttatattgaaattaaaagtgaaaacaaaatccacaaaaggataacgaacagagattaagtatccagaataggtgcagaattagttgtcaacaagaaggtggcaaacaactcagaaaagagcaaaaaccatgaatggggtttcgcagaaatggaaaaataaatagaaatgctcatccttcttagtgatcagcaagtaaagccagagggacgtcctttcatgcccatcagaatgatgatggtttgggggagagggtggagaccagtggtcttacccagtacccttcttgtgacctccttggtgacattcagtcgggttgggagcttcttgcatgttcagacaagaaaacgtgctcagatacctgaaatagcaaacaactggagacagcccacaggtgcatcattagaggaatggacaggtaagttgttctctatcataacatatactgaaaagcagtgagaatcaattattagaactacatggatcacctaggtggatctcacaaagataatccacaaagaaaattcaggaggaatgcgtacggtgcaatgacatacaacatgtttaagacatacaagacggttttgttttaagaatctgtaactattggccaggcgcagtggctcacacctgtaatcccagcactttgggaggctgaggagggcggatcacgaggtcaggagttcgagagcagcctgaccaacatagtgaaaccccatctctactagaaatacaaaaattagccggacatggtggtgcatgcctttaatcccaccactcaggaggctgaggcaggagaatcgcttgaaccttggaggtggaggttgcagtaagctgagattgtgccactgcactccagcctgggcgatagagtgagactctgtctcaaaaaaaaacaaaaaaaatctgtatacaaaatataaatgtgtgtggggatgacacatatgtactctagcaagtgaggaccccaactggggatgggataggagaccatctttctttccagagtggcaacacagtgcaggggggtccctgtcttagcagtgacttgct

SEQ ID NO: 7049 - DNA, 1810 bp, Homo sapiens
ggatcgctgaatgcagtttctcttctctgagttcgtcttttttttttttttttcccctgctttgaagttttagacaaggtcagtcagacactaggtatttgccagcagccagggtcagtgctgggccatggaagggaagcggcccgcttctttctcatggcaccttgaagacgcgccagcgtgaaaggcctctcaccgcgcatgaccatgggggcaggacgtgagggcgcgggttagtgtcaaaataggaagaggaggcgagcttcaaggacggctggagaaaccagaagggcattgtttgaacacatctttcatcagaaactggactcatgaagccatgggtcaaatcatggcagcgtttgcatcattcagctatttttctgtcatttttgtagaaaatgtaagattgcagaggtttttaccagtattatgaagttatatcatgaggatgtgtgcggtagtagaatttttcgacagcagagacatttgaaagccattacagttgatcttgaagaaacaaaagcatggacggtattgtattgtctggaatgtgtgtgaaatgcagttgttctaaaattctgccacactttgcccagtggatttttactatttctatccgttgcctcatttgaaagaaactttttgaaattaatagaaaagcagtttaactccaaagaaacattgacagatatgactagtaactgttgaacatgataaggattatgttcaggtcattatggatcattgacaaattgcagaacataaggcttaaaaataaactgtgctgttattcatgagtgagataaataggtggggttgtttcaaaaaatacactaatgttaaaagtgtgactccattattttgtttctcctgtgacatggattcttactgacatgattatagataaagctcggtacacattttcactgcatttctcttctgcccattgtgattgatcattcctgatttctgaaagtaactgggttgtgggggagggtggcgtgcgctgtgcaccccaggggtggggtctgagtccttgctgccgctccccccactgaggagtgctgctgtctgctcttgttttgaacagcgccatcatgaccgggtcctataacaacttcttcaggatgtttgatagagacacgcggagggatgtgaccctggaggcctcgagagagagcagcaaaccgcgcgccagcctcaaaccccggaaggtgtgtacggggggtaagcggaggaaagacgagatcagtgtggacagtctggacttcaacaagaagatcctgcacacagcctggcaccccgtggacaatgtcattgccgtggctgccaccaataacttgtacatattccaggacaaaatcaactagagacgcgaacgtgaggaccaagtcttgtcttgcatagttaagccggacatttttctgtcagagaaaaggcatcattgtccgctccattaagaacagtgacgcacctgctacttcccttcacagacacaggagaaagccgcctccgctggaggcccggtgtggttccgcctcggcgaggcgcgagacaggcgctgctgctcacgtggagacgctctcgaagcagagttgacggacactgctcccaaaaggtcattactcagaataaatgtatttatttcagtccgagccttcctttccaatttatagaccaaaaaattaacatccaagagaaaagttattgtcagataccgctctttctccaactttccctctttctctgccatcacacttgggccttcactgcagcgtggtgtggccaccgtccgtgtcctctcggcctt

SEQ ID NO: 7050 - DNA, 1230 bp, Homo sapiens
aattacacgatgccaccagtacgttggtttattttcaaagtaggatctttgataccagaaatcaagattttccaagacaaataatacagagctgtaccaatgctgagtgaccagagcttgcttccgtgggatttaacacacgcccactacgtgtccccgaggggagtggggagtcgggctcccgtgcccctgtggagatggaggtgtgtgctgatcccccgtccgcctgtggagatgaaggtgtgtgttgattcctcctgctgctgtggagatggaggtgtgtgctgatcgcccgtcaccctgtctagatgaaggtatgtgctgattgcctgtgcccctgtggagaaggaggtgtgtgctgatcccctgtgccctgtggagatggaggtgtgtgctgctccctcgtgcccctgtggagatggaggtgtgtgctgatcccccatcccatccccctgtctagatgaaggtgtgtgctgattcctcatgcccctgtctggatgaaggtgtgtgctgatcccccgtccccctgtggagatgaaggtgtgtgctgatcccccgtgcccctgtggagatgaaggtgcgtgctgatcccccatctccctgtggagatgaaggtgtgtgctgatccccatccccctgtggagatgaagggatatgctgatcccctgtcccactgtggagatgaaggggtgtgctgatcccccgtccccctgtggagatgaaggtgtgtgctgatcccccatctccctgtggagatgaaggggtgtgccaatcccccgcgcccctgtggagatggaggcgtgtgctgatccccatccccctgtggagatgaaggtgtgtgctgatcccccatccccatgtggagatgaaggggtgtgttgatcccctgtccccctgtggagatggtgtgtgctgatccccgtccccctgtggagatgaaggtgtgtgctgatcccccatctccctgtgaagatgaaggggtgtgctgatcccccgtgcccctgtggacatggaggcgtgtgctgatcccccgtccccctgtggagatgaaggtgtgtgctgatcccccatccccatgtggagatgaaggggtgtgttgatcccccgtccccctgtggagatgaaggtgtgtgctgatccccgtccccctgtggagatgaaggggtgtgctgatcccccatgccctgtggagatggaggtgtgtgctgatccctcgtgcccctgtggaga

SEQ ID NO: 7051 - DNA, 1050 bp, Homo sapiens
tcattaccctgaatcaatgctaacacagtgccacttgagttcacattaagttagaaattgagaatctaaaggtacctttattttaactaaaaaataatttatatactgtatattgattgtgacacaatttacaaagtctgaggtgtggaacagttatttaagcattagtcaaccctggtccttaagacagttctagtaaaatgggattgtatatatttgttcaactattttgaccaaaaagttcaataaattttaaatgtttaactggattttcactgcgtatttggacacccttttccatcttcctctagaatgtatttcccactaaatagcccacctcctccacccccagggcagagcagaaggtgcagcccaggcgggtcccgtgtgtagaggttccacgtggcactgctgctcccgtggaactgccactgccttgaggtctgcggcgcacgttccctggaggtgtcgtcacctagctctggggcgcctgcgggggaagccacctggccagcagtcctgtccgtttctgtgggttctccccagtgcagtcttgatgttctgagaggcgctggcaattccacgcacctatgtccgcaaaaagcaggatccattcactttagagaagtgccctcaacaggcgcggaggaagacgtgccctcaacaggtgcggagaaaacttctctttcctgcttaaagtagaacagtgtcatcagcttctgaaggttaatgctgagcacagttttcattgatgaggattctgggcccgtggttcaggtggaggtttgctgctctctgggctgatgacccggattccatgaacacactttcttcgtaagtggatttaacgtgccttttttgaaagaaaaatggagctcctatgaaccagtttatgatgccctcgtggacagactcagtctgattttggaggccacacgactggcaggtgtggctggagactgcagcatgtgcgtgtctgtctgtcctgtgtggagccaaatcatcaccatcagtgccagaagcctcccaaagcccagtgccatgggattg

SEQ ID NO: 7052 - DNA, 1043 bp, Homo sapiens
tttatatcagaatcacttaatgttaattttataaacttaatgattaaaatgagtgttatgggcagttatttgtattaaccactgtagaaaagaagggttatttacagaagctattcagaaggcacactgccattatcctacctcaaagataaaaacattcagatacgcacacacatcaaacttgtttcatttttaataaaatgtctaatgttacaatctaacgaaaaacacctccagaaaacttgattcttggtctcccatctgtctaaagcactccagtcccagagttgttttttctgaaacagggtcttgctcttgctcaggccgtgtgcactatcctggctcactgcagccttgaactcctgggctcaagggatcctcctgcctcagtctaccaagtagctggggctacaggtgtgtgccaccacacgaggctaatttttgtattttgtgtagagacagggtcttgctatgctcccccaggctggtctcgaacttctggacttgtgatcctcctacctcagcctcccaaagtgttgagattacaggtgtggagccatcacactggcccagtcccagagcttagtacctccaactggttgtttttttttttttttttgagatggagtctcgttctccctcccaggctggagtgcagtggcatgatctccactcactgcaacctctgccttctgggttccagcggttctcctgcctcagcctcccaagtagctgggattacaggcacgtgccactgcgcccagctaatttttgcatttttattagagacggggtttcatcatgttggccaggccaatcttctgacttcaggtgatccacccacctcaacctcccaaagtgctgggattacaggcgtgagccactgtgcccggccatacaggtggtttcactcagagttcagccattgtcatctgtgagggggacacgtggttggctttgttgtgtgctaactttgatggtgaccagggggttcactgagctctgtaaggtgctgaaactccactgatgtttgtgatgaaaga

SEQ ID NO: 7053 - DNA, 1032 bp, Homo sapiens
tgaaagtgactatttgggatgctggggtggaatccaggcaaatagattgaaaaagctctgggataaatgtcagaacagagggaggcagcatcccagaaaaaaaacctgaagcagaggagctgtgaacccccgagggaactagcaccccaaaaccatacaaagggcttcttccccaggggaggtgggctctaagaaattgctgttttacctttaaagcttctcaggttagtggggagagaacaaaagagacccgcctgacaaaagatttcaagtatcaagtcagctgggtaggtaaatcaggtccctggcttccaacggggctcgtttccctccaccttcctgttgcctccaggacctctggcctcctctcctccaggaccctccagggcctattgcacgcagcctcaggcatctgggctccaggtatcccactgctgcctcatgcagagaccttggcttctccttaagtgttgttgccagccttatctttcactccacctctagaacctcattgtgaccatctatgaaatgcaagtcttggacgagaatctcgatgtctgcaaccccttcaggtctcaaagcacacaatgctacaactccactccaaaataagtagaaaacatcttttcccctcatacaactttgcccatggtgagttgcctctgacaagagagagaaccatctgccagttgcagacacagcagtgggtgaagaggtgagggcttggattattaaacacggccctccagagtaaatgggcatgcactttactgaactgatgccctcctggtgaagacagtgggtccttcaaggaagtgatgcccccgccaccgtgacacggtctcgtcacagaatcctacctctcctgcatgttagcagtgacatgtctaggagaaaagggccaagttcatggctacagtgagctataatgattgtgctactgcactccagcctgggggagtaagactgggcttgtaaaaaaaaggaaaaggacaaatacgagcatcctgcgagtcaacaactttagctaga

SEQ ID NO: 7054 - DNA, 1039 bp, Homo sapiens
gaaaatgtgccctgctgatgatatttaaagaagttactttctgcagggttaaccagtgaaggctcgtacaccagaaaatgtggcctgctgatgatatttaaagaaacgggctgggcgcagtggctcacgcctgtaatcccagcactttgggaggccgaggtgggccaatcacctgaggtcgggagtttgagaccagcctggccaacatggagaaaccccatctctactaaaaatacaaaattagctgggcgtggtggtgcatacctgtaatcccagctactcgggaggcggaggcaggagaatgcttgaacctggaaggctgaggttgcagtgacccaagatggcgccattgcactccagcctgggcaacaaaagcaaaattccgtctcaaaaaacaaaaaaaaagtctgctgcaggattgcagggggcatcacaagtggtacattagtttttttttatgatttcatagacaaaaattattttttgaaatctgacaataccaactgctaaccaggatatagagaaacaagaacttgacaaatgggatctagttaaactaaagagcttctgcacagcaaaagaaactaccgtcagagtgaacaggcaacctacagaatgggagaaaaattttacaatctacctgtgcggtggctcatacttgtaatcccagtacattgggaagccaaagcaacgaccagcctgacaaagggctgatatccagaatctacaaagaacttaaacagatttacaagaaaaaaaccccatcaaaaagtgggcgaaggacatgaacagacacttctcacagtaagacatttatgcagccaacagacacatgaaaaaatgctcatcatcactggccatcagagaaatgcaaatcaaaaccacaatgagataccatctcacaccagttagaatggcgatcattaaaaagtcaggaaacaacaggtgctggagaggatgtggagaaataggaacacttttacactgttggtgggactgtaaactagtgcaaccattgtggaagtcagtgtggcgattc

SEQ ID NO: 7055 - DNA, 1026 bp, Homo sapiens
aaaaggacctgcatacttcagataaagttctttttctttcccagctagcatctcgtacagccacagtgcatttgccaaaaccaggacactaacattggtacaacatcatcacccaagccacacacctgtcctaatcccacaggttcccgtggacatcctcctcctgacccagggtccccacccccccctgcgagttggcggtgtacggagctgtgtgtccccaccctcccgtcccgccccccgcaggctggcggtgtacggagctgtgcgcccccaccgcgccacgagctttcagtgcacagaactgagtgttccccaccccacgccccgccctctgcgagctgagtgtcccctcatggagctgtgtgtccccccaccccgccacgagctttcagtgcacagaactgtgtgttccccaccccccgccccgccccccgcgagctgacggtgcatggagctggggtgcgcggagctgtgtgtgtctcctcgggctcctccggctgtggcgccgcctgtgtctttccttgtattgtgtggccttggtccttctgaagacttctcgtctgttatttcataaagggtccccagtgtgggtttagctggggttctctcgtgacgggaacgaggtcgtgcattttggtaggaatagcatggatggtgcatcctccgcgtggagcagagcaggtgtgatgttgagggcgatgttgctggaccacggggctgaggttgtgtctgctggtttctcctcggggaaggggcttccttttgggaagtccctgttcagagctttcctccgtagttaatggctctccgagcgctgctttgagactgtgcagggcctgcttcttgggcctggttcttgagtctctgctcctggccttggcaccgggtgctctcgggctcccaggcactggcctgtcgtgcttttccactccctgcgatttgctgtaaggaaaggctgttccttctccccatttgtctgtttgtttatgtcagtagggacacgtggatacttattccatgggc

SEQ ID NO: 7056 - DNA, 1028 bp, Homo sapiens
tttggacaaacaaaaagggaaggaattcatctctgttggacctgtcctataagacatgttaaacgaagttcctcaggggaaaggaaaatgatttaggtcagcaacttgggtctgcataaagaaaggaagcactttagaggaggaatgaatagaggtaaaatgaaatttttaatttttcttaattgatccaaaagataactgtttaaaataacagtagtaacaatgtaatgagcaattatagcatacagataaatgaaatgaatgacagcaatgtcatcaggaacaggaggattgcacgagaggtgccgtcacaaggcatcccactgcacatgagggggcagagtgtcaggtgaaggtagactgtatggtaaaggtatactgcaatgtccaggccaaccactaaaaatatttcaaaaagaagtataattaacaggccaggagaggagataaactagaataatataaaatgcttaattaaaaccagaaaaggcagaaaaatagggaaaaaggaagaacaataaatagactacagttacaaataaggtagatatcatattgaactatataaatgaccacttatttatttacaagacagcgtgtctctctgttacccagactggagtgcaggggcatgatcatagcttactgcagccttgaactcctgggctcaagcaatcctactgcctcagcctcctgcgtagctggtatcacaggtgtatcccaccacacccagataatttttttttgtagagacagggtctcgccatgttgcccagcctggtctcaaactcctggactcaagcaatcctctcacgtcactggaactacaggcatgcactgttatgcctgcctaatttttttgtcttttatagagctggtgataaggtttggctgtctccccaccccaatctcagcttgaattgtgactcccacaattcccgtgtgtcatgggaggaacccagtgggaggtgattgaattatgggggcgggtctttcctgtgctgttgtcatgatagtgaatgagtctc

SEQ ID NO: 7057 - DNA, 1051 bp, Homo sapiens
tctctcagcttgctgcggggctggaggccctgctcaggggtaggcggatgccccacagaccacagggtgccagggcattgggcctgtggccggcagtgccaagaggcagcctggctggcacaagggacgggcacatcggcctcagcaggggccgcgccaggacgcatggctgtgacacacttgggcacccctccgtgtgaggtcctgatggaggtgcgccgaggctgggctggcctcctgtgcaggaatagaggccgttgggccttgtcccagccggtcacctgctgttgcggtctcagggagccaacacctctgagcctgtttgttcaccgctcccagggtaacaacaggtcccgcctctgagtgagccgcactccaccccggtggtcacggccggctccagggcctgtgaatggcctgtggccgctgcccttggaggtgaccactgtgccctctcaggctggcaggagaggccgttccctgggacttctcctacacccacagggaccccatgggattagagctgaggtccggggcgggggcaggtggtggagaccaggctctggggttactgtgcctgggagcagcctcctgcttcaggtgcaggcaccggacatgcagggtcaggggcccagcaggagctgcctggccaggcttgtcctgcagctgggaatggggacccagagaaggcaatgccacccacacccccaccaccgcctgggcccaccgagcctgagaggggaaggcagctcctccccagggtgagccccagggcctcgggctggggtcctgcccctgtccaggctcaaggtcctctctctgctcccctggtctctccctcaccacccacccacccacccacccacccacacctctactgagggccaagcactccactgggcccaggctagaagggggccaaatggggagggctgtgaatcaccagttcccaaattagtgcataatcacacacaggaactgctgagaaggaagggaagaggggcttgaagcagagcatccagcgagaaacctggcctggactgggatccgg

SEQ ID NO: 7058 - DNA, 1039 bp, Homo sapiens
gagggtgggggcaagtgttctaggcaggaggagggcagggcatgttccaggggttgcggaggtggtcagggggcccggtgggccaaggcacagactctgggtgctgttggagaattacagacagaggagtgagatggtcttgttattatttgtcagttaaaaataaaatgaaactttaaaaaaatctgatagctttacaaataaaagcagtgacctccagctgtgaggacagggagagtgacgggggacggggaggctgggcggtgtgcaggtgtcgctcctggaactaggggagccacggtctgtgccccgcatcctcaggggtggctccagttctcgggaggtgcctgaggcctggctggaggcatctcaggggaaagctcagaggcgggtcaggcagagggctgggggcaaggatccgtattcatcgggggggacctgggccaggacaatgcttggcggggagctccacagactggctgcttgaggcagaggctttggagcagcagaggcaggtggagatgacaggtgactggatgtgtgcactgtgcgggagcaggaaggagggtggcggagagtgggtggcactggccagccgtgtggggaggacctgaggggctcgggaccttgcccgtcctgcacctcagcaccactgcaggggaggggggcgtgcccagaggggcggcgggctgcctggtgttttgggagccatgagggccaatggggacacctggtcctgggagccgtgagggccaacggggcacctggtcctgggagctgtgagggccgacggggcacttggtcctgcacaggcacctcctgtgcttccctgtcgtggccagggcaggccgtgctccaccgacgtgcggactggaagctgggcacctccctgaagtggggactcaatgctctcctggtgtcccggcctcttgggcaagggggagatttcacagcttccagacagtgcaggctggaggggtccagcctcctgtggccccaggggcccaaccctttcccctcctgccctggcaggggactt

SEQ ID NO: 7059 - DNA, 1034 bp, Homo sapiens
gggatggggtcagcctcgagttactaaccgggcattaggggatggggtcagcctcgagttactaaccgggcattaggggatggggtcaggctcgagttactaaccaggcagtagaagatggggtcagtcttgagttattagtatttatcggggagagcagagagagcttaggagaccacattgccactgtttagggtcagagtggtcccgcaggttaattcacttcacccagcctctcagggatgtaatgaggctgctcggggggctgtctcaggcctctggccagtagtccctgtcctctccagcgaccgctctctcctgggtgtcagtggtttttgggagtccaggtgcaggtctcagcagcaactctgaggttctgcatagctagtgccacctgtgacactgctgtcactccaaggtgcacctcaccacacctggagcagcgcccgtgagaggagggaagcgacacccttgggctgagcttttccgtgaaccggcagctgtgtcccttgacgtgctgagagggcctggctgtgagccgcatggtacgaaccttctgaatgcaagtggccaagccggcattctggctgggctcgctggccacaggacgtccactgtaggacagctgggagtgggggtgtctggctatttcactattaaaacaagtggaaacactagtttggtcccgcctgacctcatggaagacggtggaggtggcagccgccagagtgtgaggggccatggtcgctgacctcgcctcctgttgtcttagatccttggcactgcaggggcggttctgccagacatagctgttgtctctttggccaccaactggcccctatggcgtttggccttcagggtggtcattgggtgcgtggctctctagggtggacctggccatccttgggtgacagtgggccatgtggtggggactctgcaggccacctggaaaggggtccacctgaaaggggctgcactgtggtccatttgggccagtggcttcagtagccacacgctgcttggtccaggttcct

SEQ ID NO: 7060 - DNA, 1035 bp, Homo sapiens
ttattttttgtagagacggggtctcagtatgttgcccaggctggtctcgaactcctgagtgcaagcgattctctgcctcagcctcccaaagtgctgggattacaggcgtgagccacctcgctgggtccccactgttttttttaattaaatttttagtagagatggggtttcgccatattggccaggctggtctcgaactcctgacctcaggtgatccactcgcctcagcctcccaaagtgctgtgattacaggtgtgagccaccgcactgggcccccactgtttttttttaattgaatttttagtagagatggggtttcaccatattggccaggctggtctcaaactcctgacctcaggtgatccactcacctcggcctcccaaagtgctgggattacaggtgtgagccaccgcactgggcccccactgttttttttaaattgcatttttagtagagatggggtttcaccatattggccaggctggtctcgaactcctgacctcaggtgatccactcacctcagtctcccaaagtgctgagattacaggcgtgagccaccgcgctgggcccccactgttttttttaattgaatttttagtagagacggggtttcgccttattggccaggctggtctcaaactcctgacctcaggtgatccactcgcctcagcctcccaaagtgctgggattacaggtgtgagcctgcgctctgctgatattttcttgttggtgactgcacgtttgccttgagctgtgagctctcatagaaccagatgaccatttgggctcactgttaactgtagcccttctgtggatgccccgtgggcaccttcgtatccatcagtttcatctctggccctgggaagcgggaggagttcgggtggagctggagggttttccttccgacgaggtatgtggagtccctctgcgatcctgtctggggaggggagaaaggggtggcaaggcttctctagctgtcactgggtccttgaacccccgctggcctggtgctgctgctggtgctgaccacacac

SEQ ID NO: 7061 - DNA, 1049 bp, Homo sapiens
gagtccccgcggaccctcaggggccagctgtgcctttgcattggccacagcgaggaagggggccagggcatgcagtttctgcagggccacgtctgcaggtggccatgtgggctgctcgcgccggtgggggcttgtgtgaggtgtgatttattttgtgttcaatccatttttttagagtataagtgtcttccatgtctatgtgctcattgtaaatctttactttgataacatatacctaatacttgttattttaaccactggtaactgtgtagttcactgccgtcctcacctacattgtggtgtttgttggtgagtgtgtagctcactgcctttcttacccacattgcggtgtttgttggtgagtgtctggctcactgcctttcttacctacattccagtgtttgttggtgagtgtgtagttcagtgccttccttacctacattggggtgtttgtcactggcaccctgtctatctccacgtcatgttttatccaataaatttgtttttgattcctccctcttctttccttccgtggacgccctgtgtaactttctttattgaggtgccttctgtaatatttttctgcagtattctaattgtaattctcttataaatgatgctattatgaacttctttgttgacagagcatttttgctctttagaattacttttttaaggactgactcccagaaatagagttccacatttgaaagtaatgagttttttttttttaacatttcccatattttcatagtttttgtattgttctttgagaccaagagaagaatttttgggtgtttaagagaaaaagaaggcatgtgctttctttcatatggtggctgaacacacgcagagctgcttggcctgtgggctgaaatttgagcatttctttaagacctagtttgtttattttttactctcacttcagtggttttaaaaataactacattaaccaaacgtggctgtacctccgaggacttcttgccagagctgctcctgggaaagggttcagtctctctagtttgtgcccatcacccagtgggacagct

SEQ ID NO: 7062 - DNA, 1030 bp, Homo sapiens
tcaagggccatctcacttgtttgggcatccagtgccagttgatcaatgtccttgtccctgagatggtcacacagctgtcatgcgtggtccccaccagtagtggagtctgtacaatcccgggaatcccccgttcggtctccgaccctcgccctgtcaagcagctgcccacacacaagcggcctctcctcacgctctgtggggcacacggggaccacggggcccccactcacaccagagccaaggccctcacccctgtgctcaggatgtagctcctcctgtcagccttcctccctctcccccttggtccctcctccctctcccccttggtccctcctccctaccagcttctttctctcagctctgccatcctttccataaaatggcagcttccttgaccctctcactctcctctgccatgacccaacgtaatgtgtttcccaagtaggggcttattcagatgaaaaagaaaaacaccactgggggagcagcaaattagacattgcagaagaaaagagaaggtgactgaacttgaagacagccacaaaattaaagtgaaacagagagaaggactgaaaagtggatagaaatcactgtgaaataccaggtgtcctaacacgtgtggctgcagccccaggaggagcggggaaaggaggcagacagggtgatgcttacagatgtcatggctcagatttcttcatcagtccatgaaacttacagaaagatccaaatactgcaacaagcttcaagccgaataaacataccaacgcaggccaaggtccgattgctgaaagcaagttacatgaaggcccttccttgccacccatcatcctcggaagagtggggctctgctccccgtctctgcgtgctgccctgccatgggagcctcatctgtgccagtcgccagctacctcttcctcatggggaccatcgctcagctctttccagcttcctttagatataaagacacaggtattttaaaagtgaagggacggaggaggatgtaccttgtaaaacagtcgttagaagaaag

SEQ ID NO: 7063 - DNA, 1029 bp, Homo sapiens
agctggaggagctatattaatttatagcatcaaatacatatattagaaaagcagaaagatctgaaatcaattatctaagcttgtaccttaggaaactagaagaaaagtaaattaaaccaaaagctggttgtttgaaaaaaacaataaaatggataaacctctagccagactaagaaaaaaaatgacacaaattattcatgtcagaaattatcagaataggcagagcagacttcagagctaggaaagttttcagcagtaaagagggacattacatcatgatgaaaagatcagatctccaagaatacataacaatccttagtatctagctgcctaacaacagagtgtcaaatacacaaggcaaaccaagtagagctgccaagagaaacagatgaacccactatcatagttagagacttcaacaccctgtatcaggaatgaacagatctggcaagcataaaatcaggaaagacatagtttaactcaacagcaccatcaaacaaattgatctaattgacacttataggatacctcatccagtaacagcagaatctacgtttttgtcaagctcgcctggaacattcactgagacatcacattctgggccataaaacacacctttacaaatttaaaagaacagaaaccatatacagcatgctcatagattacaatggaattaaaccagaaatcagcaccagaaaagtagctggaaaatccccaaatacttgaacattaaacaacacatatctaaataacatatgagtcaaagaagtctcaagagaaatttaaaaatattttgaaccaaatgaaaacgtaaatacagcttaacattcatgggatattagcaaaagtaatgtttagaggtaaatttatagcatcaaatgcatataagaaagagctaaaaagaaaaaagtgctaagaagaaaggaagaaagagctaaaatcaattatctaagcttctaccttaggaagctaggagaagaaaagaaaattccaaagtaagcagaagaaaagaaataatgaaaattggaa

SEQ ID NO: 7064 - DNA, 1054 bp, Homo sapiens
gtgaggtgtttatgattattaagagaaacttttaagcgattaactaaaatattctcagtagttttagtaattttatactgtcgatgtttttgcttatgtaaagttgtttgatcagagaatgtggtctctaccatagcagagaaacaaaccaactttaatagattcccaattgtacacaacttaggcctttaaaaatacagtgccaaaggtttcagctacggtcgctttcaggggttaaaaaataaaaaaggaaagaaggaaaaaaaccaactcctagcaagttaggtgtcctggttggatgaatgtctcacggccagtttgcttcccacactgcactagctcctccttgggggaaaaaaaactagccccattcgagtctgatattttttagggccccagtgagactgccgatgacgctctcccgccacctgccctgtcaccgtggggcctcccacggtgtcccaggccccagcagcctcgcgcccggttcccactgctgtgttagggaagcgcccgctgttggaaatgtaattcggaacgttcaacccgtgactctccctaagtctttaatctgcggtgtcgtgaggtcgcagttgtcctggagacacgctgacgagccccccagccgtcgcggtggagcagctgctgggacgatgaggcagcccctcctcccagtgcctccgccgcgtaatgagaccacttgtcaaaacagagagagacacccattttcaaggcctaaaaaattgatttttatggctcttcttgtaattctctttttgaattaggcacatgatattgatgtgggcctacgttttaatcataatagctactgacaaggtaattaattttagaacaactgtttttttttctcctgctccaaatggcactatattgaaattgaaagtgagctctgggagggcagcggggctggcactcaggtgattgcctcggccgtgacagccccttcgtcttgcggccgccgtgcaccctttagaggcagctgctgttattaatgggctcaagctgttctgtcagcagagcagggcgaggaagt

SEQ ID NO: 7065 - DNA, 1047 bp, Homo sapiens
aagtggatttctcaaaggaacagtaagcaggaacgtggcagagctcctgcgggcctggctgacccaggtggcgtcttgaagtcccagccgcgttggcgtgtcctgctgtgagcctgaccgcaagctgcctcccctctgcccctgcagcggctgccaggacatgaggctaacaagcaccgagggcagcccaggaacccgatttttcacttcatttcattttaattcagatctgataattcagatctgatagagccgcgtggctattccatgggacagtacagaccaggtgactttcaaccagtgcaggggctaccacgggggaggaacattcccgtggacttgctgtccagccagcttgggctcagctgctccccagtgcatccctgttctcggaaccacagccctgaggtgggccctgggtggggtctccacgctgcctggcagacgtggcggtcattcacatgggatggcgtggtcagccctgcacaatcccagggaagagtcaggcctgggttccccccggtgagaggtcagagaacagagaaggcggccctggaggtgaccgcacccctcccgcatatcaggcacccctcctgcgtatcaggtgtccctcctgcgcatcaggcgccccctcccacttaccaggcatccctgggagtgactgcgtgcctcctgcatatcagatgcccctgggagtcactgcgtccctgccctgtatcagacgcccctggaagtgactgcgtccctcctgcgtatcagacgcccctgggagtgaccgcgtccctgccccatatcaggcggccctgggagtgaccgcatccctcctgcgtatcagacgaccctgggagtgaccgcacccctgcctcgtatcagacgcaggtgttttcagcagcaggttttcttcgctggtgccgtttgttggtgtcagacatgaggaggggaccaaggaagggcacgcaggaggtggtggctgagcctccgttgcatctgctgggagtgggggctctccagccccgcgatcagcttgggagggagctggtctctggt

SEQ ID NO: 7066 - DNA, 1050 bp, Homo sapiens
cactgccctcgccacgtgcccagcgtgctctggatggtgaggcaggccagtggcagcctctctgccctccctgccagctcctcagccacagggacgcccttccctgagggtggaggtcagggcggtgagggcctgcagagggcacgtgagctaagccgtgctgctcggttcactcacttgttattctagagtcttggtgtaaaatagcaatggcaacaacagaagcactgatttaaatcattaaatttattttttaatttttctgtttagaaagagattttatttggtctgtttctatatagggcctatgacatcaactgaaaataaaataaaatgttatacttaattatagtgatgacattaggcttcgtatttaggggattttttctaggaagttcactttgcaaatattacccaatattttcaactggtatattgatgccaagaatcttctcattttatagaaaaagaagacaaaaaacaaaagacgcttggcattttctctggtctatgctgggactctgttcgaggaactgttttttggactcactcctaaatgattcataatccgtagtgtgttcactaatctttaatgcacttttctatattttttatgagctcatactttatttaaaaattcctctgactgcccttggtttaaaagaaacccatgggaaaggtagggcacagagcaggtctctcgtgccaaggcagggggttgctggagaccccggacactgtgtagcctcattcgtcctcctccttcacacatcgcacccggctcccttactagcaatcagtggctctgacaagcatacaggggaccctgggacgagggctgagctctgtgtcctgcgtccccctccctttgccacatccccctccccacgtccagccgtgccagtggaaggctggggatgtccgggaggagccacccagaggcacagcaggtgcttctgccgccgggcagggccagtcctgtggagccacccctgggcccagcagagggtgcccggcatggtgctagacacagcctgagaaagagacccg

SEQ ID NO: 7067 - DNA, 1015 bp, Homo sapiens
tgtcagcgtgtgtgcgtggatatgtgtgtgagcaggcatatgcatgtgagcctgtaggagtatgcatgagtgtgcgtgcatatgcatgtgaatgggcaagtgtgtgtataagcaggcatgtgtgcggacgtgtgtgagcaggcatatgcatgtgagcctgtgtgagtatgcgtgtgtgtgatcgtatgcatgtgtgtgatcatatgcgtgtgtgtgatcatatgtgcatatgcatgtgagcaggcaagtgtgtgagctggcgtgtgagcaggtgtgtcagcatgtgtgagcaagcatatgcatatgagcgtgtgtgagcatgtgtgagagcaggcatatgcacatgagcgggtgtgtgcatgtgtgagcaggcgtgtacatgcatgagcaggtgtgagcaggtgtgtgcatgtgagccttcatgagcgtgtgtgtgagcgtgtatgcatatgcatttgagtgggcgagtgtgtgagctgtgtgagcgtgtgtgtgagcagacatgcatatgagtgggagtgtgcgtgagagcaggtgtgagcgagtgtgtgtgagcaggcatatgcatatgagtgggtgtgtgcatgagagcaggtgtgagcgagtgtgtgtgagcaggcatacgcatatgagtgggtgtgtgcatgagagcaggtgtgagcgagtgtgtgagcaggcatatgcatatgagtgggtgtgtgcatgagagcaggtgtgagcgagtgtgtgtgagcaggcatatgcatatgagtgagtgggtgtgtgtgtgtgtgtgagcaggcgtgtgcatgcatgagcgtgagcaggtgtgtgcatgtgagtgggtgtgtgtggggggtggtttgctttttagttagaaagtttaggcagaccctagcggcagccgctgaggcctgagggaggtcctggccacccaggagcaggtgctgaccccagaggaggctccaggggcctgacacggctctgcaggtctctcttggagactgaggaagactggggagtgttcagtggtgac

SEQ ID NO: 7068 - DNA, 1218 bp, Homo sapiens
cacgcctgcgaggggcgatggtccttctgggctccagagctccctgagtgctccatgagagctgtgggcccgctgtgagcagagccctcattgcaagaggccatctgtgcccctgcactttggtgctgtccaggactgcgtcccccacagctgtgaaagctctggggtcactgcagaaggttggaggaatgctgatccgggacaacttcattaaggacgtggcatcggagggccccacacagcagagctgtcattctggctcacctgagcgggagctttgctgaggactctcctttcctctgtgcccatctctggtacggggtgactgtggcgcagcgtgtgcttcctcatgacgcccgggcccctctctcccatggcccaggtcaaggcaggaggacgctcggtttcccatctgcacagctgggcctgtccttcctgggcggtcctttgtccactgtcttcctgaggggagtttgaggagaagccccaggtctaactctgtggcagacaggcccaccgccctgcatctcgggacacagcaggcagtgtttccactgtaaacgcggggagagggacccactttcagagaaagaatttggcatctggtgagagcatctcgtttccagggggaatttcagaaagagtttgcatccgcataatataaatacacacttggcaaaagcaaaacacaaagccaggctctttggattcttagactaaaaatgtgctgggaccgccaggcttcgtgccacgtctggttcgacctcgactccctggtgtgctctgcagaggtcatggcgtcttcgggtgccacatgcccgtctctgggtggcacgggcccctgagacttctatgaacttgcatctccagcttttcaagttttactggagtgtcattgaggcagtaacttgatgtgagaaagaaagcaaatgcctagattgtctggagaccacacgctgggaacaggaaaggcactgcagtgcactgtgggggcatgtgttcatttgacagcactctgggtgcctgctctgagccaggccctgctctgggttaacaagacagacagacacatccctgccatggagctctgggggtggcaggggacagcatggtggggaggagcctgggaatagtgtgctcagcaggtgagcagcacctgtgggggaggagcctgggggtgccacgaggaagcttgctgaggatggcatggctggtggg

SEQ ID NO: 7069 - DNA, 1068 bp, Homo sapiens
ccctgaccctcagcgttcccagggtgcccatgtgcccagtggcattccagaaagatctgtggaccccgaccctcagcgttcccagggtgcccacgcgcccagtggcattccagaaagatccgtggaccccgaccctcagcgttcccagggtgcccacgcgcccagttgcattccagaaagatccatggaccccgaccctcagcgttcccaggtgctcacgcgcccagtggcattccagaaagatccatggaccccgaccctcagtgttcccaggtgctcacacaggcctggcttcctcttcggcatttggctgggtgagatcagcttccgctttcccgctgcgtctgccctggcggggggtcccgagtgcctctgcgtgccaggctcgtccacctgccgcctcacactcttccccgtgcagctctgcccctgtcaggacacgttggccttcctgtgctttcctgaaggctgccagggctctgaggccgtgggaaggcgtccttgccacggcctggcccctgaggcctgtgtctgacccagctcctcagaagctgggagccgagccgccatctgtacctgctggtctggcagcgtctccttcctgcggtgactcccggttttcagaatcgtttcatggtttttgctgttgttgtttgagtgaacgcattgcaaaccggccgagcagccaagtacatcttcccatcactgccacagtccccgccctggttttgggcagaggtgagctcaccaccttggagtggttcaaggcaccttatcagcattggtgggcaggaccctcccgcgggcagtagaccctccatggggagagcccgcacctgctgaccctgagaggagacagcattcctagcgcagagctccggatacagccgcacccggggcgttggtgcgtacactggcagagtgacgccaggaaatgtgtcattggcggatggttctgaagaccagcggggtcttctcctgcaaaggtgtttgccactgatcccatggatgaatagaactctgctctgaatgaattgtaactgaatgctgtctgtcattttgccagaa

SEQ ID NO: 7070 - DNA, 1089 bp, Homo sapiens
atggacatggggtagcaggaagtctcagccccagagggcttggcaggagccgccctctctgcggagttcttcccagcgggtgtgcgttggtggctggcggggaccccccacaggaactaggtctcaggctgtggaaagggagctgccccagggcccaggagggccggctctgcattccgcatgttcccagagtgaaagagaatgagaaggagacacacaagtgctgttatgacctgggttgttggttggcaaatacagcatctaatagaaactttcttccatcccagaataccctctaccatctgctttggtcagggtgccgctcgaggatttaaaagcaacaagaagaaaaccaaacaatgctgatagactcagaaaaggagtggggggcagtcaccactgctgggcgtggcatccgccttgggcctttctccgaccttctggtgtggccgccctgggggccaggccctcgccatcctccccatccttgttcctcagcaaatggcattagcagctgtcatcagaagctgtgagggacccacagattttggaaacgacctggacacactattgggaaggagatgtggacggcctgtctcctcctgcagggcccaccctaagaatgtatttttaaacacatgaaataagtatttttcactgatggtcttgagtcttcatttctgtgttgagtcaggtgcggagtggttattgttacccatgggtattctgttttccaccctcagttttcaggaagatttataaagtcctggcacccctcagaggtgggtgatggggtaggatacagcactccacctcgtcccggacctcctggctttgggagccacacccagttgtccttgccacaccacttagggagtagacctggtgggggtaggatctgatgcccacagggaggggcactggctctgggggcatggggtgcttgggggtgtgtgggatgctgggggagtggggggtgctgccccagagggtgcaggatccatcactagtgccagcggggaccacagagcctgcatcaggaaatgcaggccaggagattggggctggcattggattgcagagatacac

SEQ ID NO: 7071 - DNA, 1125 bp, Homo sapiens
tctctttatctctttgtcttgtgtctttatttcttacaatctctcgtctccgcacatggggagaacacctgctaagccccttaggactggaccctacagtgatctgcccaccttggcctcccaaagtgctgggatgacaggcgtgagccattgcgcccagccgagaattgattgttaaagagtctggtatggccaggtgcaatggctcacacctgtcatcccagcactttgggaggccaaggcaggtggatcacttgagttcaagaccagcctgggcaacgtttcaaaaccctgtctctacaaaagagatgatatggtcaatgtctgtaaccccagctactcaggaggctgagatgggaggatcacttgagcccaagaggtggaggctgcagcaagctgtgattgtgccactgcactccagcctgggcaacagagcataccctgtctcaaaaaaagaaaaagaacctagcacctccctccatccttctcctgcttcctctctggccctgtggtctctgcacaccaggcctgcttccccatccagcatacgtggacacagcctgaggccccaccaaaagcagatgctgatgctgtgcttcttgtacagcctccagaactgtgagccaaataaacctccttttttttacagcaacactaaagggattagggcatcagccactgggcaatctcagtaaagggtgcatgggagttctttacatgatcacagttgttctccaaatttgaaattatctcgaaatgttaaaaaaaaaaatacagactgggcgtggtggctcacgcctgtaatcccagtactttgggaggctgacgtggatggatcatgaagtcaggagattgagaccatcctggctatcatggtgaaaccccatctctactaaaaatacaaaaacttagctgggcgcgatggcgggcgcctgtagtcccagctactcaggaggctgaggcaggagaatggtgtgaactcgggaggcggagcttgcagtgagccgagaccgtgccactgcactccagcctgggtgacagagcgagactccatctcaaaaaaataataataataaggccgggcgcggtggctcacatctgtaatcccagcactttgggaggccg

SEQ ID NO: 7072 - DNA, 1050 bp, Homo sapiens
cacttatactcaggatatgcttaagggagaacgatgatttttaatatttaatgaatgttaataaatctgcgaattacttaaacccacaaaacccaggaacctccccgtccccccgggtctcctcgcagtcccgccccgacgctcgacccaccattcgtccctccctctgggcccgggccccgcccactccgggcttcgccggaggcggaggcaacgtcgtgcgcacgcgcaggccgtggtgcggccccttggagcgccggaagcccgcagtgccggaggcccgcagcgccggaacctcagaggcgggtcgcagcggcgcagaggaggtcagctgcgggagcgtttccggggacggtgccgccatgagattgaccccgcgcgcgctgtgcagcgccgcccaggccgcctggcgggagaacttccccctgtgcggtcgcgacgtggcgcgctggttcccgggccacatggccaagggtgaggcacggcggggaggggcaaggtcatgcctacggccgcggcgcctctgcttccctcccaccccggtttcggccgtcgcctgcttctcccggtcgttctgggctggccccgcccctcctcccttgtctcccctccttccccgctctcacccgctcccggagccgccgggaccccttcccctgcgcagctgcgggagaggcccgttcccgcgagtgcccccgcggcgcagcctcggacccagggcctgcttgacctcctacctctggcccgccgcccctgtcctctgttcccagcaagttccttctgcccttttaatcccccgaagcctccgtttccacatgttcttgacaagatagacttttctgagtcttttggggactaaatgaaacagtgggtatgaaggcacctgttcagttttaactggtatcttgagtcgttctcctgcttaacgtctttggtaattcttactgtttgtcacaattcggccccaagaagacctctggggccagcccagcccgtctaggtgttgtgatggccactcctgcgtcggctccgcgtgtactgggggccgag

SEQ ID NO: 7073 - DNA, 1033 bp, Homo sapiens
tatagtctttttaggttatttatggtggcgtgtcattctggacggttcagcttgaatcgatcactctagaaaggttgtgagccccttcgctgaggcgtccttctgttttccagggctgaagaagatgcagagcagcctgaagctggtggactgtatcatcgaggtccacgatgcccggatatcctttcacagagcaggggaggcccctctgcctgaagtcatattacacattagaattacctggggaggcttttaaaaatatgaattgcgaggcccctttctagaccagttaatcagaatctgtgatgtggggtccagactgcgtgtctttgaaacttcattgttaatacatatatctgcgtcactcaagcctgacggtacggtgcagcagtggaatcctctagatgggctatgaaactgtttaaatgttcctgccaactggggcttttctcctgtacttgaggaatgaattggcaggatgtgatgattcgttcactgatggcaagaaaaaaagttggttggctggtaaagctttggaggaatttttaccttaattttgccacatcccactttcaggccgcaaccctctgtttcaggaaacccttgggcttaagcctcacttgctggtcctcaacaagatggacttggcggatcttacagagcagcaggtaaaggcctttctctcagacgccttcagcagtgtggctgtgttttcccgaggtcgcttgttctaacggaagagttgccggacgcacacttgtcagtttgcccaggcaggctctgctttagaaacagccctttgctttgcagaagcgtgccagcatcgtttctcatatggcgtgcccccatctaatgtgtggttcgtgacctggacacccagggagtgcacgtctcctgtgggaagtggccaggttgtgctgccagagcccgagtggtcagtgagtgcgcattgtgggcagcaagccacccaggtgccgaggcaagagaccgaggacacgagcttttccagtgtaataaaacatatgaaataaga

SEQ ID NO: 7074 - DNA, 1651 bp, Homo sapiens
tgggatgggccagcccctcctgcctggcctctccaaggagaaggcgcagcgccccaggcagggaggcccctcctttgtcctctcattctcttcagtggaaagggccgaggccgtccccgctgggtgggcagagcctcggcgttaacctcccttcttccctgagctgacctggcctggggtccccttgcctgggtggggttgcagagtctcaggctctagcggccacggtgggccctgtgacccctctctctgcctgcgcagaacctggagtactgtatcatggtcattggggtccccaacgtgggcaagtcctccctcatcaactccctccggaggcagcacctcaggaaaggtactggcgcgtgcggctgatcacctcaggaaaggtactggcgcgtgtggctgatgtgctgatgccaccatctttcttggaggggacgtgcccgaggagcactgccagtcttctgctgaccccgcagccccagagcacatcttgtctcgttcagtccagttcacaggagggctgaacagtgggaccaggtcgttctgtgaatttcacacttaatttttctctcttttaaaatctttaacatgaagatggcttttctaaactttgatatttgttcatttatttaaatccctttggccgggtgcatggctcacgcctgtaatcccagcactttgagaggccgaggcgggcggatcatgaggtcaggagattgagaccattcttgctgaaacggtgaaaccccgtctctactaaaaatacgaaaaattaggtgggtgtggtggcgggcacctgtagtcccagccacttaggaggctgaggcaggagaatggcgtgaacccgggaggcggagcttgcagtgagttgagattgtgccactgcgttccagcctgggcgacagagcgagactccgtctcaaaaaaaaaaagaaaagaaaagaaaaaaaatccctttgatccagagaatacaaagcgtgtgaagtagacggggctggattatcaggcagggaggctgcaaggccattcctccatggcgtccgccttgcctttgctggagggttcctggactccggagtcgcaggcgctcctttcctccctctgtgcctgttctcagactctgattcaaagcaggagccccgagcacccttcactgccccgtgggctcttttccttaagtattttcaagtttaattcaagtccttgttggcttcatttttcatattaataaggcatttattaacaaacccattcatgatgtgcaaatctgaaggctttaaactacggtgaactgttattttacagagagggtgtttttggtgctaattggagcattgttacagtcatttattcttttaagtttatttttaagcgtattattttttatcagtggtattaagtgcatttatagggttatgcagccagcaccactattttcaaatattttggttacctgaaaatgaaactctgtaaatacaaagagtcactcccccagcctcctacacccctcgttccactttctgtctgtgaattcgatgactgtaactgcctcctccaagtggactcacagtacttggccttttgtgactggctgatgtcaccgatcgtgatgtcctcaaggttcgtctgtgttgtcctgagtgtcaga

SEQ ID NO: 7075 - DNA, 1050 bp, Homo sapiens
cgagcgttcccgtcacccccagtccctgctcctccttcgtgaaatcaaggaaatgagcgttcccgtcacccccagtccctgctcctccttcgtgaaatcaaggaaatgagcgttcccgtcacccccagtccctgtgctccttcgtgatcacaccttcctgcccctccctgagcccaggcagccgtctactgtccctgtaggttgctttgggttttctagaattccacgtagatggaatcacacaggatgtgcattcttgttgatctgtcactcggcacgattgttgtgtgatccccgtgtgtcgtcgtgtgttgtccgtcattcatcctttttgttgccaggcggtttcagtgtccaggtgcgctgcagtctgtcccttcacccgttgatggatatgtgggttgtttgcaggttttggctattgcagataaagctgctgtgaacattcatgtaccgacaggtctttgtgtagatccgggctttcgtttcccttgggttaatacctaggagtagagtggctggatcataggggaggcatatgtttgagtttttaagaaaccgccacattgttttccaaggtagttacactgttttatatgctggcaagcagggaatgagtccttcagtttctctaagatcagtctttaactttggcctgtctgatgggcgggcgtgtaggggtgtcgcatagcatttcaatttgcatttccctgatgacagggacgttgagcatcttcatgtgcttatttgtcatccctctctggggaaatgtctgttcaaatccttttccctttttttttttttaactgagttgtttctttccttattgctaagttttaatcttttttttttttttttttttgagacagggtctcagttacccaggctgaagtgcagtggtacagtctcagctcactgcagcctgacctcctgggctcaagcgatcctcccacttcagcctcccaagtagctgagactacaggcgtgtgccaccacacatagctgatttttgtattttttgtagagacagggtttccccatgttgcccag

SEQ ID NO: 7076 - DNA, 2016 bp, Homo sapiens
ccactcttctttgtcaaaattgctttgtcttttcctggttctttgtattctcatgcatttttcagtcactttgtcagtttctacaaaaatccctatgtttcttgaggccgggtggcagattcccctgaatttataggtcagtctggggaagaattgacaatattgtaacactgagtctctgacccgtgaatatagtgtatctcttcatttatttaggtctttagtttttctttgcagtgttttgtagtttacagtgttttgtaagatttatattgaactcttttttaaacttttaatgctaagatttatcttttgatacaaagtagatgttttcagggtacctatgatattttgatgcattcatacaatgtgtaatgatcagatcagggtaattgggatatccatcatcccaaacatttatcttcatgctggaaacatttgaattgctctcttctggtatttgaaatatcctgtagattcctgttaactgaagtcactctaccgaactattcattaatcaacctctgtccatcccctcttcccctcacctctggtaatcaccagtctgctctctgtcttaatgaagtccacgtttttagctcccacatttgagttagaacatgcattatttgtctttctgtgcctgtttatttcacttaacagaatgatctccagttctgtttgtattactgcaaatgacaagatttcgtcctttgttatggctaatatttcattgtgttttatgtaccacattttctgtatccatcatcctttgatggacacttaggtagattgcatatcttggctattgtgagtagtgctgccgtgagcatgggagtgcagtatttcttcagtatattgatttccattcttttgggtctatacccagtagtgggattgctggatcctatggcagttctatttgtagtgttttgaagaacctccatactgttttccatagtagctgtactaacttacattcccaccaacagtgtacgacagctcccctttctctacatcctcaacagcatctgctattctctgtgttttttaataaaagccattttaactagggtgagatgaaatctcattgtggttttgatttgcatttctctggtgattagtcatgttgagcattttttcatacacttgttggccatttgtatgtcttcttttgagaaataattattcagatcttctgtccatttttaaatagttatgtggttttttttgctgttgagttgaattgcttatataatctggttattaattccttgttgagtagtttgcagatattttctcctattctgtagattatcttgtcagtgctttgatagtttcgtttcttgcttcgggtcttgccgtgccgtccaggctgagtgcagtggtgcgatcacagctcactgcagcctcgaactcttgggctcaagagatcctcctgcctcagcctcccaagtagctgggattataggcacgtaccaccatgcctggcttgctgattgtttcctttgctgtgcagaagcttttcagcttgatgtaaatttttttacatttgcctattattattattattatttttgcttttgttgcctgtgcttttgaggtcttatacaaaaaaaatctggcccagaccaatttccagaagcgtttcccttacgttttcttctagcagttttgaagtttcaggtcttagatttaagtcttttttttttttttttttgagaaggagtctcactgtgtcacccaggctggagtgcagtggcacgatctcggctcgctgcaacccctgcttcctgggttcaagcagttctctgcctcagcctcccaagtagctgggactacaggtgcccgccaccatacctggctaagttttgtatttttagtagagatggggtttcaccatcttggccaggctggtcttgaactcctgacctcgtgatccacctgccttggcctgtaatagccaccgcacccggccagatttaagtctttaatcccttttgatttggttttgta

SEQ ID NO: 7077 - DNA, 1225 bp, Homo sapiens
ctgtttttccttgttcaatatactgttggctgtgggcttgtcatgcgtggcctttattgttttgaggtgtgttccttctatactcagtttgctgagagcttttatcgtgaagcgatgctgaattttattgaatgctttttcagcatttgttgaaatgattgttttttttccttggttctgtttaatgttatatgtttattgatgtgcatatgttaaaccatccttgcaaccttgagacacatcccacttgatcgtggtgaatgatctttgtaacatgttgttgaatttgggttgctggtcatttgttgaggatttctgcatctgtgttcatcagggatattggcctgtcgttttctttttctgccgtatccttgtctggtttttgtaggaggataatgccatatacagtgactttggaagtgttccccccttcagtttttttgaatagtttgagtacagttgatactagttcttccttaactgttgatagttcagcagtgaagccatcaggacctgggattttctttgatgaaagacgttttattactgctttgatcttgttacttattatcgatctgttcaagtttttccatttcttcatggctcagtcttgcagggtgtttgtatccaggaattcatccctttcgtctgggttttccagttcgttgctgtgtagttgttcgtagtagtccctaatgatcccttgtatttctgtggtattggttgtaatgtctccttttttgtttactgattttatttattttgatctttttaaaattctagctaaatgtttgtggattttgtttatgtttttgaaataattttttgtttcattgatctttggtattttttttttcaactcaatttcatttatttctgctctggtctcctgatctctgttatttctcttcttctactaattttggatttggtttgctctcacttttctggtgccttgaggttcatggttaggttatttggagtcttctgctttttttagcgtaggtgtttgttgctataaacttccgtcttagcaacacttttgctgaatcccatagactttgatatatggtgtttccatttccgtttgtttgaagaaatttaaaatttttcttattaatttctttattaacccattgatcattcaggagcgtgttgtttaatttccatgtgtttgtgtagtttttgaggttcctcttgttactgctttcttgttttatttcat

SEQ ID NO: 7078 - DNA, 1370 bp, Homo sapiens
cacaccacattcacagtattattctgagtctgtgtgtttacttttgccagtgggttttatacttcacatgttttctttttgtacattagtgtctttttctttcagattgaagaacttttttttagcatttcttgaaagttgggtctgatgaattccctcagctttactctttcatgtttgaaggtgtgtcctcagttgacagttgcatttttttttccttcagcactttgaatatatcatcccattgcctcctggcctatatggatttcctggagaagtctgttgccagttacattggagctcttttataaatatatttgctgcttttctcttactacttgtactacttactgcttgtaggattctttctttgtccttgacttttgagagtttgattattatattctgtagggtagttttatttgggttaaatctgtttggtgatctctgacctccctgtacctggacatttatgtctttctgagggtttgaaaatttttctgtaattatttctttgaataaactttctgtgccttcctcttgctcggttccttcttgaaccccagtaattcctaggtttgctcctctgaggcagttttctgtatcttgcatgtgttcttcattccttttcattcttcttttttctctttcctcttctatatgttttcaaatagccagtcttcaggctcactgattttttcctctgcttggtccattctgctgttgagagcctctaatatatttttcagcaaatgtattttttacttccaggatttctgtttgattttttttttttaatttcaatctctgttaaatttgtctgacaaatttgtgagttgtttttctgtgttttattggagtttgctgagtttttttttaactgttaccttgaattcttgatttgagcgcttacacgttgccatctcattagggttggccactggctctttgctttgtctgtttgagaaggtcgcggttttccgttagctgttgtttcttgtgcacatatgtctgtggttttgcattgaaggatttgttatccaggctttcctgtctggctttttttttcttggatgtttgcttagaggttttttgcagcttactttctgcctggagtttttttcacttctctggtctcatcctcagatttgagttctggaatattgctggtgatattcttggcactggatgtttggttttggttttctttgagagggtgagggaagccagattgcttctacttctctatttggtgatgtcattccctctattaactcttcgctatttttgatactattgtaaatggtattgtttttatgttcacttttgatttttcattgctagtatacagaagtagaattgatttttgt

SEQ ID NO: 7079 - DNA, 1590 bp, Homo sapiens
gggcgcccctgttttttcatagacgggtcctgcactcatttctttgtgtaggtccaggtttccttctggtgtgattttacttctgtctgaaggatttcctttaacatgtattgtaaggcaggtttgctagtgatgaattctttcagcttttggttgtctgaagatgtctttatttcacctttgttttgaaagatattttctctacgtgtagaattccagattgacggggttttttagtgcttgagaggggttggtctccctttctcacttgcgtggtgtctgatgagccgtctgcggtcatgtttgtttgttttagtgcttgagaggggttggtctccctttttcacctgcgtggtgtctgatgagccgtctgtggtcgtgtgtgtttgttcctctgctgcttccaggattttctctctcagtgcttttgagcaacttgattacgatggaccttggtatggttttctatgtgttccttgtgcttgtagttcattgagatttttggatctgggtctttgtagttttcatgaaatttgcatcattttgaaacttcatatctgcaggtgttttttctgtccctctactcctcaggacctcaggcatgcaggtatcaggcacgcgggtatcaggcaggtgggtatcaggcatgcagttatcaggcatgccggtatcaggcacgtgggcctcaggcacacaggtatcacgtgggtatcaggcacgcagttatcaggcacgcgggtgtcgggcaggcgggtgtcggcacgcgggtgtcgggcaggcgggtgtcgggcacgtgggtgtcgggcaggcgggcgtcgggcaggcgggcgtcaggctgcttggctttgccccaccgcagctcagtaaagctttgtgcctgttttgtggtttctgttgctgtgtcttcgggttcactcatcttttcttctgcaatgtataatctgctgttcatcccactcagtagttttcatagttttcacttccgcaagttgagtttggatcgttttaaaaaatatctttcgtgtttcagcttagatttaatgtcttgtctgctaattctaacattgggtcagtttgagttgactgatttttcttctcattagggggtctgtttttttgctttgtaggcctggcaatttttggatgatatatatatatatatatttttctttttattttattttattattattatactttaagttttagggtacatgtgcacaatgtgtaggttagttacatatgtacacatgtgccatgctggtgtactgcacccattaactcgtcatttagcattaggtatatctcctaatgctatccctcccccctccccccaccccacaacagtcccaggtgtgtgatgttccccttcctgtgtccatgtgttctcattgttcaattcccacctatgagtgagaatatgcggtgtttggttttttgttcttgcgatagtttactgagaatgatgatttccaatttcatccatgtccctacaaaggacatgaactcatcattttttatggctgcatagtattccatggtgtatatgtgccacattttcttaatccagtctattattgttggacattt

SEQ ID NO: 7080 - DNA, 1082 bp, Homo sapiens
aacagagtcctgaggggtcctgcgggggctgctccatccacgtgccctggagcagggctgaggtcctgggaaggaggtgggagggttggctgcatctggcagtgaggttgagcatggggtcccatggagatgctgcacccaggtggagacactggggtgtgaagccatgtggaagggctgctgggtcaggggcagggaggtgtagagaggggggtctagctagaaggaacagcaggagaggctggaggtgagagggagccccggggacctgcgtacgtgggcatggagccatgatgtgagtgtggggctgggcgggaggcaggggagggtgcccttgaggctgaggaacacttcactgtcaaggctggtccaggtgcccagcagggcggtgacctggtgctggacggagccacatccccagcggtggggtggaagtctgtgggcagctgcagaaagtgcagaggaggttaggatttgaaggaaaggcagcaatgtggccacagatggatggaagcctggggttgaagggatttgcttttgtgtcaacgatcgcatgcacaagggccggaattctctattacaacaagaaatagctttagaaaatataaaatgaaaagctattcatagcgggcgtggtggcttatggctgtaatcccagcactttgggaggctgaggcaggcagtttacctgaggtcatgagttcgagatcagcctggccaacatggtgaaaccccatctctactaaaaatacaaaaattagccagtcgtggtagtgggcgcctataattcccgctacatgggaggctgaggcacgagaatcagttcaaccctggaggtggacattgcagtgagctgagatcgtgccattgcactccagcctgagtgacagagcgagacttttgtctaaaaaagaaaaaattgcagacaccagcacgcatccatgtcctgagaagaaccaggtggggagggtgatgaggaggctggggggtgtggagggatggatgaagactgagagagaggagattcaaggctccccaggaggtgggagggaaaggtcttcatcttggaccaggcagggtcc

SEQ ID NO: 7081 - DNA, 1044 bp, Homo sapiens
ggatccgtccaggtggcgctgagccgcgtgcgctgtctgggcaccgaaacccgcctgactcagtgcaacgtgtccgcgaccctgcaggagcccgcggggacctcgcgggacgccggcgtggtgtgctccggtgaggtcggaaccgcgtcccccatggcccgtcgccacgggatcccgggcgccctgactctgtctctccacagggagcctcagggtgcggctggccgcggggccggggcgctgcacgggggcgcgtggggcaccgtgtgtgacgatgcctgggacctgcgggacgcgcacgtggtctgcaggcagctgggctgtggccgcgccctgagcgccctgggggccgcacacttcggagccggggcagggcgcatctggctggacgagctgggctgccagggccacgagtctgcgctgtggcagtgcccgtcggcgggctgggggcggcacgactggaggcacaaggaggacgccggcgtcttctgctcaggtgagcggccgttgggtatggaatgatcatgctgttttattacgtacagtcatgcgcacttgctttccagaacagcatcaaactatcgggagctgttctcttccctgaatgcagaacttccacagtggattgggtgaggttcctgttggtatagtaagtgctaccggacaaagtactttggttccgtgcacctggggagctggtcagcttcctgtcgcaggttggccctggggcagccccacctgggctcattttccgccgtaaccagctcaagtgcgcttgaagtttccatccgaaattcatatatatatatatatatttatatattttaaaaaatattttatatttatttaaatatttatttatttatttatttatttattttgagacggtctcactgtgttgcccaggctggagtgcagtggccccatcaccggtcaccgcagtcttgacctcctgtagtccagggatccttcagcctcagcctcccaagctgctgggactacagaagtgaggcactgccgctggcttcagattcttaattttga

SEQ ID NO: 7082 - DNA, 1024 bp, Homo sapiens
cccagccgtgtggggctggagagttggggagagaatgcatttgctatgacaattcagtgttaagagtccacgtgccagcagagcagcccccagccttggcgctactgaccttggggctgggttgttctctgcgtggggccatcctgtgcatcacaggtgctgagcagcatccctggcctccacccaccaggcaccagtggcagcccccttccagttgtgacaataaaaaaatgtctccagacgtcaccaaatgtttcctgggggcaaaatcagcacagttggaacttctgggttagcagcagattggataggatgatggtgagtgactgcctaaaccatcaccagcctgtgtgagctgacaaaggagggctccttacttatgagtttatttgtgtaaagtcttaaaaaattaaagatattagcttagtaattatacacataatgaattaactttactgaaaagaatagtatgtagaaaaaatgagaattttagcaaaattattagacggtgatgaatgtggtgtctccctcctgagatctggttgttgagtgcggcgtctccctcctgagatctagtcgttgagtgtggcgtctccctcctgaggtctggtcagttgagtgtggcatctccctcctgagatctggtcagttgaaagtgtggcgtctccgtcctgagatctggtcattgagtgtggcgtctccctcctgagatctggtcagttgagtgtggcgtctccctcctgaggtctggtcagttgagtgtggcgtctccctcctgaggtctggtcagttgagtgtggcgtctccctcctgagatctggtcagttgagtgtggcgtctccctcctgagatctggtcagttgagtgtggcgtctccctcctgaggtctggtcagttgagtgtggcgtctccctcctgagatctggtcgttgagtgtggcgtctcccttctgagatctggtcagttgaaagtgtggcgtctccctcctgagatctggtcagtggaaagtgtggcgtctccctcc

SEQ ID NO: 7083 - DNA, 1198 bp, Homo sapiens
ttcagtaaactgtacaaaacttatatacacaccacattctctgacaacaatggaattaaattagacatcagtaaaagtataaactaacaatcttcataaaattattttatttttagctgtggtattggcattgtaagtagtttgagagagattagagagagtaaggtcttaactctaaagatgcaacaaaattaactgcattttgaccattgttgaatttgagtgttagctatgtgggggtgctttatctttctctcactgttttttcacatttgaaattttctctaattaaaaaataatttctatatattttgaaaaataccccatttgcacatgaatcatgaatcaagggatggagattaagaaagcacacagagctcagtgaataatggaaccgttaaatatcagcacttggggaagcagtaacagaagatcttacaggtaaatatataatcataagtccttgtactaagaaagacggactgaaaattaataagccaaatgtccaactgaaactaagcagcatactggacccaaagaagggcagaaatcatgaaatacaaaataatgaggaaatagagaggaacacaaccaaggcttgctatttgaaaaagattaataaagtagagaaactgcttctgagactacttaagcacaaaaaagcacaaataaacaatgtttgggatgtcaaaggaacataatgataaatacaaccatgactgtaaacataagacaatactaaaacaaatttatgtgaataaatttgacagcttacaagaaatcacaattcctagaaaaaatgtagttttcgtaatcaattcaagaagtgtagagcctgaccagttatgctactcttaaatacattgaattattaattctaaatgttttcacaagtaaaaataccatatggtttcaaaagtgagttcttctaaagctgttagatcatttcaatcttacataaactcttcaaaaggatcaaatatgaatgaatggtcatcaaatcattctttggagcctggataattttgatattcaacacagagaaagacagaagagaaaactatgggccagcctcatactgaacatagatgcaaaaatccaaaacaacctgtgagtaaaccaaatgcagctgccagccagcccttcctctgggtgcaaatccgtcaatacattaaaaagacaaactgtcaggaccaaa

SEQ ID NO: 7084 - DNA, 1266 bp, Homo sapiens
ctgcataaatggaggatgcacaggatattgtgaaggtgaccgtttgccacaaattgatccataaatttaatgaaattacaataaaaatctttgcataatttttaaaagactgttatgaactgaacagtgtctccctcaaattcatgcattgaattcccaacccctaatactgcaggggtgggtgcatttggaaataggaccttaaagaggtgactaaggttaaatgaggtgaggtgagcttgatgtcgttaacaagaggaactcaggacccagacacccactgtgggatggctctgtgaagacatagggagaagatggtgtctacaagccaagaagagaggatgcagaagaaaccaaccctgccaaactgtgagaaaacaaatttttgttgtttaagccaccctgtctgtggcactttgttatgatagtaacaaaatagcacagaacccaaaagtttctaaagtctatatggaaaaataaatgcctaaaatagctattaataaaataattttgaaaaagaagatcaaagaagagtaactcaccatgtcatattaagacgttgtagaaagccatagtaataaaacaaccaagtctttgcaaggattagacagagaccaacacgagaacaaggataccattaagaagctcatgtaggaacctgtccatgtctacaggaataaaagaagattgagaattttggaagagactgggaaactaaaaggacaaaaaggaaagtctagaatcaaaaaatacattttaaaacacagaagattagacatggctagagagagaattagtaacatggaagatcaaaatatccagaaaaaaaaaaaggaggcagagggtacactataaaaaggcctgacatgccatgtaatagaagcaatggaagaagataatgaggtaggtgtaatatttaaggaaataatcaccaatcagttccaaaaactgatgaaagaaattaaatcatgaattctagaggcattacaaactccaagtgcaataaatacaaaaaaaagcatacctaggtaagacagctttaaaccaaacaacttccagaagcaggggaaactcaaattacctgcaaaagagtaaaagtaagactggcagctggcttctcaacagaaagaggcagtgggtgacaaagcagaaatgcagtttgtcaagtccctgtcccagcatcacagagctgactgtgaagggtggttagaagctaagaggcagcagattaataattggcatagataaaaaagttaccatgcaaat

SEQ ID NO: 7085 - DNA, 1039 bp, Homo sapiens
gtccatttatggacggtgcagttgaatggtggtcaaagttagagcctggaagcctttagtaaatgcgctgaagttgtctgagggccatcagagttgttgcttatattggattagattatttattgagagtagaacaagcactctgatggtcctctctccatttgggactttctgtaaggggagaaatttctctggccctggatggtgtgaagtcccactttgagtaactgcagctgggctggtctctattgtacctggcaaaggccgatagaaaggagcataaggaggaggtgaaacaagcttagattctacagaagactctgatagtgtggggatgctggggattctaaaggaggtgtggacccctgagtgcccctgtctggagctggtgttgggctgtggggtctggggtcccttccccttaataagagatgatcttccaattgttctgaggggctttctggcttactaggctttagcccacaggtgctgcatagagctggattttgttgtcaggccagaacggcttgcacatagggtacttcagaccattttccctgattgctacagaaaagatctagctgtaggatggagttaaagctcacagtctcattctccagccatgttttgtcagctaatctgtaggcaggctaaatagtattacaaaagaagataaggttttcttttttctaagttcatttagccaaaagctgttctaatttttagatatacatcccaggtgtgtttcagtgacagtagaggaagcggctcccatggtgccgagagaatcctgcaatgacagaacatttactgaagtccaggaggctgcgggcgtcctcatgagccaagtgaaaacaccaaggggtccagcgcatcccctcgaaaccccattaactgaagctctaggaggtcataggcatttgctatacgccgtcctagctcccccagcggtggacatctccagccctacggagatgacccccactgcgggctggggggcagatgtttggctgacaagccttgctctaattcactggtt

SEQ ID NO: 7086 - DNA, 1059 bp, Homo sapiens
cctgtaccctacagttgagtcaatctagtgacatgcaccggatgccgtactccatgccctgtaccctacagttatgagtcaacctagtgacatacattggacaccgtactccatgccctgtaccctacagttatgagtcaacctagtgacatacattggacaccgtactccatgccctgtaccctacagttatgagtcaacctagtgacatacactggacaccgtaccccatgccctgtaccctacagctgtgagtcaacctagtaacatgcaccagacaccttaccccataccttgtaccctacagttatgagtcaacctagtgacatacactggacactgtaccccatgccatgtaccctccagttatgaatcaacctagtgacatccactggactccataccccatgccctgaaccctacaggtatgagtcagcctaatgatgccacaccagatgctgttactggcatcctataggttaataatgtacagccaatcactcggcactgttgtttctgtaaaccgacaagaattcctgacagtcaacttgctgtcagcccactcctcatcctcttcttttgcctttaaaaacccacttgtggccaggcgtggtggctcacacctgtaatcccagcactttgggaggccgagttgggcggatcacctgaggtcaggagttcaagaccagcttggccaacatgatgaaaccctatctctactaaaaatacaaaagttagccaggcatagtggcatgtgcctgtaatcccagccacctgggaggctgagtcaggagcattgcttgaacccaggaattggaggtttcagtgagccgagattgcgccactgtactctagcctgggtgacagagtgagactccatctcaaaatcaacaacaaaaaaataaaaaaataaccccacttgtaactgctgcttctcagagcatatattatcagagcatatactcagggcaacttgaatctctgctcccagctgcaatcctcaagcttggcccaaataaactgcctacttatattaactttgcctcggattcttccttt

SEQ ID NO: 7087 - DNA, 1100 bp, Homo sapiens
tgaccaaagcatcgctatcctgggacctcagggatgctgatttttaaatttttttttagagatggcgtcttgccatgttgcccaggctggttttgaactcctgggctcaagctatcctcccacctcagcctcccaaagtgttggaattataggcatgaaccaccacacctagcctacaaaaacattttttttttagttagccgggtgtagtggtgtgcgcctgtggtcccaactacttgggaggctgaggtggaggatcacttgagcctgggtggttgaggttgcagtaagctgagatcacgccactgcactcaagcctgggtgacagagcgagaccctgtctcaagaataaagattgcaacaggttgtaacactttgagtaaaataggaaattttccaactattcagatacacagatgaacaaatggaaagcttgatgagaagtgaggatttctatagtagccatccacgaaatagttaaaggaaagagagtcttcatggtggaaaagcctgaaccagctggtccaggcaaacctcagtgatggtgaagcctgtagcacacagcgggtgggatgaagagagccgcatccgcgatactcctgccgaagatgcctgtcctggatctccccatgtggaagcaccagcccccaagttaggggactgattggacaatgcacctgcctagaatcttcccaaagcctggtgtcgtgagagtcacggaaacatccagaaactcgctctgggcagcgggaagctgagagccgaccactttcttgcagtgtgcctgtgcaaactgggtaattggggatggctagagaaacttgaacagggtctgagctgggacaggaggaatgcgttggttttctgattttgatggcttaggtgtttatggaggaaaatagacttgtttgttggaaatcccccctgaagtgtctgggattacgcatcaggtcagtgattcaccattagataatccaaggagagagaattattttaaacgtacttgtacattttctataactttgtgattgtttgaaagttaagtaacacaaataatttgtgtcctcatcctaaagctttcttctgtcatagaggattgt

SEQ ID NO: 7088 - DNA, 1050 bp, Homo sapiens
gacgtgtttatatgaatgaaaacgatggcactttaccactttttatcgcttttgataaatttgttttatcagcattgttctgaccttataaccagtgtttaaaagaataagcatgctttaaaaaggatcctttttgttacttttctcacttttactgtgaaaagtggatcattattgaacgtgcacttgtgtgcgtgaagggccttgcctggggaagccaagtggagcccctttacagccccttggcctgggctacacgtggccaggtacgaaccctcgcctggggaagccaactagagcccctttacggctcctcggcctgggctagatgtggccaggtatgaacctgtgagaactcgagcacacgtgtatgtaacgatctcagtggcacaagcaagtatgcatgtggtgtacacagatgcgtgtgtaatgtgcgtgcatggggcgtgtgcacagatgtgctgtgtaatgaagggctcagacacacgttcagtgctgcaactcagaactcttatctttttaccaagtaggtcctggccttagaagtagcacaacatttaagttatatgtaagaaaatataaattgtttggggatacatttcctaaatgtttagaacttttggttgttgttgagacagggtcttgctctgtcactcaggctggagggcagtggcacgttcacagctcactgcagcttcaaactcctgggctcaagccatcttcctgcctcagcctccgagtcactgggagtacaggcgtgtgccaccacacctgaataattaaaaaaaaaattcttgtgtacatatggggtctcatgctgttgtccaggctgatctcaaactcctggcctcaagcaatcctcccatcttagcctcctaaagtgccgggattacaggcatgagccactgttgctggtctaaatgttgagaactttggatgtggctgaacagatgttacagtacctgtctatgatagctttcttgagtgtgaattcaactttctaaaatatccctcgaaactgagctggatacaaatctaaataaaaactcc

SEQ ID NO: 7089 - DNA, 1028 bp, Homo sapiens
ggttgtgctgtttgcttctaagtttttataaaaagaagagagcagtagactgattcactcagtgtcctgggatcagaggcaaagaccagggaggggcgggcactcaggtcagcaggggctatgctctgggtctgagtcctgccgagccccaccacccacttgggcagtgaagtcaacctttctgtgcccgaatcttctcatctgaaagtgaggaataatagccataggcttatggtgagttttaagcgagtccctatgcatgaaagagtcagaaccatttggcacacggagggtacccctggggcactggtttgccatctggagggggaggcatcagcaccaccaggtcagaagttaaggggtggccccaaacaccacgtctgtggggaggtggggctgtgaggctgccagtgtgtcaggagtacccgcgcttctgtgcctgcctgtgtgccgggagctcccgcgcttctgtgcccacctgtgtgtcgggagcacccgtgcttctgtgcccgcctgtgtgttgggacctcctgcgcttctgtgcctggctgtgtgtcgggacctcctgcgcttctgtgcctggctgtatgccagtgtcttgcacatctgcaaggaaagaatcccggggccgtgcgttttctccgactagcaagggaatctatcaaatatgaataaatgtacagtggaaggttaaattaatgaaggttaacgtggctaatatgaacatattcagcctcctggaactatcattgtataagcataactgaaaagttcctatagcaaacacaatttgtaatcttaacatattcaattattaaatgtgcaggtcttatttctcgttaactgtgtttaaacatagaaaagaggatcttggccaggcacagtagctcacgcctgtaattccaacaccttgggaagccgaggagggcagatcactcgaggtcaggagttcgaggccagcctggcccacatggtgaaaccccgtctctactaatagcaaaaaaattaactggctgtggtggcggcgc

SEQ ID NO: 7090 - DNA, 1046 bp, Homo sapiens
gatcccgtttttggtaacaaaaaattaagtatctgtaaatagtatattcagtgcaaaaaaaaaaaaaaaactgcgctgcacagggtgggtgaggcagtaaagatgggcagctcactttccgtgctgtgcagcttgtaaaatgggctgtttttagtgggcatgcattgctcctgttagagaaaaggaagaatattacattaaatcaactcataacttaatatattggctgcttttacattgtatcttttcctattaaaaatcgcaatctcacttatctgttgtgtttttgaaagtctgtgtcacgctaaacatcgaaaaaggtacatgcacatttttcactgaatttcccctcgcggtgcgtgtttcctgaaaatattatttctgctgaaatgagttcacaagcttaactgctcctgtcctttaaagggcatttttaccagtactgtgaatttattagttcattctgctgctgtgaaaaagagtggcccagagaggaaagaaagcagaggagatgttctgtgttctgtgtgcgttgtgtggctgccccggcaccttcatcagggctgatttacgtccatctaaaagagaaacctttggtggtgaatggtgattcaagaccagagtagctgccctgtttaaaaaaaaaaaaaaaaagacacttcctcggggttctggctgccagttcagaagggaagaccccccctcccaaccccactctcaaacaggcttcctggtaacttcgcattttgtctggaaccggaatgcgtgttcccaaagaagcaacgttgtgcaggtgcttcgacgccagcacagggaacgtcgtgtgtgggatgagcaccacctcattcttgctctgtgccggctccgtcgggggccgaggtgggcctgggtccttctccctgccggctccgtcgggggccgaggtgggcctgggtccttctccctgccggctctgtcgggggccgaggtcggcctgggtccccatctcgctgctctcgcgcctgctttgtcatgtgggcagggcttcaccttgaggattcctcgtc

SEQ ID NO: 7091 - DNA, 1034 bp, Homo sapiens
tgcccgtcttgaagactgcctatggtgttgaggatgaggagctaaggaagacaggaggagggaacatgaataaatgtgtgtctagcaattaagtgctcaagaatatgctagaatgcacaccgtaactttgtattttattacagcttgcctgcgacatcagtaaaatgaagaaacatttgctgagcacgtagtatgaccgggaagtgtcctaggaaccagaacaatcaaagataatcattctcttcacgttctcattagcaaggggataaatactgtggtagataaataataataacactaatctaaggaactctcattctgatatgaaattaattcagggtgttttaatttgcactgtgttgtaaacgacaaaatctgatttagtgtttggatttaaaagagggaaaagattaaaacagtgatggtactgaaatagaaaacagttaagatagctgttacctttattacactattacagcattatcacgtcttctaacaccttgactactgagacgctctggcagctgaagcctctgagactaggttgtaaaaggccattgtgtatttaagaactcattttaggctttaaagtcattgttatttgatctcagactgttacatttaccattatctttatctgaatccaaggattgtgattaaaaaccctaaaaccctgaggttaggaaagtttgaaggtgagaaacacagggcttgtgagtttggagcctctcgaggcagttttctgctctgtgttgctcacattcacgtgagaccggctgtggatgagggacgtcaccgggagtgactttgtggcagtgacaccgttgcggtggccccagaggactttcctccctacaaccttccccgcggtttctgtgctgaccttgctgcaggcacttcatgcactaagaggggatttgttttgtgccggccttgttccagtgtccaggcagctctgactgttggagtcattgcttttactcctcttgactccagggactcaggatgagtttgaagctttgatctgctaggag

SEQ ID NO: 7092 - DNA, 1035 bp, Homo sapiens
gggactggggcgggggctccaagaggacttccaggaaaattgaacagattctcaccaggttgtcagtgtttgatcgtgggcaggaaggtatgggaaagagtttttcagttctgctggagaattgtgaaaggattggcaataggtacattgtaagccaagatagtggaaaatagataaaatattaactccagaatcattgaaaagcgtaagatagaacggtatttgtagcacactgcggacgctgatgttgatgaccacagtggcgtaaggggtggtgtctaaaaaggacaattcaggaagtcatgtggtaagtccatgtttatgaatgtaagtgccaggtagctactgtttttcatgtgagacttgataatactctttgatttcctaaaatgcatctgtttgataaaaaggtaattgaagatcatttttaaaagatcagttgtagatgatgactggaagaggttggagcagcagacagttcagtcctcaggaactgatggtgatttggatgccctgaaagaaaagcacatgaaacttagcaaaatgacggtgtaggagccatgcttaacttagttctgaattcgccagcctgatacatgagacccacacacgcaccatcaaaagctgatgttcagaaaccaccagagtaaggaatatgaagtccacagactctacaactctcataagagcccatcatggaaaaccagggactaaatatttcttttgttaacttaaaacttttatttctggtttactttcaatcagatattactgatccatttctgaagaagcatctattagtgattggtgctcactcttagagcagttcttcatggaactgtggggacgacgtaggatgacgtccttcctgtggtatcagagccgttcacggagctgtggggacggcgtaggatgacgtcctttctgtggtatcagagccgttcacagaactgtggggatgacataggatgacgtccttcctgtggtatcagagccgttcacggagctgtgggggtgacgtcctttctgtgatat

SEQ ID NO: 7093 - DNA, 1069 bp, Homo sapiens
gtatatccttgtagagggactagagacactgctgggaagttagtgactctgtgttgatgaggtgccggttattagtctgttgccttaaaacatcagcaattggaattgctcctcggaacatgactggacccgttgccgttttctgtacagttttcttttggggagatgcacacggttccgggaagggtgctgggctgcagtaatatgggtgtggacacaggtcccatcagaatagtatcccttggagggcagggtggggatcccgcgggttcacggcggttttgctgaatgaatgaatgaatgaatgaacgaacctagcactgagagtcacatgagctcatatggaaacagcttggagtgttgagaaatggagattgaagagctcacctcttctctgagtatgacggggtcagcaccgctggagctgagggtttgacatgcaatgaaagccgtgatgcagccatagtgcgatttggtttatatagctattgccttctgttatgaagctgaaaagaaccaggttagcggccacctgctactcaggccttatgctttcttaggaaacagtaagatgtactaaatttttagtgttaaagtgacagaacatgggaacacgggaagcgtctcatcttgtcacttgtgacttggacacggagcccgtgggtgcttctctccatggtcagacttggtcatggagccgtgggtgcttctctgcatggtcagacttggtcacggagccgtgggtgcttctctgcatggtcatcttgcagcttctgagtcccatcctcgctctcccggcctaaggtggctgtgctagggatcacacctgcaggtctgacggcaacattgtgtgctgggtttctctcccaggacttccaggtagttcgtgcctggaatagttccatggtagcagggtatcagcgggtggccagcctcggcacgcctgcatggatttgccgtctcgggggtgggagccccatggcagacggctgtttcccttgcgtgcctcttccagcgtggcctttattctccacagggcgttggaactgatttttgcacaacagtgatt

SEQ ID NO: 7094 - DNA, 1039 bp, Homo sapiens
aaactacaaatacatgagataatttaaatgtaagttgaacccttcagaatatcctggatttggtcttgatcttctgaccttgaaaatgtgattcttttttttttttttttgaaattgtgattgtcttaaactgtgtgtctagaccatctcctctgaattgctttggaaacatctgcacgggcatcttcctgttcttgagtatagagaggtggacatcattacgctttaaaatagcgaaagtcctgtagagcagtttttcttaatcagtgatggtatttaaaaatgaactccctaatgcttaaactaatgagctattattgttggaagtattcaaggtagcaagttatagaatctctcagtgaaagtgatttgaaataagaaattgcgagagtgcaatgcattctttgtttttaaaataaaacgctaatacttagagaatgttttgtttgcaagaatgtaagatgttatgtctttgtatagaatttaaggatagtaatttgcttctgagatctttgagatttgaaatctcaactatggtttatcgtccatgttttatacatttgcacatatacacatatatatgtaaggtatataaaagtagaggaaaataagcatgtatatatttacatgtatatacacttctataatgtgtatacttccagtcacatataggtctgagtgactgattttacttgatgaccatgaaggtaattaaataattttcctgctgttagccttgctttttgcatctgagcagggaccctgtgaagtgtgcctcccgcgttccaggcctcacacagtctgtaccagggtttggaagcaggggtttttctgcagccacttcaagaagcaggtggttgccaggattgcctggagctccaggctgcctccagttccagcctccctggggtagaagctgccccactaggggccttgacatggacgttagggcctggagccagggactccttcctgaaggggtgctccagtcacggctgggcgtgagaactgagggcgggaggtggaaccagcctcgggc

SEQ ID NO: 7095 - DNA, 1026 bp, Homo sapiens
attatagaaaatgtcttgctactggaacttcacgatgctttccttttaaacatcaggtagaaagtatggatagtaaatctcagattagttgccattcttggtcttggtagagctgccatcgacagcctccgtcagttacaacagagtgtgtctctccagcaacccagcttagattgcagactgagtctggctcacccaggattcagtgcaacgtcttccgaagctgtagccaccactctcagaagagacttgagaagccctccctttgatgcctgcatgtggctgttctcagatcacaacagctatagcagcgtctcagaggatgctggcaggggtgtcctgggtgtgacaccacggcaggggcctgcagcatctgaacgaaatgggccgtgacattgagcggcctaggggagtccacagccgcatttcaaaggtgcagtggcccgaggttgaaccccagagcctggctctgaggagcctggagttgacctgtcacaactccattgagagagctggctgaattctgtacctgtgtgggcaagatggctgtgtttgctcttggacccttcccaagccagggctagggagattgtctgcacagctagtgggagcttgactgttcacactcggggctgagtccctcacctttctctgagcccagggaagatggacatgctgctgtgacacagccagcctggcaggagggaaggcacttgtgggtttgtgcaccgaggcctccttcctcttgagccaggaagggcttttgggatcctgcttccagctgctttcccttgctaggttattggcctcgggggccaggagaagccgagtgcagacctgcagcctggaccccttccacagcctccgtggcacctgtggtaagcgggacgtggcctttggaactccaagccctaccctggcatgcctgccccttggggtgtctcaggcacctgctgtatgccaggctccatggcggggtgggcggcagccagggctgtggggaggagggggcatggtacgtggacg

SEQ ID NO: 7096 - DNA, 1045 bp, Homo sapiens
tgttcgccactcttacagttacaagctgtacgttttttcctatgaggtatatttcttgcctgttcgccactcttacagttacaagcgtatacgttttttctatgaggtatcatttcttgcctgttcaccactgttacagttacaagcgtataccttttttctatgaggtatatttcttgcctgttcactgttagttacaagcgtatacgttttttcctatgaggtatatttcttgcctgttcgccactcttacagttacaagcggtataccttttctcctatgaggtatatttcttgcctgtttgccgctgttacagttacaagctataccttttctcctatgatgtatatttcttgcttgttcgccactcttaaagttacaagctatataccttttcttctatgatgtatgtttcttgaaggcatggactaaatcctaattccacagtattcaatgcacatactcaagagatacttgtttgaatgattgggttaatggaaaatagaagtggtgacttaactttcagttcattatgccaaacttcaagtgtttacacgcaaaattttatggtcctttggataaactgggcttctgtgcagggtggttagagattgtgggagtgcagcaaatggctctgtggctctaggctcacgaagggcttgagggacttagtggcggcacctgtgttgaaaactcaattctgcaaatccttcttgagtgaccaggcgccacacacgcagccctgcttcccagctgatttctgcagaggctttttctgaatgccccaggtgaacatgaattcagccagcactgctgggcttgcacagcaagccaggtgcagggacgagggagaagaggggcaggacccagctcttcctgggccccagtgcccatgtggggatgctgcctggcctggctcttcttagggaggtcaggaaaacagtggcatggagggtctgttggcacgagcctcttggtgaaacatggatcccaggtctgtgtgggaggcaaaatagaaatttatgtggatatcctcagtaaaat

SEQ ID NO: 7097 - DNA, 1030 bp, Homo sapiens
gcctgggagcctgtctgcatccactgtctgttgctgtgtgacaagtgactccaaaacctagtggcttaaggcaacacacacgtatgactgtacagcttctacaggttgcaaatttagggcagctctgctgagtggttctggccctgtccccctgagtcacggtgaagattctgtccagggctgtggctatctgtaggttcagctgggctggaggttctgctccaggatgctgtgctgacgtgtctgctggcggaggcctggtcctccacaccggtccctctgtggggctgccaggcacatccctgcccagggctgctcctttctgcagagacataggagtgctggtcttacgcccagtgtcaaggtggccggtctcctggccgtgtcccgtgggccacactgaccagctttgagctctgcaggagggagcacacagccgtgtgggaccatcgagggctggctcctgggccatctgagaagccctggctgttgtcttaaagctgaggaaaatggcagaatctggctgtgagctggagagagagaggagagagtgcatgtaggtttgatgggctgtgaaggtcaggacagggctacgaaggactcaggtgcacagatcccttccagggtcggggctcacagcatgttcctctctgtgactcaaggcacacacttgtttagggtggttttctgtctttcgcttgatgcatcaagaaaaaacgttgttttcaatgtggtaggtgttgggggtgagtctggggctgttgattccagcagaatatcctgaaatggaagtgtggacaggatgcagggccaggccccagtgggcagggtggcaacattgtggagggaaaggggtttgtttcatgtgtctatagcagatggtgacacgttggagtgactgggtctgtgagggaggagctgtgttcagtctaaggctgttgagtttgctgaggaacctccaaaatgtcctggtagagtcaggtggccgctgccagggcgtgtggatccccctcttgggaaggtgtgggtg

SEQ ID NO: 7098 - DNA, 1098 bp, Homo sapiens
ttctggtgagtttggaatccgcccctctctgtcagggttctgacagtgtctgaatgccggcctttgcaggagtccaaggtgctgcctccagcaggagagtgggtgacgtggatctgaaacagcaaatcaaagccgggagcccacatggccctgcctgcttcccaacgtgtgaagtgctggtcagtggtttccttccacccttggactcagttattaggctgttacatacctcggagaagggcgccagcctgagagggtaactcctgctttagtctccttgctgcgctcgactccgttacgcgactgtaagcacatatttttatgcttgggttttgggcaactgcaggagtttgaaatttaagtgcatttgatgatatacctttaaaaatgaagcttacatgtagcaaacgggaaacacaccattttacatccttattcctttagcatgtgtgaattccatggttttaaattctaggtgaagttgggttagtagtctgtggaaaatgcctctcttacgattggaaaaactgattgttcatcatatgccttgtttaaaaagagctaagatggaaaaagggatcttctgggctgactgtagttgctgacagtttcactgcatgtgagatgtgtggttttgaaagtttgactctgcattatggggttgtgtgtgtttgtctaggtctttttttttttttttttagaatgcaggtactgtttcatatttttaggagtcacatggtttcctcagctgaatttaaacttgtggaagggcggtactcttaaggttcttaaatgctgtgtatgtacaaatgccagcatgatgctttgtacagagaggacattcacgcttagtctattgatggaatggacgtgttctcttgcctgtgctcactcgaggccctgatactgactaggggtggtccaggctccatggaaagcttcctaaccaattaggggagtgatggaaccgccctctcctacagcacctggtttgccattgaatagaggaagggaaattgctggtagcaaaggggaccagaaaagtgtttactcttcatcttcaccaggtttccagtagatgttaaactcactgagttc

SEQ ID NO: 7099 - DNA, 1177 bp, Homo sapiens
actcttgaacggctctgagatggctcattgcaggtagacatttgcagaaacgatcaggcagagccacagccatcttgcagatcaagtgaaggtttttttttttttttttttttttttttttttttgagacggagtttccctctgtcgcccaggctggagcgcagtggcgcgatctcgactcactgcaagctccgcctcccgggttcacgccattctcctgcctcagcctcccgagtagctgggactacaggcgcgtgccaccatgcctggctaatttttgtatttttagtagagacggggtttcaccgtgtcagccaggatggtctcgatctcctgacctcatgatccgcccgtctcggcctcccaaagtgctgggattacaggcgtgagccaccgcgcccggcctcaagtgaagttttttccgaaagcttgttacaggcttaaatttctgatccctttccttctactgatcttggatgattcgtttctttttgctctcatttgggtctatgaaacttgttgaacagcgtctcaccccacggtagaactctagctctgatttcacgcatgagtcggtatcttcactcctcatttgcaaggagaaagcactgcaggtcctgtgtggcttccatcccctccctgcacggggattgatgtgagaggtgtttgaggtgtgtgaactcgctacccctggagcctcctggttcagtccctgggccgcactcctcccttttgggggcttggtggtttctgctgtgcttgtgccaacacaacaaggctgagtggagctccagggctgtgacagctcacgcagctgtggcattagtgcagagaactgcggggatgcagctgcccttgctgtgatgcttcgagtgttgtagtcggtgtgggaagctcggtgggacgtggatgtcctgggatgggatgggagcctcccctcagcctctatcaaacacttctcggccaggcgcgattgctcacacctataatcccagtgctttggggagctggggtgggtggatcaccggaggtcaggagttcgagaccagcttggccaaaatggtgagaccctgtctcaactaaaaatcagcagggtgaggtggtgtacacctatagtcccagctactctggaggctgaggcaggaggatcccttgatcctgggaggcggaggctgca

SEQ ID NO: 7100 - DNA, 1034 bp, Homo sapiens
ggctggaatggggaccccgtgatggaaagatgcaaccctctgcctggacggagttgaatttttgtggcgctcaggatgcacagttaactgcaatataaaggcagagtgtgaaacgctgtggaggctgagagaagagatgtggttagcaagtatgagtgagatgtttggggcgtgttagcaaagcttgctgcacacatgccaggtgctgtctgcacacgtgtgatccttagaacactggcgtgtggagccatgaggctgtcgagggccccagctcccggcaggctgagggagtctcctgttaccactaggataaccgtgatcgaaggctgtcactcaatcccgagaagggtctcctttcagagaggaaaacacccctagagcctcgggcagaattcagtgattttttattataatgttgcttagatttcgcaaacatgaaaccaagaacatatttcggaatgcttatggttcttttgtaaccatggatacaaaataattcgcagttgatggacagtttttggaagctgaactgcttacattatgagcacggtgctctccctactgccctgggccttgctctggtttgctggggaagctttgcagggcctcttggctgggatacctctcccatgtcccatgttgctacccctggtcacagccatactgctgggcaccagcgccgtgaggacactgagtggacacggagcccacggggcagcagctggtcatgaggtggcatccagatggtccaaaacacgtttctgttcattaagaataatcattgcaataaaaacagagtgaaagaaaaccctctactgacctgactgagaatgtgtcagctgagttggatggggaagtgcagtgaggaaggtgagggctgaaaggagatgagggagggagaggaaaggaaagaagggaagtgaaagggggagggagaatgggagtgaaggaggggggatgcaggaggagaggaagagagagggcagtgggcaggagcctgggaaatgagccccggagccggttcccgaccctcg

SEQ ID NO: 7101 - DNA, 1091 bp, Homo sapiens
cactgataccatttataaatgctggacatgtgacattctgcttggtgccagcacatctggaatccgacagcgtagttagattcttggtcagcaaacccgtacaggagcgtgtgaactctgcatttgcttctcccggacaaaggtgagttcctggtcactgtgctggatggcaacaggtgtggcctcaggagcaggacagagactggcacccacgtgcaggagtagcatctgcaaggaggtgggggatgtgacagacacaaaaccactgaaatcctgaaagtgcgagctcagctgttaccatggaggagaggcgcaggtaagaccagattgtttctcattgttgcacgtttctgaaaatgaccctaaattgactcttctttggctccttgcgcttcctagttgggtgggaggaaactgtgcccctggctctggccctgcttgcggcgagatggaggctgctgtagcttgccctgccctccctatgacttcctctgtgctgttctcctccaggaacagttctgctgagcaagcttggactctgctcccttctgctcttggatgtcatgtctggaaggcttgtgttcttttctgggttttgatgatgctgagctatgtttttgcaaggatcacacgtgcccatagcagggagaagcccctttgcgacttcaacatcttgacactctcagcagagctcgctgtcgaagttgagagacttttgcgtttgttttggcagaagctgagtttcagtcctaggacggcctcagcacacttgatcccagctcctttctctcactgctcccctcgtgtatggcagaaatcatatgccctgaagtttaccagtcccttcatttgaaaacttcagttaatgtatatgatcctcaaatgagaattttactttttataaaagcaatcacaaagactggattttgcgataccagtgttttatgtgtagattaattgtactcacaataaactttgtcttctaagtattaataattccatgtttcagattagcatggaatcatgccctggagtagttttgcttttccgctgtttttggcgaaggtaaagttgagaacgttgtgatatta

SEQ ID NO: 7102 - DNA, 1062 bp, Homo sapiens
cattacaagctagtgaaatttggcaggttagtagatgctttgcaatgatttaggaaccaatcacttccttgatgtgtgtgttcctgacatcataaacagctctgtgaggtgtgtttcatccccagatgagagaaacgaaacaacagggacttggtgatttcagtgaggtagaactaatatagcagctgtctagctttccatatcacaactttgtcagccctcagctcaataaatgagaagtcgccactcatcaggaaacgtgttcattttctactgttctttattcgtggagtatttactgccttgtgttcttcatgatgtagcaaaatccctcctagtgttgtgaatataaacagttcatgacaaatgcagtatcttctttgttaacgttgaaaatgatatgtaagttcatcttcaggtactgtttggaaggatgagaaagaagatatttaggataaaagaagaatagagagctttcgagtaaacagggaaaataaggactttgtgcaaaacatttccaaatgtggaatttgagaataatctcaaatctaagattgtagttatttggatttttaaaattagtacttagttttccacacctttgggaatttcacccttgatggaggattgcaagaataatctgatttttcagaacagaaggacagtctgtctcaaaggtaaattccaggttctaccatggagaaatagaaattgctcccaactttccaaaaggttcttaagttctttcttcttttgtggttaaaaaaaaaaaaacacaaaaaaacaaaagaaacaaaacaaaacatctctgggtttagtctcagccaagttcctcttactaggttgccttacatttctcccaggtgttcagagtcttcatcattactagttatttagcttgttaaaagcaaaaccttgtattagttagatctgagcaccttgaaggcagggctttgttttatactttaaataagcagcaggctgatggcagggctggggcccttcatcccatcatgcgttcctctgagcattcagagttctcactgcgtgctgagtgtggtg

SEQ ID NO: 7103 - DNA, 1032 bp, Homo sapiens
ctgcctgtattttgtcaacagtggccactgtttgaccatcatacttgccatctctcatttagaaagttgggtgtggatgtattaactttttagacatacaaacacatgggctgtttttgttgttttttccccagctgaattcaagaaagggaaacaagtagactagagtaagtatcagaaagcgtctaagtggccaggtgggggatgtccactttgtggtggggaatcctactttggtgttggattgcattctgccagacatcgctcctagaaaagctgaccctgaagggcttggtgttgccctcaccctgggacattggtctctctcaccagaaaatgaataatctgccagaatactgtgagtcaaattgtcagaactcgattaaataagaggctttgtctcaaacgccaaaacatgaggacacacttctaattttttaaggagtgcttcatcgtgagtcagtcctgacgtgtactatgttaggaaacctctgaactccacagtcaagccagagctctgacagaaagtggttgcgcccttctcactgtgtttttgtcactagctttattcatgaaaattatttccttaaaaccctctttgtatgacttctattacagtttggaaaaaaaaattatgtggaactggaagcctttctgcagcgttaatattcatggcctgttctgggtctcggtatatgtgtactatacaaatgtgtacttgtatgtggtgtatgcgtactatgtattgccattgtacatgtatttacaatgtataggtatgtacactacatgtgtcctacatgtgtgcatgctatgggcatgcatgtacatgtgtacatatgtgcataactatgggcactattatatccacactatttggacatgtatctgtactgcatatgtgtacatacatgcatgtatttaacgccatatatgtacctgtgtacatacaccatatgggtatttgcacatttgtgtacttatatatatacatgtgtgcacactgtaagcatgcatgtacactacgcacac

SEQ ID NO: 7104 - DNA, 1099 bp, Homo sapiens
tcaaccgtcagaatcttgatacggtgatttatgtaacttatcacacgcttctcagcagttcttatgaatttcattctgttgtgaaattattgcagttttaatggctacattggtctcatgttgtggcccttggtaactaccttgaaatgaattgccttcccccttgtgtgttaaggtttcacctgggagcctttgaggcctcacctctgcatagggcagtgcctctactctcctgacaagaggaagaatctcattagagtatttctagtgtggtttttgcttccagacagaattacttttttcacaaagagacatccactgaagtcgtaaattatgctcaggagggacacacgggttagctgacagagtggagtccagaagacccaaagatgcaaaagcaggtcagtggaatttgagtcttttcaacaaatggtgctggaattatcggacagccatatgcaaaagagtgaaaacaaggagaaattcctgtatgaaaattaaggtggaccataaccctgaatgtaaaatgccaaactagaaaacctgtagaagaaatggaaatcgtcgagaccttgggtcttgacctagggttagagctcttagccatgataaccaatgatccatagggaagaaaacaaggagacaagacttcatcaaaattaaacttttaatataaaagacacccctagggaattgaagagacacattttctgcagacagggagaagatgtctacaaatcatgcagctggcaaaggacttgtgtccagaatgcatacaggactcccaaagctcatgactgagagaacaaaccacctgacttaaaagcgggcagagacctgaacaggtgctccatcgagaaggacggggagggtggcctgaaagcatctgaaatgaccttcagtgcgactggtttcagcgagatgtgcattgcagctgcggtgaatttttttacacccctgctggagcggctgatggaaggtcttcagcaccaggtggtggtgaggacagaggcagccgggactcctgtgtgatgctgcggttcagcatggtgcagacggctcagcagtttcttacaaaactgaactcacacaaacgtgg

SEQ ID NO: 7105 - DNA, 1052 bp, Homo sapiens
cacgccactccactccaccctgggtgacagagcagagactccatctaaaaaaaacaaaacaaaaaaaaccagtaatggaaacctgactgttatctgtgatggaggtggcggcttctttcattttttagtgacaggatgaattggatgtgtgtttgcagtgttgatcttgacaagggaaatggtcagaaccaatgtgccacccagcttgggccttgccaccggcagaagaacctggtgggggacagactggaggctcggagaccgaggggggaattctcacgccatgaagctggtgcagtcactgctcctggactcctgctggagggaggcggccccttcacctcgcaggctctggtgcggtggagaccttaggacgacctgcctaggtcatcagaatggtggctgtaagatatttgagtttcaatagcgtttctgggttccttctatttttaatctgctttctagcactaggtaagtgaagatatgtaaagtaaaaacccgtctaacttgtagagatatagtgttgtgtaggagcagactatggcctctggctctgtttaaagattgtagtaaactctcatctggcatggtcagggtgcaaattatcttgttgaatcgaaatgtgaatgagtcaaagctggcacctgcatcgttgatgaaacacctgattttaaaggaacatgtcgatatgccgtaagataccagcaagttcctcactgaggttcggcgtgggttcgcaggaactgggccttgtgtcaccagggtcacctctgggagaagatgctcagtgtgggcgttagtcatttagcctttccagagccaaggaacagcttgctgtggtttttttagaagctgtattttgagtcagtttgtcccacttgactcgaaggtgctgtgctatttcagacctttgccttgcaccatgtactcattttcttgtcccctgataactaccttggttgcccctggcctgacattcgagcctcgtcgttcatggacgcagaggctcagtggtggggctcaggccgtgactccggttttcacagttccgt

SEQ ID NO: 7106 - DNA, 1050 bp, Homo sapiens
gccttttccccgcacccttgggctgagttttatcagaggctggtgtgtgggaagcaccatagccacttctgacagaaactcgggtgcccagccgaggtcagagtggaaatttgtgcttttccttcgctccagtatggtctggcttctccctgcttggccagaagaaaatcatgcttatccaagtcataggcaaaccccctaaattaaacatttgtcttttttctttaatatacccatttagtttatatgggacaatagattgacaaatgtcttttaggggaaaattaatttaattagagaactttttggataaaaactataatcaagagaagctgttttgtaataagatctagttaaatactaaagttgaaagctccttatatttgatcttaaacttgggcccagggtgcgtgtccgcacgcttgcgctcatgacgccaggctcagctgtgaactacaggcacactgtacttactttctggttgcttttttgaaagtcttattgcttggcctctccgactcagatgttgagttacattgattctgttccgaatgtgttcatccctccatctagggtccactcgtctttcagggagcaactgccttcctcatctttgtctcctatggtattgtatatttaatagtcaaatatttataggttgcatgggtgactgatgtgttcattaggaggaaaacaatgccaatttttacgtcattataatggacttgttaaatgcttgttagtgtaatgaagtttacatggcaaaagaggctttggagatgtgactgcgtaacagacagtgagatgggggaggaccctggattgtccaggtgggtccagtgtcctcacacacatgccttgatgagagggagtacgagggtctgcctcagaggagacctgaggatgaggtagaggccagagggggtgtggggctgagggcagggctggggggtggggtggtgttgtggggctgatgagggagctggggccggaggggcttggggccaagggtggggcagtggttggaggggtgccgggccggaggggtgt

SEQ ID NO: 7107 - DNA, 1026 bp, Homo sapiens
ggacgtgagccactttgatgttctcaagcagcctgtccccaaagccctcggtggaatgccgcattcctttgtgcccctcgcttccactaggaagaaccgctgggaaggggctttgagtgaacgcttgggtttctgtctctaattggtacccggctgcactgaccaagcaggggtcccagtgaccctggacattgcctcacataagatccaaagatgcagttaggttctttttaacttcttaaaaaatgcttttgacctggttaacctatagcattatcagttagtgtttttgatattggaaaggtgatgtattttattttctaagaaggaaagaaacacaagttatcctgttaaatactctaaccacagactaaatcacatcaaggaaagaggaactattttggggggaaattagcccttcatgtcaaagataaaggagatgacttacattgttttttaattgagttaattatgaaatcttaagtgggtttgagaagatgagctgtggatgctgaaaggagagactgatgctgattgaatgttagtcagccctgataggatgtggctagtatttcaagcttgctccagtattgtttgatagattgtaagtgaatgtaaagatctatttgatgcttttattttacaaaatactattgagaaaaagtttctgacagccagggaacagccttcaaccaatttcttcctaatttccatcaccagaaaaaacttgtcctgttaattccagaatttacttttggaaagttcctgtaaggagagcagaggtattggtggttgaatggtgacttgaatttaggtgaagatcattaaatatttttgtagtcatgtttgtcttggtggttttagcaatttcatattaaatttagaactgcgagtcataaaaaccaaacgtggtcttaccctttgcttttgtgatactccttttgtttatatgactatactggtaaagtgatgacaaaatcatgcttatagggttttcttctgtgtagatattaggatttttagggg

SEQ ID NO: 7108 - DNA, 1047 bp, Homo sapiens
aagggtgataaatgtggaaaaatgcagcactgagtttgtctatggtctgagcttctcatgtggtcattaatgtgagcgggctgtatctgtggagcctccctacaggcacaaaggaatcaggctagagtaagacggccggcaaactctggcatctgggctgcgtgtcgtttcctaaagcccttttgggtgaagtgacacaggcgcaatgtctgtttggaggagtgtaatctcacgcatgagacgcagattttaaacactaaagtcaagaagcttggtgggagtggctgtcttccaagtgggtttctgtgttgccatggatgaggcatggatgtgtcatctgtcggtgaaatgcgctggtgaagaggctaagcaaaccctgtgtgtgtgtgtggggcgggtgtgtgtgtgtatatgaacctacatctcttctggcatccgaagtaaatagacgttttgtaaaactggtgaatttgatgactctgaccctaaccctgagagttgaagtctggtgcagtgtcttgagccctcttctgcattgagggtgagtgactgtaaatgactgattcctcagtggcgaaagttcaaatttagcgtccctgaggaagccagacctcatagtcacctgtgtctccattgtaaacaccgtggcccctatgcgggtggctgcgagtttccaggccctccttgcagaagcagccatgcagtgcttggtgatttgataacatcagccaccttctgtcttctgtctaatcacggtacaaatgattttcctacagggaaacagatctcatttcttccccgatcgttgggagaagcagcccgcctagggaccgcaccgtcctctgcactttcacagtgaagcctgtgtctctctccgagaagtgtcacgtgtgtcgtgggaatcacgggaattgcttccttaattctcctttcttaatgagggcttgggacagcgctgcctgtttcacatgggacgagcagctggtggtttctggctggcgtgggaccagcgcttcggctgtgtcatcacatctggtggcctgtcca

SEQ ID NO: 7109 - DNA, 1088 bp, Homo sapiens
gagcggctggtgacacaggtccagatgctgggatgctgatggggggttttggagagggaggtgtcgggagggtttcccgacccacagcagccctgggcccttgtccggccttcttgcccggggcatgacgcctggagggaaagcagcttcgggggcctgagggccacaaggcagagtcctggtgtgtggggcaggcctgggccaggctccttggaggatgttacagagccactgcgtgtgcggggaccacccatctctgagccccacgcggattttcctccatagccgagcgaaatcctggtacggcgagcgaggcagtcagaggcaccttttgtggaaggaggacaaagctggagggaaggaggttttcctaaaaggcacaaggcactgatactgcgttaggagtaattcctaggagcgtggtagctggtgggtggaaaactgtagccaaagaataaatgggaatggcccttcttggtatttaactgattcgttcacgaatggtccaaacagttgtagtgaaaaaaacattttggacaccgatgttttcatcctgcctgacgatcggcgtgaccgtggggtgttccatccttcctgggcaacagtgagagggcctgacaatcggcgtgaccgtggggtgttccatccttcctgggcaacagtgagaggggctcaggcccttctggccccatgcaggcatttccccagggtgtgtcccccgtcctgaataggccggaatgcctctgggtgcagctgagcctcttgaaaagggaagagtcatgtgacatgctctcggtgaacaggaaaatgagggaggacaaggagaggggcctggaggtgaggaggatggtgaccaacaccagggatgggatggagggtaaccccggggacgggggacggagggtaactccggggacggggggacggagggtaacaccgaggatgggggatggagggtaacaccacttctccaggtgcctttgggggatgctgccgcccctcccaccccagagtgaagtcaacaggattctgtccccaggagccccagagcctggcagctgggattggcccagtatgaaccactgttc

SEQ ID NO: 7110 - DNA, 1006 bp, Homo sapiens
agtctgggttcacaccggtgcccgcgtggtctccagttacggtgctggccgtcgggtctgagttcacaccggtgcccgcatggtctccagttacggtgctggccgtggagtctgggttcacaccggtgcccgcatggtctccagttacggtgctggctgtcgggtctgagttcacgctggtgcccgcgtggtttccagttacagtgctggccgcttgtacctttctgggaagttagaaggaggatcatttcatcgcctccctgtcctcccacaccttgacctatactgggccaccgcgaattcttccttttaactgtttctctcttcacaggcaacactggcgttttgtggtccacgtttgcctcttctgaaaacggattctgtgttgctttatagaatcacatggtctcttttatgaatttcgcttttctttcataaaataatcgtgcttttatctcttcaatctcaactctgttccctggcacaggctcttcccagctcaaaaattaaaagtaatctttgattacgcttaatactttctaaagttttgaagtttatcagcatgtgggttacagaacattgactatttatttaatggaaaattacattctaagtagagtattaaagtgaaagggatcttttgattttattaaaatattcaggtaaacatatgaaaatgccttcgccaaacttcatgcttgtatatcatgaaaacattaagctgctaagctctctctgctcccgggaatgcattattagagtatgtgtttgaaggtgtcattccagtcttagttttaggtattttttaaaggggttggctggagaagtgacatttagcattgagtgaatgtttgataaagatttgtctctatataaaaatatttaaaaacaatctttagcgtttcctttcagggttcacccattaaagaatggtcttgtaaaaaaaaaacatgttaagagtgttggcgcccagaggtgctaccctgcccacagtttcatcatccgc

SEQ ID NO: 7111 - DNA, 1022 bp, Homo sapiens
aggacgttgttcagtaagtactaattggtggcctgccgttgaactaatttcagtgtagtactgacatcatcagccacggcagaaacttacttggcatccctggaagagagggcagggaagcatagcaacctgaaaccacctcattctccagcgctacttccaactctgagctgatggtcattacgagtggatctgccctggacaagtagtttagtgtagctgccttggacgggcaggtgaaaagtaacaaaccgccagaaaactcagctaataaaatgttaggagagacttggggcaccaggaaggggtgaggcctgtctgtgtgccatctgtgtggagcctcagtatctaggggacagcgttgacgctgagccccaggtttttattagtgtttccctgaataaaacgccactcctgagctgtggactgggaggctctttctgatgattaggcttcataatgcgggatcactaggcaaggtggatgtgagggccataggatctggagactgtccaggactgctttctggaaggcggccagcctgctggagggggacaacaggcttgtcccttcagcagtgaagccaccaaagagagtctttttgagaataaaagagagaagcttttaaggaaaaaaagcagtttctgtctctgtttgggagttgagtgcattttcctgcatttattcagagatgttcgtcagttcccactgtgtgccggggccccgctatggggtagggtcaccccaccgcgtacctaacccaggaaaactcgtctgcagttatttcagaggctgtttgcatttcttgtgcttcaatgggtggagggagtttttcctcctactgtttttagtcagttttcttaatctagcctgttactgggataagttccagagccgagcagttttaaaaacaatctttgcaccttgcatggagagcagtccatctgtgggtggtttgttcctggaggtgctgcagtggccttgggtgacgcgagggccccctggctcaggatgggccgaga

SEQ ID NO: 7112 - DNA, 1009 bp, Homo sapiens
attaatgtacgttatagccaagtgttataaaattaatttaacagcaaagtaaaactaaagctgcattgatttctcactgtacttgtgcttaaagacggctccatgaggcaggccctgtgatcctgcaggccggcaggagcaggtgctacctggctggtgcggtcgccacccgtcccctcttgctgccaggcagctttgcagtttccaggctatgggggagtcgaggcgggtggtcagtaagagacagtggggagttgggtggtgcaggttggcgtggggtggaaggaggcgtggagtgtgggtgtggagagcctgggggaggctggacagcagctccagtacctgcacagggggacagggtgcggggggcacggggcagtgagtcgctcctggaaacagcccttggggtttttatagatgggcctgtcgtcagctctgcaccacattcctgctggggctgggtggagagtggaggcctcgagcatgcgtttctccaggtgagggcccagctgacacagccagtgtttcctggaggcccctcacctgggaacgtgcccctgctcttctcagaacaaaataaatcttaaactctacacatcacctttccagaaagtgtttaagtctgtgtgcctgttaactcacctaaatttaaagagtaatgatacaatatgcttctttttaggggagaaaacttagctgatttaaaagataaaatcagaggtcgggggacgcagcattttgggggagacagggtttatgtcctagtggtcagcagtgtttcctgaactattgtgtttgctctattattacattacagaagtgacacgtcaaacctagggaaataggcaaaatagccccccccattcagagataaacgttatcaacatattcatgcacttccttctgtttttgctgtttgctttttaagaccacgttcataggatgggtatataattgtttacagtgactttaaaagcacctttcttgttaaaaagagtattttttcatt

SEQ ID NO: 7113 - DNA, 1033 bp, Homo sapiens
ggaacagggaacagccctccccgtgtggcctccccagcaccacccaccccgcaggacctccagtgttgactctgctggggtcttctctctcctggggggtccttgtcccaacgggaggactccatgggccgcaggaggtgtcaagctattttctctcctggaactgggttgctggcagctcccagatgcaggaggaaaggctcagaattgccttcctaataaggaattgttgatgtgaactttggacggcaaacactgcttacatttccttttccgttttgatgtgttaatggtgtgcggcaacgccgtgacgcacggggacgcaggtgacgggcacccccccacaaggggaccatgcacctgtttgataataaggcatgcttctcttactgcaaataaaaacttcaatggttttctgccagaaagaccctgtcttttatgtaggatacatagaggatcatttggcaagtgattggggattttgggttaaactaaaaataaattaatttcattttatagcactctgaacacatttgagttaattattcatcgagaatttgaatagcacacactgttctgacttccgacttcccccaatgaatggcatttgctgtaacgtgacaaaaccctgagtcttagaattattgggtaatgtgaaaaaaggaaaagttggttctctgttgttttgctttaaggaaattatattattttacagtcacttagttttctcctttccaataagaaaaattgctttcttactacctgaaaattcgtgaaggtcaaggggacacaccctgcagtgcattaaaagccaccatcaaatgtggacctggactcagtttccctctgttccctcccaccctcaaatgtggacgtggactcagtttccctgttctctcccaccatccaatgtggacgtggactcagtttccctctgttctctcccaccctcaaatgttgacgtggactcagttttcctctgttctcgcccaccatcaaatgtggacgtggactcagtttccctctgttctct

SEQ ID NO: 7114 - DNA, 1024 bp, Homo sapiens
gtgttgagttgcatgtgttgtatgttgtatgtgttatatgttgtatgttgtatgagtgtgttgtacgtgcatattgtgttgtgagttgcatgtgttgtatgagtgtgttgtatgtgtatgttgtgttgtgagttgcatgtattatgtgtatgcaatacacatatatgttgtatgagtgttgtgttgtatatgttgtatgttgtgttgtgcatgttgtgttgtgcgtgagttgcatgtgttgtgtgtgttgtatgagtgtgttgtatgtgtatgttgtgttgtgagttgcatgtgttgtctgtatgttgtatgagtgttgtgttgtatgagtgttgtacatgcatgttgtgttgtgagttgcgtgtgttgtgtgtggtacgtgtatgtcgtgttgaatgtgagttgcatgtgttgtacatgtgctgtatgagtgtgttgtatgtgtatgttgtgagttgcatgtatgttgtatgtgttgtgttgtatgagtgcattgtatgtgcatgttgtgagttgtgtatgttgttttgtatgagtgttgtgtgttgtatgtgcatgttatgagttgtgtgtgctgtatgagtgcattgtacatgtgtgttgtgttgtatgtgttacgtgtgctgtatgtgtgtatgtgttgtacgtacgtgttgtgttgtgagttgcatgcattgggtatgtgttgtatgagtgtgttataaatgcatattgtgttgtgagtagcatatattgggtatgtgttgtataggttgcatgtgttgtgtgtgttgtgtgttgtcagtgttgtatatgttgtatgagtacattgtacatgcatgttgtgttgtatgtgagttgcatgttgtcagtgtgtgcgttgtgagaggcgggggcatccacgtgactgctcctcagcaagtcctgccgtgcagccccttctgagcgtgcgtcctcccgagtagcctagaagcagcagcatgtttgcctctgcccctccccaggaggcctcagccaggtcctgtgctcagcctgccgtgggcca

SEQ ID NO: 7115 - DNA, 1028 bp, Homo sapiens
gtggattatatcagttttattttctgtggctgaatcatcactctacattgtgaattaatgttatttttcggctcatcttcataatgcagggaggttctccagtgttgagtgcaggttcagtgaaagcgctaacactgttaccacgggcttaaacggacttgttttctgaggcgataaccctggagtcaggcattcagtgtctgcccatcacttggttccgagttctcggtcccctcttgctctcctccccccgcacccccttgcttctgtcttgtcttctttttgactaacaggccctctgcagatggtgtgttgggggccggggtctgctgtgagtctttgataaccttgggaaagaactttttctttggagcaagacccctctcaataaactttcagtagcccaactattgtccgttgtgtgaactatttgtggaaaatgctcagcatttttccttggattctggctgatctttctccacctgccaatttctcctcagtttgccgtgtctgtaccgtcaccaaccccgttccagccgcggttacatgtaaagtaattgaagcagagctctgcagatgagagagtgtgtgtcgccccccgagttcccttcctggcctctgagtgtgagttgtgttttgttccgagggatgactgaggctcctggcccctgttttggagcaccccacaccaaagtgggtgtaaaatgaaaaaagggtttatgctatattattgtaattcatggagcagatgataaacatgcttgaatctgaacagcagctgaaaatgaggacatgttaccagtttggatgttggatgaccttcttgaaaaaagcttttgtcatactttagaaactgtgcatgtgctgttttctatttcatacttagaatctgtacagtatgtgttgtatgaatgtgttgtatgagcgtgttgtgttgtatgtgagtggcatgggttgtatgtgtgttgtatgtgcatgttgtgttgagttgcattcattgtatgtttgagtgttatgtgttgtatgag

SEQ ID NO: 7116 - DNA, 1035 bp, Homo sapiens
gcgtttcctccgtccgtgcgtctgtgacgtttcctccgtccgtgcgtctgtggcgtttcctccgtccgtgcgtctgtggcgtttcctccgtcggtgcgtctgtgacgtttcctccgtccgtgcgtctgtgacgtttcctccgtccgtgcgtctgtggcgtttcctccgtcggtgcgtctgtgacgtttcctccgtccgtgcgtctgtgacgtttcctccgtccgtgcgtctgtggcctgtttcctccgtccgtgcgtctgtggcctgtttcctccgtccgtgcgtctgtggcgtttcctccgtccgtgcgcctgtggtctgtttcctccgtccgtgcgtctgtgacgtttcctccgtccgtgcgtctgtgacgtttcctccgtccgtgcgtctgtggcctgtttcctccgtccgtgcgtctgtggcgtttcctccgtccgtgcgtctgtggcgtttcctccgtctgtggatctgtggtgtttcctctgtctgtgagcctgtggcctgttttctccgtccacgctggaggccgtcgcttctctctagtcaccacttactgatcgctgtgtgctgagcctgtgtcaggcgtgtggcatgtgtcccctgtgtggcaggggtttgcgtgacacacagggacacacgctcggggagccgcagggatggggtcatagccacgtagcggagccctcggtctgaggggcttggtgcccacccagctcttcctgaagcggcctcggggcagatcccagctctgcttcctctcctggaggcacctcatgaagtaaattaagcaaatccaaggtaggaaacggttttgaaatgagacctggtttcaggtgtgtgtggtcatttctctctacatgtttacttcatataccctgaatgatatacttttccacctggtataacaattaattaccagccattactggtacaaaattccatgaagaatatttgaggaagacatagtctcaaaaacatgcttcattttcacagctgtgatttgcatggtaaagctgtcaggactgtgacttt

SEQ ID NO: 7117 - DNA, 1065 bp, Homo sapiens
gaacaaggtggagtgtccgtttcaagcagtacatcatgctggattcttaagtgaacattatcaggctttcaacacattttctctttttatttactttggagaatataatggatactcagaagctgttgggatttagtaacaggaagtcatccttaaggagctatttaagcaagggggcagttggagtaaatgtaagttatgaacacacacctattccaaaccagagaaataaaggcttcaattgtgctggggttgaaacttggtggctagtgtgtctttcctgcccacagtgactgtggcagtgctgtgggcaggaaattctggaaacaagacttggtgccagtggtagtttttgtggtgattcatttgctttcagctcaagtgactatagtcttccttgcaagtggttaggtctccaccaatggaccacaacattgacataggacaaatgagaaatagcacttgggtttttaacaattattctttttaatggacacattatagtacatatctatgggatacagcgtgatatttcaatacatgtttgtcatgtgtaattagcaagtcagggtaattagcatgtccatcatctcaaacatttgttatttcttaatggtgggaatcttcaaaatcctctcttctagctgcttgaaaatatacaataagttgtaaactatagtcaccctacaaggctatagaacactaaacctcatttttcctatctagatgtaattttgtatccattagttaacctctccctttctcccttcccgccaccctttcctgtctctagaatccactattctaccctcagagggtagaatattattttcctcatagagatctttaaccctcttggttagatttcttctgaggtatttttatttttattttatatttttgtagctaaatgggattgctttcttgatttctttttccactggctcattgttggtctatagaaatgctactgatttttatatgttcattttgtattctgtaagtttactgaatttgtttatcagttcaaagagatttttgctggagtcttttttttttttaata

SEQ ID NO: 7118 - DNA, 1030 bp, Homo sapiens
caggcctgtgggcttggctgctgccctcctgaggagctgaggatgaggagggcatggctaggaggcgggagctgccgtgtgcagggttcggatgtaaactggtaagtagattgtgcagtgcagacagctcgtttggtgggtaaggagtgtatcatttgcaaaaggcccaccctggttatctgattgtgtcagccttgggtaggtttcccggcttgcgtctcggcccaggtgcacccctgcctgcagcaccctccgtgttcgctgtctcaggacaggggcttctgtgctgcctgcatcacactgatgtgaagtgtcagtgccccatccaggtcagcagagcgtagcgcccctgagctcagcagggcgagccccatctgagggttcccccacccactgctagcccagaagttggacccacatttgttcccagagtctgggatgtctatgggaatgggtgtcctgtgttgggcattgtggccttttgaggtgacgacacttgcctgtcagttgctcttggagggtgagtgatactgtcttgctgcccagatgatggcaaagccactttcgacgaaggtgtgctcagccgaattccctgtgaacaccttgcgtctgtacaggttttttaaaaagggcttaatgagttagtttcttattgagagaccaggcagagaaaggggtgtgtgtgtttgcatgcaggaagcctaattatatttttccttccacatgaatcttgctgagatctgagctacacatttaagaagaaagggtgagagggttgctccgtggctctattcagcctctctgcaccctccggcctgtgctggccccactgcctcatctgtttgctggatggtctttaactttgctgtgaagtgtgggtttgcccaggttgagtttatgggggtagtgctgtaaggtcatttggaattctctgtctcataaccacataaaacagttttacaggcttaaattagatgaatcaacttgttttccagtattgcttaatagaaatccaagaattgaaggatca

SEQ ID NO: 7119 - DNA, 1030 bp, Homo sapiens
cagggtcataaagttaatagtgtgtgtgtatgtgtgcgtgtgtgtgtgtgtgtgcgtgcacacgcacacacacacacacacgcttttaatccagctgggcctaatcgtgtgtgtggtgtgcgtgcttaggcaggaacccagttttactttatgccatgtggaaagtttctttttccagtatcaccagtgagttcactgtctctccactggtctgcagtgctgcttctgttacttgcagacttcccacgtgtgcatggatctccacctggggtctctagggtctctattctacactgcctatttccctttctgtcctaacaccatagcatttaactcacccgtcatcctgtgttgctgagaatttccttcatagaactcatcaaagtatgattaactgtgctccctgagggcaggaattatgccatctggatcaccagcctctcccttgtccttagcacgccatctgcaaattagcagatactcggtaaatgtgtattaactcgaagtatattttgtgtcttctctgtgcacagcactgccctgggaagaactaggatgaggtattgacttgctgttgccacataacaaaccctgccagaactccctggatggaagtgaccaccgtgtatctgtggattgtctgcagggctctgctggggtcagcaggtcccacaagagagccagggctcggtctcctcatggctgtcagaggtttacgtattccgcctccacccaccaaagtctgaagttgttgtattccattccttgctatatccacatcttttaataatgctaaaatcccgtgtttctctaaagcattggattgaaccaactgaagaaggaccacgtgtgttgctgggcctgcttgggcacaagccgtttccgatccaagtcaactgctggtctgcttagacgaaggtgtgtgggtgtctccaccacggagaggagggacagcaggtgagaccataggccaggaaggaagggcacagcctaagcgtgcagtggcttagccagagaccctcgtgcacca

SEQ ID NO: 7120 - DNA, 1071 bp, Homo sapiens
atctccctgtacctctgcatcagcacatggatttaagagttatgtaatcgtgagagaatggtgtttgtggtttttccccctctttggctggtggaggataaagttcctgctcttttacctccaagacgagggcctcattgattcacttccagaagtgctgcacttctgaagaacaaggatgcactaaagttagcaagtttataataaagttaaatataaattattttgttttaaaatgcctcaaatttttctttattctaagcagcaaacattaaaataagaatatttcctgctaaatgtaaccatacactttattccacaaaatgttatttaacaagactgagggttttttttaagaaaaaattatttccatccaatatttaaagacttgaattttatttaaacttgaaaatgactttgccttaacttttgtataagacagcttagagtccatggagcccggccctgggttggcgtgagtgggtcagagttactcagttactgcgtggatctcctgtcgctagttttactgagtaagcatactgtagtacaagagctagtagtagtttttgtaatataccttaaagatcttcaacagttgatcttttttcagaatgttggaaaatcctgtaaatgcaaatagtcaatactgtattaaatacgtgcacttggagtgtgcttcgcttgtacagttgtaaataatcagaacatatgaaaaaggtaccctacagagaaaattctgatacagattattgatatattataaatgttgctgttgagcgggatgtagataaactaaatgttgtggtttgaatattattttgatttgttgagattttcttttttctcttacatcggtgtgttgaactgattctgcctctttgctgcaaaagggaattggaaagtcttattaaaagcctccagatgttttcatactcttttaaaatgtatgtaaatgcatactaatcatatctaatgtgaaagagttttaaagtatatagagagcaaaaactggcaggatcgtaagtgaaggtgactagtaatctaatttaaatcacctgcagctaagca

SEQ ID NO: 7121 - DNA, 1049 bp, Homo sapiens
cccacgaagatgggagggatgcctccatgggcttgcagatgtggaattccatacaaggaatgctggaggagacctggacaaatcctggtccagcccctcaagccatcacacaggtgctttctcatcacaaaagatacaatctctgtttagaactcagaaattgtgcctttcatgaggtcggcttagtctagtttttgtttaactagttggtaaggcagtttttaccagttaattgcaattggaattagtgaattcctgtgaccatttggactaacaagtcaagcatctaaacacagggcactgttgtgcctgccgtgatgttttcccacagccatttctcttccgttctgttttgccttgcattcctgatgcatgtgttcatgactgtgacctgctttgaagcttcggcttgtggcccagtgttgtattgattacagagcatacgcccatcgtcttatgtacgtgctctcaggacctcagaaaggtccagacgctttttctgtaaaagtgtgtgagcctcgggcctaaccacgcccatgggacctgagcagtactcagacctcacccagaggtgctcagatcctagaggattttaacactgccttccaagtcaagtcccatctgtgggtgatgtcattttgtaactcccacatctgggcagttgttgcctgcctcttttgcttctacaagttgagatttaaatacatttttggggaaggctgtctctctaataatgcttatcttctgaaaagctgtgttcacctcagaaacgtgcagatgtttaaaaccgctttgccatcatagtggccatgtgtaacttagagctttgcaggatcattttgagcatcatattcacaatactaggttacagagagcatacaacagccagctgctcagtaggtaacaagcttactgccaaggacacctaactgggaaaagctaagctaaaattaggcacctgtcgcgtggagcagagaagcaagcggaatgcccaacacagactggactggggtttgtgtcagcctgaattcattttcatcctttgacct

SEQ ID NO: 7122 - DNA, 1062 bp, Homo sapiens
ttcagcttagctattccatgtcagtatgcatgttatgtaatgccttgatcattttataactcaacacataaaaccatttttatttacaggaatcctagtaaatctcatctgcggcatgcgattcctagtgcagagaggggacctgggttattagaaagtccttcaatatttaacttcactgcagatcgattaattaatggtgtccggagtccacaaacaaggcaagcaggtcaaactagaacacggattcaaaacccttcagcatatgccaagagagaggctgggcctgggcgtgtggagccaggcagtctcgaatcctctcctggtttagggaggggaaggtgagttgttgagcagttactgtgtaacatcataaactaatattttaaaaattatttaatttagatatgttttgtaattgtctttaaatatgtcacagaaaatctaactgaaggctataaacataagggttttatataattgctaagacttaaatggcttcatcttttttggaatatgaaatggttcagtgagaactgtagttgttttagatcattatttgtagaaacactggagctcaatagccatagactccatcccatgtgcctgcagtctcctcttggcagcacccctggctcaccaggcccctctgcaagggcggtgtccaggctctgccccatggctgctggcctggcgccctccagctgggtgtgcaccaggcactgcaggtggagcctggagcgggtaaccaggcagatcagcattgcagtctcatctcattggagggttgagactagccaggacgggtcttagctgtgcttcctgcccaccatttttggttttgtttaacatttttttggcatcaatcctgtagtaggtttttgtttgtttgtttgtttgtttgtttgtttttaagacagggtctcactccgttgcccaggctggggtacgttggcatgatcatggctcactacagccttgaacttctgggttcaagcaatcctattgcctcagcatgctgagaagctaggacttcaaatgcacaccaccatgcctggctag

SEQ ID NO: 7123 - DNA, 1053 bp, Homo sapiens
ctatcctcttttaaccaacccatttgtgttttcatatttaaagtggatttcttgtgagcagtgtgtaattgggtcttgcttttcttatccaatctgaaaatttctgtcttttttttttttttttttgaggtggcatcttgctctgttgccaggctggagtgcagtggtgtgatctcagctcactgcaacctctgcctcccgggttcaagtggttctccttcctcagcctcccgagtagctaggactacaggcatgcgccaccatgccaagctaattttgtacttttagtagagacagagtttcacaatgttggccaggatggtcttgatcttttgacctcgtgatccgtcctcctcggcctcccaaagtgctgggattacaggcgtgagccaccgcaccgggcccaatttctgtcttttaattgggagtgtagcccatctacatttaagaggttaatgatgtaatgatgtgattaaatttaaatttatcatcttgctgtttgttttctgttttgtctcttctttattttctttccctttcccctccttttgtttgggattaaatgtgtatttttatctccttttttggcatattaggtataactctgtgtttctgttttttagtggtgctttagggcatgcttcttcagcccgtgggcggcatgccgcccaggacggctttgtatgcagctcaacacaaatgcgtaaactttcttcaaacattttgaggtttttttttttttttttttttttttttttttttttaaagctcatcagctatcgttagtgttagtgtattttatgtgtggcccaagacaattcttctacttccattgtgtcccagggaagccaaaatattggaccccctttctttagggtttttagctgaccctctaactttactagagtccgtgtaattcacagagcaccatgcctctttaccttacagccatgctctcccatttacagccatgctctcccattctccacttctagcctgtgctgttgtcacacattctaattctacacagtcataagcctcacaatacatcgt

SEQ ID NO: 7124 - DNA, 1046 bp, Homo sapiens
gaaatgagtctcaaccagacagccaggaagacccccgagaagtacttaaaaaaacattggaattctgcttatctaggtaaggctggtggtggtttttctagtacctgatatttctagtattgtgcaaatagttaaagtatatacaaatgtgatattttatgaaggagtatctactcatatccatatatatgtatatgaagacgtggaatattgagtaatgacagtcttttgacatttgagcatggaacgtaaccttcatgtctgtggtccccagtggtctcggtggtcactgtctggaatgcgtctaaagtgccccgcccgccctgtgctgccgagtcagacttcctcacactgaagttggagaacaagtgtgccacgttgtttctgaaagcacaccagacactgagatagcaagttgttttatttatataacactcatttttaatcatttttctttcccctgaataatacccttttcttagtaaaacctttaaagttccaatggcagaactggacataaaggaggatgggattgggtttgatgtaatttctctgagtatgacaacaaccgatgggccgtgtataaggttttctgtcgatgatgattttccaggtgttttctctggagccctgaggattccacacaggtgtctgctaggggctccttgaagcctgtggggtgtatgaggtggaggtgtgaggggctctgctggcctcctccccatgcccatgctgttccacgattggagtctgagaataccgcaccatgacatggtagacgcaaaaggtgcaggggcaccagtggaacgccctagtggagcacaagtgtgagctctctgccactcacatccatgtgtagccccatggggccagaatcagctacacctggaagatggccgagatgagggtggagcagggcctcctcctgcatggcctccgtttgatcggcagtcatgggccttcaccgagggacactgagcagaggccccaggaacccagcactgtgctcagttttgaaatgtttcttagggccttgttcactacat

SEQ ID NO: 7125 - DNA, 1057 bp, Homo sapiens
acaacagacgtgtgatagaatttgacagtgtgtactgtttttgtctgacttaggttactatttttgagactgattcatgttgtaacatgaattaatcatttatttttattgctgagaagtattcatgatatggatagatcacagtttgtttttctattcccctattcatggattttgggattgttttcaaaatgtggctttgccaataaaaagtgttcataaaagtgaacatttgtcagcaagatttcatataaacatatgttttcatttctcttgggtaaaatacctaggaatggagtagctggatcatctggtaggcatgtttatccttttaagaaatggtaaggcagttttccaaagtggtggtaccattttctattctcaaccagtggtggattaaagcaccacatccttatgacccttatgacctcagggtcagtctttaattttagctgctgtaaaagggagacagtagaatcttactgtggctttaatttatgtttccctaaggactaatgctatcaaacatcctttttaaaaaaaagactgttttttttagagcactttcaggttcacagcgagttttagtggaaggtatagagatctcccatatactcccctcccccccacccccacacatgcatggccttcttcactattcacactccctcaccagagggtgcctttgtataattgatgatcctatattggcacatcattattacctggagtctacagtttacatgagggctcactcttggtgttgtacgttctgtgggtttggagaaatgtataatgacatgtaccctccattgtagcatcagagagagtagtttccctgccctaaaagtcatctgtgttctgcctactcacccctccctccccccaacccctagcatccattggttttttcactgtctccatagttttaccttttccagaatgtcatagggttggaatcctgcaggatgtagccttcttagataggtttctttcatttagtaacgtacatttaagcttcctccatgtcttcaaggcttgataactcatttctttt

SEQ ID NO: 7126 - DNA, 1034 bp, Homo sapiens
taacaaagcagatagtatccttcctgttggtctagatagaattgatttaagtcctaagaggcctatcactgcagtaagatttggaagtgggtgtctctcaggtcacgctaattcaagagaagcagccccaagccagcttgatgactgctgggagccggaacctgtccccagacaagtcaggaaggcacagcgcagaggggactgcagcctggaggccagaagtcccctgctgccagacagaggtgaggtgtctctgcaatctgaaaatagtgccttttaccaagaagaggacagaattggcgtttggaaggctgagggtcatggtgtaagggcttttgagtcaaaatcttggtgtcaagcagatgaggctgcaacacagacctgtgaccaaacttgtgtggagcgtgtggtggacacgcaggggacggtgcagaggacagatggcctaaagcttagcatggcacaaggagtgccccccgatggcaagtctcccagtcactccagatctcttcacagtaactgtgtttcctccgcatttattttcacctgcacagaggaagaagagagggaaacaagcccaggtgacaaaacagagggtgaaatatgtgtgaagagttcagtcagtgtgtcacgagaccagctgagtgaccctcaaaggttagaaggtagtgaaaaagaatcactgcaagcaaagtatagtgagacaagtgaagatgacatagagactgtcaagtcagattctaaaacaacctatgagtgggaaacaggtacacaaagacatgaggcagtgccaagtcaggatgtactctcctgtgttagttctagtgcaacagagaacgctgattttgaaactaatcaaatagaaaaaagttatgaaacacaccgagtatacgactgcaaatataatgttcttagtgtgttaccacatttcagtccaagtgttaatccagttatacagaagtcagaaatagtagagaattctgttagtggtggtaaaagcccaaaatggaagggaatttcctctgaatcaattg

SEQ ID NO: 7127 - DNA, 1029 bp, Homo sapiens
agacttgtcacaggagcagagccactgcagagagcctgtactcgggcaatggcaagcagaaatttggagttgaacctgctgcagagaagcccccaccagggcattgcctagtagagtcatgggagtggcctgggagccttaaactgtggagctgccagcttgcagcatcagcctgggagagctgtgggcaggagactccaacccctgacagctgctgggtggactgagcccagcaaagccatcgggtggggctgcttgaggccctggggagccaaccctgttccactgtgcccagagggttgggacatggagtcaaaggagatgattctccagagaggcttaatatttaatattgtctgccctgttgggtcttgaacttgggacctcttgcttcttcttgcctatttctcccttttggaaatagatttttttttcttttcttttttctgagacggagttttgctcttgttgcccaggctggagtgcgatggtgtgatatctgctcactgcagcctctgacccgctgggttcaagcgattctcctgcctcagcctctcaagtagctgggattacaggcatgcaccaccacacccggctaattttttgtattagtagagacggggtttctccatgttggtcaggctggtctcgaacttttgatctcaggtgatccgcctgctttggcctccctaagtgttgggattacaggcgtgagccatcgcacctggtcgggaatttttttgtgtgtgtgcctgtcccaccattgtattttggaaacacataacttgttactttcaacactcagggctggagaggaattgatcttggggtgaattgtgccttgagtctcaccctatctgattcagatgagactctggacttttaagttgatgctgaaatgagttaagactattggaggtattgggatggaatgagtattttttgcattataagaaggacatgaattgtgggagctggaatggaatgctgtgtttttcatgtgtcccccaaagttcatgtgttggaaaa

SEQ ID NO: 7128 - DNA, 1412 bp, Homo sapiens
tcgtgctgagacggagtagatcctttttaatgtaggatatttctttttgatgacatagtattgtaacattttgattgtagcattttggccactgacagaaggaatgccttctataacacatacccgtgatcttttcagctccaaggcatatttaaaaatagagggatttcttcattctctgtttggcttactattcttagttgtatccttgtgtaaatgatttacatgctgctaaaacttctcttgttgtggaagtgtgacagatgtaatagtagtctttcaaggcactgggatcagtaaaaacatctctcaacttagaacattttgtaatttctttaaaaaaattagtaattttattgcttagtatttgcatcatttagaatatgacaaatagtttttttgcaaactctttttcattttaggattcagtttaattgctattaaggcattttgttcaatagtagatttataaatcaactttgtgtggcagtaccatgcaaacagttgtactgagagaatagtcacatcactgggaggaagcgacagatgtgtcggagtccgctgcctggcaactggctgccttcctaggccccggtgtccttacatgtgtgtggaaatacaacacatacagctatgtgcacagatcgtaaaagtacaactcagtgtatttctgcaaaataaacacacgtaggtaatccactgccagatcctgaaacagcaattttcagttttggcagcaattcgaagacatgtcacaattatagaaattgtgaaagtaggagaaacgtgtatcttcaaatcagggaacttgtgtagatgagatacatgagtcacgcaggggtgtcagagtttctgagatggtcaggctgcttcattttttgtttggacttctcatctcatggagccagtgcttctcacctggacagctgcagtcactcctcactggtgtccccaacccacccttcctttctaacacagtggccagaggatcccttcgagaaggccaagtcagaacctgccactcctgtgctcaacatcacagttagcctgagttctggcaggtccctagccttcgtagtctggcacctgtcctctctgactctgctgcccactggctctcctctggcacgctgctccagccccagtgggctcttgacccttgaccattccagcatcaccttaccgcagggctctctgcctcaattggttctggtgtgcccctttcccagaagtctttgaggcttatgctcttacctttctcagtctcggcctcaccttctcagcgagccccatctatccgcatccgtctcctcacttctggcttgcctcagaccctttacgtgtagcagttagcaccttctaacaatgttaggtatttgttagatttagtgtttgtctccctggactagaat

SEQ ID NO: 7129 - DNA, 1080 bp, Homo sapiens
ctgacatatagttgtttatttgagatggtgttgtatttttaagattgtcttgtgtgtctagaaagaccataataactgtttaatcatgcaataaacatttctggtgtacatgaaaagaaatttttagaaactgatttaagagagttatggtctcccaagtgttgaacaaggttgataaaacttcttttttagactgtagctttgacagatgaggttaaaaatgtgttactagcatagaggccacagataggaagggagaacacttggacttatcctctctgctttttacataaagagacattaaataaaatcctcctgtccaattcagtaaggcctgcgagtggtgtaaggcactggcgagtgcggagcccgccttcaactccttggtcggctgtgtggaagtactttgctttggctggaggattcttttctcccattgaatatttccctttacaatctagagatctgcttttaggccatgccgggaggcaatagttgatatattttaaatctcaaaatattttaggtctcttgaaccagtaacaaaatatttgttatttattgaaacagctgtcaatacttgtatcattctttaaatctcattttagattcacacattaggtaagttaaaaaagcattaaaatgatacgttattaactgtttaaatgaggtgactatcagtaatcccttctgttggaaaactttataagccttttttgaaaaactgtcagattagtaattaagagatatattggtgtaaaggttactttttttaataggtaggatgcagagtgttcaaatcgggatcactgtgttgtgctgagactgtggcatggttacttttttaaccttttattatagaaaatttcaaatgtacaaaggtagacagaatagtatagtgaacttccttctctcaggtggaagaataacgatgaacctcagggtctctgccccacatagtactttgaggaagatttcacacattgtattattttccctgtaaatatttcaatatacatctctaaaagatagggtttcctttttattaaacataaccacatcgttatcacatctgagaaa

SEQ ID NO: 7130 - DNA, 1572 bp, Homo sapiens
attatattgaatctgtagcttaatttggggtttgttggcattgtaaaaataccatgtcttcccatctgtaaacatgggatgtcttcctcttcataaacatggatgtctttccatccatgaacatgggcatctgtccttgagaactgggttttaagggtttgtattagtggagtggttctcaagcttttggtctaaggacgtctttatgctgttaaacattactgaagatgcctaaaagcttgagtttattatatggtttgtctccatctgtggtttatctctgtctgtatttactatgttaagtatcaagaatcaattaatattataaatatacatttttaataataacaaacccattaggtaatataaataacattgtttatgaaaggtagtagtattttccaaaacaaaaaataattcagtgggaagagtggcattgttttttcatgttttgtaaatctctttaatgtctgacttaatagaatcttggctggattcttgtctgcttttgcatttcatctcttagtactgtgttattttggttgaagtgtgtgaaggaaatctggcctcaggtaatttattttattattttggtagtcatttcatataaatgaatattgaatattctttgatgctataccaaaactccactgtggttttgtgaggagagaataagagtgaaaaaagcaaagaacatctttgcattattttgagaatggtttgactttgtggccccactggaagtgtttctgggactctggactatgcctacaccacacattgagaaccattatcttagtgaacaggactgagcagtgtagtttcacaagaaaatttgctcactgaattgcacttgattaatctgtattgaaaaacaactgcaaagtgacttagatgcttctcctgcatgggcagcttctcctgcgtgggcagcagtgccctttctgtgggaaagatggcaggggaccttggactcagcaactgatggaatcagcaagctggatgttttatgaagacgtgtaataaaaataatatgttatttaaaaaactgagactctgggagatgaagtcaataagttaatcacacattgttagtcttttggcatattttcttctagtttcttgtttttacgtacttataaaatttgaatttttataaatatattgcaactttagtatctacagttttgtcttttttttaaatctttatgcagtttttgtgagtattttaagtaattgtaacatactgcattcgtttctacttttcttttctttttttttttttttgagatggactcttgctctgttgcccaggctggagtatagtggtgcgctttcagctcactgcaatctccacctcctggattcaagtgattctcatgcttcagcctcccgagtagctgggaatttttgtatttattttagtagacacatggtttcaccagcctggttaggcaggttggacttgaactgacttcatgtgatctccctaccttgtctcccaaagtgttgggattacaggcatgagcctactttctgcgtttttatttccatgggatttttttttttcta

SEQ ID NO: 7131 - DNA, 1055 bp, Homo sapiens
cggtggttgttttgtattatgttttagtaagaatcctagctaaaatggtcttttcaaaagattgtactctccagaagataatgtcgtagacccagtcacaggctttaacggtggaggggaccgttgtcctttttttgtgtgtcgacttagtagacacgttctaaatttaaaatcaggaagattttgaaagtatattatttggtggtcttctcatgtaggtactttttcaatcagatcttgctaacaaataagtttttgtatcttgtgtctgattatgtcctccttaggaggagaaccaactcaaactataaataaaactcacattttctcactgctgtttttttcagtagaagcaccgatgtacacatataaaggacattttacaaaattagtcttgaaatttattggcaacatctccttaggaatactccagtgctgagtgccagtttaaatgtataaacaactactctactgagattggacgcatttcttttatccgtcagtatctttgagtgacacacttactataagaacatgaaacgaaaagaatggaatatcatagagatactgaatcttgaaaaaaacaaaagactaaaataacagttttgttggaagcagcagtctgttgctctgtaaatgttcccactattcaagcttacagattcacttgagtatatgatgtgtataaggtacatggaaggaacataaaataatctgccctaaggtgctctcacattattctattgtaagataaaaatgtgcatttcaaatattacagagtggtgctggcagccgtgagataaaccatatcatccaactaacagcacaaggcagatggatgaggaactagaattcctattgtattttattttctgcacttctctatttagatatgcacgtgggaatcataatgaaaatttctgttaagaaatatatccttctgctgggtgcggtggctcactcctgtaatcccagcactttgggaggccgaggcgggtggatcaggaggtcaggagttcgaaaccaggccaacatggtgaaacctcgtctctact

SEQ ID NO: 7132 - DNA, 1056 bp, Homo sapiens
ggtcactgtacactgtgttttatgtatttttattttatttcattttatttatttatttttattttatttttatttttatttttattttgagacagtcttcctctgttgcccaggctggagtgcagtggcatgatctcggcttaatgcccccccaaccctccgccccccaggctcaagtgagcctcttaatttagcctcccaagttcctgggactacaggcacatgtcaccacacttgactaatttttgtattttttatagagacagggtttcactgtgttgcccaggctggtctcaaactcctgagctcaagtgatctccctttcttggcctcccaaagtgctgggattacaggtgtgagccactgcacccggcctattttatttatcttttaggggacagagtgtcgctatgctgcccatattggttttgaactcctgagctcaagtaatcctttagcctcagcttcctaagtagctaggactgcaggtatgcatcattgtgcttggattgtgtttaattttcgtaggtgagaagaaacatcagaatttttcacttgtgatgtcatgttggtgctcaaaaagttttagattttggaggatttcagatttcagattttcagattagtgctgctcagcttgtattctgtcagtgttgcgtgtcaaggtttttttttaacaaaatcaatttatgtatcatttcatggttctctgactcattgttagggacaaatatgccttcccatttgagccgcacaggattaaagcagctccgagctgcttcccagctctgacattttgccattctaaaaaatgagtttactcaccacttccccatcttactctttgagtattatgtattttcaattgaaaactgtagttttgtgatgatgaattggaaagctcaatagaacatgatctgtattccttgaagaaatgcaggatccactggaaatgaggtggagagagaccttttccacccatcagagtgaagcggtgtactctacaaggtgcattcctgacgaggaaggccctgtgtgctgtgctgccaattctgg

SEQ ID NO: 7133 - DNA, 1057 bp, Homo sapiens
cctcccgggtctcggttcaagcaattctcttgcctcagcctctcgagtggctgggattacaggcatgcgccaccatgcccagctaatttttgtgtttttagtagagatggggtttcaccatgttggtcaggttggtcttgaactcctgacctcatgatccacccaccttggcctcccaaagtgctgggattacgggtgcgagccaccacgcctcactcgacttttttttttttttggctgagtcttcctctgtagcccaggctggagtgcagtggcgtgatctcggctcactgcaacctacctttcttttttatattggcattttaccttaagagaaaaacttactttcctttcccccttatcattttgaccatacaaagatctctgtgtacaagggaaaaacaattagtctcttttcaactttccttacatcttttaaaatatgctctgtatataaaattgtttcttatacctaatagttttaattacgtatattaactacaattttaactcttagtaactcgaatttccagtgaaaaacccaggaagtaattttgaactgttttataccacatgacaacaatttctgaatatttcctcaatttttgtttataacctaaatatattttgtttataacctaaatatatttaacttttctgtaccctataaatgagatagatattttatgattacctgttaattaacataacatggctttaagattaaatttttgaaaagggtttgtgaaactatgaaaagtttgtttataaatatcttatttacattcatctaatttattcttcgttatttttatttttttttgagacccagccttactgtgtcacccaggctggagtgcagtggcttgatctcaactcactgcaacgtcagcctcctgggtttaagtgatactcccacctcagcgtcccaagtagctgggactacaggcgtgcgctgccatgctcagctaatttttgtatttttggtagagagggggtttcactgtattggcctggctggtctcgaactcctagtgatgggattacaggcgtgagc

SEQ ID NO: 7134 - DNA, 1056 bp, Homo sapiens
ctcccgagtagctgggactacaggcacgtgccaccacacctggttaatttttgtatttttttgtagagatgggttttcatcttgttgcacaggctggtctcaaactcctgggctcaagcaatcctcctgccttggccttcaaaagcactgggattacaggcatgtgccatcatccccggcctgtctgaaactctttttgtgatgttagtgttgacctaaaatgaagaagctgagtgaagagtttatttgggccaagcatgatgattgcaacccaggagcatagaccaagttgctcagcggcagttacaagtggatttttatgatgggatgatgtatgacggtgctgggaaggctcattctcagccctcagtcaagtcactgatttatgtaactgtcattgcttgttaaatcttctgtagtctttgaatttcatgcttttggttttcttagaggtaaaacaataaaatacatagtaaaaatcctattacattggagattcaatccaaattgtaggaaaacaataaaaactcaaacacaatggttaaggctggaatctaataacatgggtactatagttttcttatgaagcataattttttctctctccagtccccatttttactgaagatataaatcttaggaggaccagcttacttgcaaaataagttttagtattatacttgggctgattatttgcataaaatgcaacaagaataatgattggccatataggttctttaagttgtctttgctggaactttcataaggaattttggattcaactataaagcctcaaggctaggaagccaagccaaggactatgctggtaatacttacatgaattgggtgaattcctctcttcttgaggtcgcaaaatatcttgaggttcctgggcttgtcagaaagtaagattgttttacttgctgcacatcaggaaccttgtaaaggagccatgtaaacaaggtaccaggctagtctttccaacaggctttttattggctctacatagtcaacctctgttctttaaaccagtctggtcatatcttaaaatacgcc

SEQ ID NO: 7135 - DNA, 1033 bp, Homo sapiens
gatgagacttgatctttgctgaaagtgttctttatgaagtctgatgtgcataaatttgcccaataaaatgctcttttatttacacaaatcattttagtcgcactgtagccagagtgtggcatagcctgatggctggcctcttttcagaaactcatcaggactgccctaggcctcgccctgtgtgtgcttccacttctgtgtcttccttcttgccctgccccaccttttaatcaggaccacgcctccctctcctaccttggtgttgcaaacgttgtagccattgctgttggtagattctttgactgaaattgaatgtccacctcctttaaaaaaatttttaaaatatttacttagctccttaaaccatccttaaaaagatattttaggagtcctccagactgctttgcattaacttctgagattatgcttctctgtttctgtagcaactaagtgtacctttgtgttacttagcacataattaatgtaagctccttgtgagtgagattctctttttatgcttgtcacctctgcccagcccagggactggtaaactgtagatgtttagtgaaagtaattcaagtaaagagataagaatgctcaaagacatctcccacctgtgttccagagaaattgtttgctgattgtatacttgcacatttctgtaaacaaataggaaaatctttactcaaaaagcatacattagaaagtttcttatagagtataaaagttatatttacaagtttttaactgacttttcatagctacatttagcgcataaagtattttcagatagagtaatttagccacatgacctttaaattatactgtttctcagtctttaaaaacgtgccctctttcggccaggcactttgattcacgcctgtaatcccagcactctgggaggccgaggcgggtggatcacctgaggttaggagttcgagaccagcctggccaacatggtgaaaacctgtctgtactaaaaatacaaaaattagccaggcgtggtggtgcgtgctcgtaatcccagctactt

SEQ ID NO: 7136 - DNA, 1072 bp, Homo sapiens
gggagaagacatgaacactgaagtcatgtttttggaaaataccttgttaaaaacagacactgctgtaagggtttccttgcttatgctcttttgtagaactttattgatgtgaagagttctcctttttctgtaaaagcttattttagagtacgaagtaaatgaggcactcagagagttaacctcatcaggtctgagtttagttcagtttaaactttttgctcttatgctggttgatatctttgtaactactctacttctagagttattttgattggaaaatgaattccttttttagaacatggaattgtaaggtagaaaactgctaggttctcaaaagaagggagataaattccaacttgaaagttttttcccctaacgttctaatgctttgtttttcctgtgtgtaaatgccttccttaggaacaaggaaaattattaactcagctgtgtttccttcccttctctttctcactgcccccccgccaccccataccttaataccttttgtcccttcaatgcctttataaactctgtcttctcatagtttttctggtgaagctgtcatggctcctatttcaaccataaaggatttgcagttcagtgatgctactggttttacatcttctttcccatcaaccccattgccctggttaggagacctagaccatggagtacattgcaatattgaaagtatttcatgtttaacacaatttttttttttttttttgagaccgagtctcgttctgttgcccaggctggagcgcactggcacgatcacggctcactgcaacctctgcctccagggtttaagcgattcccctgcctcagcctcctgagtagctgggactacatacaggtgcgtgccaccacgcccggctaatttttgtactttagtacaaattgggtttcactgtgttggccaggctggtcttgaacttctgacctcaagtgacccatctgccttggcctcccagagtgctgggattacaggcgtgagccactgcgcccggccatgtttaacacaaatttgaaagcgtactgcttagttttttagggggagtatgataatcat

SEQ ID NO: 7137 - DNA, 1050 bp, Homo sapiens
tttgtttttgtttttgtttttttgttttgttttttttggcttgtttacacatgtatctgggcagagaaaacagcttctgagcacagaatgcatatttggagaaagcagttccactctttttgagtaggaaccagacagaaaaaaagataacatgggtactattctgtagaagagtagctgaaattaagtggcagcaaattcagggagaaatgtaatttggtttaatgttcgggaagattgccatttttaaaagtgagatttaaagaatttattgaatttaatgcaatttccataagtaagcacaagttttgacaagtatatatttaaggtgtttttatgaagcagtcttcacattatcttaaaatgtagttctaaaatacgtgcaggctgggtgaggtggctcattcctgtaatcccagcactttgggaggcctaggtgagtttaggagcccaggagttcaccagcctgggcaacatagagagacctcatctctaccaaaaaatcaaaaaattagccaggcatggtggctcacacctgtagtccagctgttggagaagctgaagtgggaagatcgcttgagcttgggaggttgaggctgcagtgagccatgatcctgccactgcactccatcctggacaacagtgagaccttgtctccccccacccccaaaacatgcaaattgggacatcaaattgttaatggtgtttacaatgaacagtgccttcaggtagctgcagctactctacatagatttgcaagtttttgtagtgataggctatggtagatgttaccagccaaggagtggctgacaaactcctttcactgttatttcattgtcatgttaaaattcatattttccgtcaaaatagtgatagctaggattataatctaggtcttctaatcttagtaacgtgttgtctatgttagggcctctcaaagttgtaaaaaagctgtatagatgtgttaccatcaatcgatttcatttgtttttatcctagtgttaaaggtacaagtttttttttttttttctttcctgaggcggactttca

SEQ ID NO: 7138 - DNA, 1049 bp, Homo sapiens
gcaggggaaggccggggccgggttgaggaggaccggggctagggcacgggaagggccagggctgaggaggaccggggtcagggccaggaaaaagccggggctgaggaggaccggggccggggcaggggaaaactggggctgaggatggccgaggccggggcaggggaaggccggggccggggcttaggaggacccgttgaggcgaggcgggagtcgacggagctgggtgcccggaagaccgggccggggtcagggtcgggaggccggggttgggcgaaggccggcgaggacgggggtcgggcagggcctgggcggggccggggtcgcgggccgcgagcgcccccaggccgggcgggcgccggcacccgcagtgcggcgccagccttgccactcgctcctcggtcccgccggagcccggataggcggccgtgcgggtgcggggcgggacgggtcatcagggcatcgcattcctttagaaccaggaagttgggatcctgttgctcggtgtgtgtttggaacgctcctgttttcctgttgatagacttgagcagaggtggatctgaaggagttaaaaaaataaagtcagatgtgaagattgcctgtgttggtcttggggctgggatacatgggcggcagagaagccatcggaaagctgctgcacctgcctctcagggtgcgcttgggaacgtgaagagtctttccgtttcagtgccgttgtgcgtcgaaacttcatgcgaatgtaattttgcttttccccttatttttacgtaaaacgttcttaaaacttggctgagatgaaacttgagaaacctagctgtagaaaactacctcctatctggctttcgtttgagattctctaagtggatgcccaataacttgtcttaatagtaaattggaagtttgaagttttggataactgagaaaacaggaaggttttccttgacagggcagtggagtttgtaagtataaacagtatgcgtgaggcctttttctagagatgagagcaactccaaggtgaacattgaaggggacagacaagttattttccc

SEQ ID NO: 7139 - DNA, 1023 bp, Homo sapiens
ctccagcttgggtgacagcaagactccgtctcacaaaaaaaaaaaaaagaagaaaaagaagaatgtcacatttctagtttgagtgactgcccctttttttaacattaaaaaaaaaaaaacttatctgatcgggaaaaaaacgcaaacacttgaaactaatgatgtaatcatttttccatatataatattaagatttccatataccattgataggagattaatgctttaaccaagttctaatcctaaaactatactgctgttcgagatatcgctgtaatacagtgagctaattttagattttttttgttacggtggccgatgttttaattacttttttttttttaatgtcttaggttcctccagaagaaattaattatttaacacgaattcactacaaagctcagtctgatggtatctggggtgaacatgaaattgattacattttgttggtgaggaagaatgtaactttgaatccagatcccaatgagattaaaagctattgttatgtgtcaaaggaagaactaaaagaacttctgaaaaaagcagccagtggtgaaattaagataacgccatggtttaaaattattgcagcgacttttctctttaaatggtgggataacttaaatcatttgaatcagtttgttgaccatgagaaaatatacagaatgtgaatatgtaggtaaatgattacagaaaaatttatctgcttaacaaacttagaatgactttttccttttaaatttagttctatcattaatttatcattaaatttagttctatcatttggtactatcattaatgtattatatacactgatactttaaaacttgtgtggaaaaaactaacttataattttgtatcacacaccctggatatgtgttctgtttctaagcgacatttgtgagagattattgtaaaatgagagcgagcaaataaaacttaatttaatctttgcagatacatacttatgggaaatttgaacaaatgagtgaaactctgtttttagtaggctgtgataaacat

SEQ ID NO: 7140 - DNA, 1033 bp, Homo sapiens
ggagcatgactgtgataaaaggccagctgtgaaacctgtaggagaaatgatgacccagatagtgctgagcagccggctggcagcgttcttggggtccctgtggggatgcagagtggtacaactgcagatggggaagcagcatcattattaacctgtgtttatatgacattcagaaaaatatatgatggcctttctttctcttttcctttaatattagtgttctagaacagatcagacattttgtaatgatgcctgaaataaacactaaccacctcgacaagcaacaggttcaactcctggcagagatgtgtatccttattgatgaaaatgacaataaaattggagctgagaccaagaagaattgtcacctgaacgagaacattgagaaaggtgctgctttgaaacagtctttcttgtaaagcgatttgtgtaggcatttccgatttgctgagaagagcactctgttcaaggaagtgcagtcttcagtaataccgtattttctcgttggttccagttcgttaaatagtgtggtcattagcatctgctttgctgtcttcctgttacagcgatttctcttcacttcatgcctgttactcggcttcttcagagttattctggattcatagaagagggactagccctgacatacagcagcagcctagcctctaatatttctagagagtggagagaggcgggcaccatgcagggaagcatgtgccttcaccactttccgagaactgaatgtccttgatagggaacttgactgccggaaaggggccaccagcatcaccatttccttcactcgacggccaacttccttgcccagtgcagagctcttcctcaccatagccatgcagagactatgcatgtggataaaccatgggaaaaagcaaaagcagcagcaagttactaatgttattctgaactgcagggagagaatttggcaaataactggtacttaaggctaaaataattgttatttcttttgctttcaggattattgcatcgagcttttagtgtcttcttattcaac

SEQ ID NO: 7141 - DNA, 1068 bp, Homo sapiens
ataaactctgttacttcttatatatttcaagtgagttctggatttttctcttttctcttggaaacttgattttcagaaacctgtgcccagcagctctggtggagatgcccacgttccccatggctcccaggtcattaggaagctggtcatggtaagaaccacagcccatccgggttgccagcgggtgggtgcttccctgcatggctgtgtctgccactgatgttcgaatgttcctccgtccgcctgtctgtggggctggcgtgtccctagagttgcgagttcagtgcatcctttgtcactgccaccctgagccttttctctctcagacagtactgagtgaaggccctggtgggggtgtgtcctcctgtgccgaggagggccctggtatggggtgcgtcttccctgtgcccaggaagagggctactgctctgggtggtctcctcccgggcaactcacccttctttgaacgtagctcccgagctgagtcgatgccagtggagcggtctgacagatcctttccgcgactcagcctggtgctgatgctgtttggtttggttccttgtggagtagagtgatttaacacattcctatgatataatatgatatgaaatataaatatgtaactgtgatataaacggcgtagaatgaaatgtttttaattgaacagtatacgttaaggcatcacgtcaagattggaggacttcatgtcagttttacagtgagaaattgtgtggagtgacggaactgcagtgccttgctctcgcgccccagcacctggctgcagagtgtcacggagatgggacccctgagatggctccagtcccagtgccgtgggcagtgcgtgggagcacagccgcctctgacccctgagtgggtccagtcccagtgccgtgggcggtgcatggcagcacagccgcctctgaccataccgtgtccctcaggaacccaccttcaagccctggcagatgaagactcacttcctgatgcccttcccggtgaattacgtgggtgaatgcatccgaactgtcccctacacggacccagatcatgccaggtaggagggtgtag

SEQ ID NO: 7142 - DNA, 1077 bp, Homo sapiens
tgaattcttttgatgcttgcgcgtttgttttctcagatttttaggcagttgtgcttggttgcctgttctttgctttgtactcattactatggtagaacttttaaaaagggttcccgtggtgggagagactgttgtctgctgtgaagggaaactctccagtaggttccattgttttagacatgagatatgatttaataatttgacctgcagtttctctcagctgttgtaagttattttccatgaactttctggtgtcttctagttatctcacctgtttgtagtattttatatgggagcattttgtgcatgtgtagttttttaattgttgaaacaaggaaaggacatgaaatcacctaatgttcatttttatattaacgtcaacatgtattttgttctaataacttacgaagtattgaatgggaaatgtagttctagccttttagagcttaatagtagaatgaacgctagacaaaaaatagaattctatattatcttcaattagactaaaatccaagatctgtagtacttgaaagtgcaaacctttttacaactaagatgtaatgaaaatgtttagtattgatatgtttaagacttaatgaccataataataataacagtagaataacagcatatatgaattctgtgcttactacataggcaggtatggtggtaagcattttataaggcttgtgtacttgcatcagcaaaacaactcttgaggtgcgttctattattactatttttaaagtgggaaagtggaaccacaggaccaagaacacaccagcagaagcttgttgagtgttaggatatagtaagatcttgttttcacttggcttttgttgttgctgtgattgctgcagaataaccagcataagctgactttatcgatgaggccagatgacaagtatcacgagaagcaggcacaggtggaagccacgaagctcaagcagaaggtcgaggctctgtcccccggagacaggcagcagatctacgagaaaggtcagaggcttccttccgagctggcgagtccctaacctgcactcgggcctagtggacttgttagtgagttagtagttg

SEQ ID NO: 7143 - DNA, 1031 bp, Homo sapiens
attgtgccattgcactccagcctggggggacggggcgagactccatctcaaaaaaaaaaaccccccaccaaaaccaagtgtggtggtgtagtcctggtagtcccggctactgaggaggctgaggctggaggattgcttgaggctgcagtgagctgtgacggtgccactgcactccagcagatgcctgaagccaggaatagcaccatgccctgtgaatgaacgttgaatttataaattaggcacagcgagaggttaacaacaataactaataataaaatagaacaattataacaatatactgtaataagttacatgaattttggtctctcgaagtaccgtgatatttttggaccttggttgagtaagggtgactgaaaccgaaaggcgagaccttgggtaaggggcactcctgtgctgtgtttcagtgaaacagacagcacttgatctcacatcttttaaactaaaacagactaattatattcccttaaaattttaggttcttcacgtacggtaattttccattagaacagcatctgaaacaaattcacgaggaagcactgagcaaattccagaaaattgaaccaagcaccgtggtgccagctcagacaccctgggacaagcctgtgagtgccccaccgtgtttgtgtccttcctggtaaatatgttgacatgaggacttggactgggtattgatgatgggatttcagatgctgtcatgtttggtacagagtatgggagagcttttcaagctgaaagaatggtaatttgtttgaaaggaaagttaacttagtggaaagcctgtttcgctccatttcgtgtatccagataacctagagtagttgacaaccgtcagacactgtgcctactcacaacgtcacgtcattttacagagggaattccagataacatgtggcccggattcatttgctacagatccctctaaacaaacaaccatcagcgttagcttcctcttaccggagtaagtatatgctgtcaaagctcatacaagacaaaaacatgaggaaaatgtt

SEQ ID NO: 7144 - DNA, 1050 bp, Homo sapiens
agacgctacagagatttgcaaaaaaggcaacacagcaccactctaatcagttttttactttgttatgagaagtatttttcaaaaatatttatatcaacatgtaatgatggcttaccttaatgaataagtattttttaaatgtctcagctttaatttagaatatagaaaaattatataaacacacacaggcacctacacaggcaaaaacgcccacataatcaaaagctgtttgggtcctcattaaaacgcatttatgcctagtgttccattattggcaccctaagcttgtgggagttatttatgtcctacagctcaaggtcatcgccaaggtctgattttttacaaaaaaattgcaacctcaggcataaatgggttaatttttcagagtgtaaaggattcttgagaccattttggattaagagctgctgtcctgggcccatgtcttcatgtccctttgtgacttggacaacctgtctgtcctggtgtccctgaggctcatgggtggcctgctctctgattcccgtagctcctctcggctggtgaactatttcttaccttttcattctcaatttggtggtcttttcttccaaggagtcttcttgaactcaagttggggtgacagcttctccccacttccctcacggctggtgggcagaccgactgatccatcccgatttacagccctcagctatgcgtttgttgcaccacacatcaaaaaatccattgttcttctcaatccttgggtcctgtgcgtgggtgatgaatgattgaataccgtgttaaacaatgcctgcgtgggtgttttttttttttttttaaaccattagaacagctttatttgcaaagtattacaggtgtatgcaccagaatgtgatcaattggctatattgtaagtaatgtaacgtgtgtattattttacatgtatacttatgatttatttattttacgtttcaagacagacaatgagaggatattctcccagcaccttcagaacagacttcttcctgaccacacgtactcagtggtctccgggggtgacccactgtgcat

SEQ ID NO: 7145 - DNA, 1052 bp, Homo sapiens
tcccaggctggtttgatccccctcctcagcctctcgcattgcggggttacaggtgtgagccatctcattcaggtgagaataattattagaaataggttgggcgcggtggctcacacctgtaatcccagcatgttgggaggccaaggcgggcagaccacttgaggtcaggagttcaagaccagcctggccgacatggtgaaactgtctctactaaaaatacaaaaattagctgggcgtagtagtgagcacttgtagtcccagccactcaggaggctgagacagaattgcttgaacccgggaggtggaggttgcagtgagtcgagattgcaccgctgcactccagcctgggcaacagagtgagatctgtctcaaaaaagaaaattagtgtccctgtgaccaagttgaagattcccctaactgctcgtaactctctccctccctcttagattatcacggtcataacatacagaaatgtccttgctttttttttttttaatattttaccatttttatgcgttctgacaatgtcttgttacctatttgaataatacctgtttaggataatactgtatcatgtgtatcttttgtttcacgttatgtgacccatatctttgttacatgccactgtaggcccttatattggtaaggtttttttttttttttttttttttttttttttttttttaattgaacgattagtccgcactttatccattctctgtcgatacacctccgggtgagttgagtttgggactgtcagggttcgtgctgacatttttgtctgtgagtgctggggccgcagtgtaaggtgtggacgatagagaccaagaggtgaatggatttccaatcttcagcatttttttcttttttttccgacagtcttgctctgtcacccaggctggagtgcagtggcgtgatctcggcccactgcagcctccacttcccgggttcaagcgattctcctgcctcagcctcccaagtatctgggactacaggcacctgccaccacatcaggctaatttttggccaggctggtctcgaactcctgacct

SEQ ID NO: 7146 - DNA, 1028 bp, Homo sapiens
caacactttaggcaacttgactgtcagtgttaaaatggaaaacaggaaaatggaaaaatctgaccaattctgccaccttgagactttcatatagaccttgcacaacaattgtatagatcacacaccggctgtatttaatatgtaacattttcacacatattaaagatacagaagtattaaaaaacccccaatgttaatgtatttgcttaaaaggcacaagtttcacatatctgtctagctatctgttggtaatacagaaagtatactacttttttaaaaaagtgggcagaattcttgtgtatgtatatttgtgtgtacagtatgtgtatgtgtgtatatatatatattatatatatagataatatataaatattttttttaaggagaaactagaatgtttagctagaaaattccacagcctgtgaagaaatatttcaaaatggccataaaggaggtaaaaatgaaaaccataacctaacttttatagaggctttatctttaatttaacgatgtgcggaggactttcttgcttgaatctgttccgggctgtctgctctgtccatcaaatgggcaggtctggaatggggcaccttcggccgttcagaagtggcctgaacagaatgctggaacccaggctggactcggacacactaaggttttgattttgaatttcagccttattagaagatctaacctaagagtaagctaaccacagggattcttttgtagaacactttttatgcagatgaagctattttttccagcaagtagattcttccagtttttccaaggagtaatttccccgaattggcataccacggcgtggacagctgatatttcacccagctgctggcttgtgggtgtggctctttgctttatatatatatacacacatgtgagtctggctgggctggtattttgtttgatcttcctggaaatgagcagtgactaacgctcacataactggttttttttttatctgggctgatgaatacatttacctaagaaactcatttcgttttacttaa

SEQ ID NO: 7147 - DNA, 1045 bp, Homo sapiens
ttttttaaaattgttgtttaatttttaaaaaattttttaattataattttttaaatttaattttttttttcaatttctcttgtggtaacaagcacctattgagctatttgtgtttatgttccaggattgtgccagtcttggcgtgctaaggtcttaggcggtcccgtcacgtcactggccacgggttctctgaatccactttaatcctattttgtgttgaaagcaggattttggtaatgagcctgtgttgaccccttttctctgaagcacgaagttcagagcttttaattccctgcttgtttcctggctccctgtctttgtctctctctgtctctgtgtctctgtctctgcctcagtctttctcttgcctctcagttcaaggtatgttaccatccttgcttcacacaaagttactttctttccctctcctaccctctttctctcttccttctttcctctgtatctgttcccttctttctttcttttttttctgagatggagtctcgttctgtcacccaggctggagtgcagtggtgtgatctctgctcactgcagcctccatctccctggttcaagcgattctcatgcctgagcctcctgagtagctgggattatagatgtgcaccaccacgcccaggtaatttttggatttttagtagagacgaggtttcaccatattggctaggctggtcttgaactcctgacctcaggtgatctgcccgcctcaggctctcaaagtgctgggattacaggcatgagccaccgtgtctggccctgttttcctctaacgagtacctgtttatgttctctttctcactatgggcctcactctgtcatccaggctggagtgcagtggtacgatcgtggcttgctgcagcctcaacctcccgggctcaagtgatcctcctacctcagcctccagagtaggtgggaccacagatgtgtgccatcacgccccccgggtaatttttaaatttttgtagagctagggtctcactatgttgcgcaggctggtctcgatttcctgggcccaagagatccgctc

SEQ ID NO: 7148 - DNA, 1030 bp, Homo sapiens
gatgaagtccagtatatcaaagaaaaaatttttttaatgtttatagctttttgggtcctattttagaagtcttttttttttttttttttggagacagagtctgggtgttttgcccaggccggattgcagtggcactgtctcggctcactgcaagctctgcctcctgggttcacgccattctcctgcctcagcctcctgagtagctgggactacaggcgcctgccaccgcgcccggctaattttttgtatttttagtagagacggggtttcactgttagccgggatggtgtcgatctgctgacttcatgatccgcctgccttggcctcccaaagtgctgggattacaagcgtgagccactgcgcctggccctattttagaagtcttttacttgcccccaagggcacagaaatactctcctattgtctttttttttttttttttagaagttttataattttatctgtgcatttaaatctgattcatcttgagacagtgttggtgtgtgggatgaggtaagacttgaggttcttttttttttttacatacgaatatttagttgttttagctgcatttgttggaaagacttccttttctaggtagtcgtggtgcctttgtgggagatcagttggctacatatgagtttgttttgggactcagttttgtttcagtgatttgtatttcctatgccagtactacactgtctggataattatagttttatattaagtcttgaagtaggtgataacactttcgccaactttttcttcagaatttgttttgggtgttcgcatttccatatacgtttttaaaatcaggttgtcaatttctagaaaacatgcttgttgggattttgatattgagttaaatttgtagatgagtttggagaaaatgatcatcttaattatgctgagtctgccagtccataaatatgattgttctccatgtggttttcttctcagcagtgttttacagctttcactgtagagatctatcacatttttgttcaatctctttgtactgatgccgctg

SEQ ID NO: 7149 - DNA, 1160 bp, Homo sapiens
tacttgtaattgtatggtagaattgaagactttataagtaacctgttataatcgtgtcagtttaaggtgttgtgaaactggaagccatgctgtccaaactcccatatcttaaattgcatcctgcattttaggcgcggtggctcatgcctgtaatctcagcactttgggaggccgtggtgggcggatcacctgaggtcaggagtttgagaccagcctaacatggtgaaaccttgtttctaccaaaagtacaaaaattagctgggcgtaatggcggttgcctataatcccagctactcgggaggctgagacaggagaatcgcttgaacacgggaggcagaggttgcagtgagctgagattgcgtcattgcactccagtctaggcgacagagcaagactctgtctcaaaaaaaaaaaaaaaaaaaaaaattgcatcctgcattccgcagttgataacaaggcatgtttaaactttgctctcatacttcgttctcctcaatgtctgattgtgagtgtgctttttgaaaaattcttttttatttaggcctaatgggattgtttgaaaaacgtcgcttcaggaaattcctagtgtatgttgccaacttcgatgaaaaagatccaagaacttttgaaggcattgatcctaagaagaccacaatgcgagatgtgtataagaaatttgatttgggtcaagacgttatagattttactggtcatgctcttgcactttacagaactgatgagtaagtattttggtttttagatttgtatttttcttgaaattctcactaaatttcccaagtcttccaagtggaaattctaacaaaacaaatacttagccatattgcactatgaatgaagaggttctagttgaaattagtgttgggaccttttaagtgatttaaatataaaggtagtgggccaggtgtggtggctcacgcctgtgatcccagcactttgggaggccaagttgggtggatcatttgaggtcaggagttcaagaccagcctggccaacatggtgaaaccccctctctactaaaaatgcaaaaattagttgggcggtagtggtgcgtccctgtaattccagccacttgggaggctgaggcagaagaatcacttgagcctgggaggtggaagttgtggggagccgagattgcacca

SEQ ID NO: 7150 - DNA, 1051 bp, Homo sapiens
tggtataattttctctttattctcttatttatttttctggagacagaatcttgctctgccgcccaggctggagtgcagtggcacagtctcgcctccctatggcttccaccttctgggttcaggtgattcttctgcctcagcctcccaagtagctgggattaaaggcgtgcaccaccatgcctggctaatttttgtatttttagtagagacggggttccaccatgatggccaggctggtctggaacccctgacctcatgtgatctgtctgccttggcctcccaaactgctgggattacaggcatgagccaccacgcccgagcgctttattctttgttgttgttgtttgtttttaagagacagggccttgccctgttgcccaggctgaagtgcagcagtgcgatcgtagcttgctgtagccttgaactcctgggctcaaacgatcctcctgtatcagcctcctaagtagcggggctaaagatgcataccacctgcctggcttattttattttttgtagagatggggtctctctgtgttgcccaggctggtctcaaactcctggcctcaagtgatcctcctaccttggtttcccaaagtgttgggattataggtgagagccaccatgcctgggcacctctttattttcttaatctacaaatctcctcacaatttttttcttttcttaattttgttttattttatttttatttttatttttttgagacagtcttgctctgttgtccaagctgatgtgtagtggtgcagtctcggctcactgcaacctccatctcttgggttcaagtgattttcatgctcagccttctgagtagctgggattacaggtgtggaccaccatgcctggctaattttttgtatttttagtagagatggggatttcttcttgttggccatgctggtctcgaactcctcaaatgatctgcctgccttggccttccaaagtgctgcggttacaggtgtgagcctctgtgcctggcctagtatatttcttagctgatcttcaatacaatgagtaagatttcttttcttttttt

SEQ ID NO: 7151 - DNA, 1063 bp, Homo sapiens
taaattgttttagtcagtattagggttgatttttgtagttgttaaaataccttcatttccttttatgaagacataatgaagaaagtgaaaaggcaggccacagaatggaagaagataattgcagtacatgtaactaataaaggatttatatatagtatataaagtacttttataaagcagcgagaaaaagcccatttaaaaaatggggaaaaattttgaataggcacttatcataagtgccttatcacttagcttgatcatcagtaaacgtttttttgtttttttttttttaaattttcttttgtagagatgggggtctcactgtgttacctgggcttaagcgattctcccaccttggcctcccaaagggctgagattataggcatgagccaccatgcccggtccctaatcattaatcaactatttaaaaagtgttcaaccttatttgtcctcaggaaatgcaaattaaatcacttcttaactagaatggctaaaattaaaaaggcaacagtgtaagtggtcaaggatttgaaacagtggggactcactgcggacaaaagtgtaaattggtacaaccgtttttggaaagctgtttggtaatatctgttgaagttgaatgtatttatactcttcttgatatataacagaaatgcacacttagaagacacatgcgagaatgttgatagagcattatttgtaatagtgaaaaactggaaactatccaaatatccaccaggagtaaaatggagaagtaaattgtggtatagtcattcagtggaatcgtctacagctgtgttacccaaagtgtgctgcatagatcagctgcatctgcaacacctgagaatttaccagaaatgcggaagtttaggccccaactcggatattacacagaatcagaatctacagtttaacaggatctccaggttattcttatatataataaaatttgcaaacacagctttagtaattcttgaaattggtcctggaccagcatcatcagtatcacctcatcagcatcagtggtggctgacacctgtaatcccagcactttgggaggacaagg

SEQ ID NO: 7152 - DNA, 1065 bp, Homo sapiens
tcactatggacttggaaataaattcacgagtcttgttagacatagtagattaaaacaataagagtaactagttccacagctgtttgtgcttcccagaggtttttttcttcccattttttgttctacacagtaagaatttatgaatagaaatatatactttagtgatgtataccagatgattctcagcatcatatgtttaaaaacttgctttacatcccagatacttttcctcatttctctttatcagaattttgtgatttcagattcagagaaggttttatacttgattttaaaattctgaactaaaattcagattgcctcttggatttgcttaatctttgatttgctctttgagagttcttgcttatagctgtgttagagttctgtagacaaaggactttctattcactacagtagtgagcataggatcaatatttgcaaatgctgttacacttgggagctgtgttgtaggcagtttaaaccagcgttaagcatcctggccaaaagaaaatataagtgaaattagacatattttagcatgtagagatgacaatagtgtgacattggtttttaaagaccactggtagatgttcacatgcgtgatacactgcaattacctctgtcttccctcccatggtacctgattggagactcttactggagtaatagtttcagtttcagttatttaaacccagtgactattgtgatcagttatgggcagtaaaaaggtaaacacagaacctgtctataagtagcttgttctcgtgttggagagtaactaataagaattagtatgagaaagcattaagtcccctaagaggtgcacttatatgagttcagtcagggaatcaggaaaaccttcgtaaagaaggagatatttagctggctttaaaaaaatattggcaaggtttgaatggaggaatgattttttaggcagagagcagtcagtgtaagtcaatgctaagtcaaggatgtatgtagggaatggggagtggtttgttttgcttgaaacagaagctttggagagagattctaggctaagaaatgtgaaaattatcttcaagg

SEQ ID NO: 7153 - DNA, 1031 bp, Homo sapiens
ctgatgtaaatcttgtgtatcctatgtactctgacttcaaattcctgagtcatttaatgtagacttccacttcaaattttttgaaatttattataatctctcagggtcaaaccaatttttttttttttttttacaggtaacatcccaaaataacacttttagatgtctctaggcaagagaaaaccttcgaacttttatttggctaattttttaggaaaggtttgtgaagaattagaatcgtgtttttctggtctgtcatttttctgtttatagttatatgcaattattagagaatattcattctgaatacttcgttatgtttgaccaatccaggaataatcctgtgtctgtctttgaaaagctggaagactgttggatgcctaaatgaataggccctacccactgcaggttttgtgcttttttttttttttttttaagtgcctaattgggattccaagctgagcttagtagtttgtggtggattttgcctgttggaatgggtagtgttgctgccagcgtgttttaagagccggttagttccaccgtttttctatggttgttgctggtctttcagatttgctcacaattgaggtcagttaagcatgcacgagtgagtgcaaatccaccatcatgcaggcttccacaagcctcgttcacatcactttgtatcaaagatggtgaaagtgtttttatataacaagttaagataatgagctttgtttaaattttcattcggattgtgaactctttgatgaatggtagatgcatacttaactagaaatcagacctgtttctgctgtcattttgtagctgtgataactttaatctctgtgagccttcctaagttttctgagatgttctttgataattatatcaattcaggacaatcacattattaccatcattgataggagtagtgatgacaggatgattttgataatgagaaatcatatatccttatttttagtgttaccaggaattagatgattaaaaattagaagaagagaaaaccaaagttagcactcagaatt

SEQ ID NO: 7154 - DNA, 1080 bp, Homo sapiens
gaggaaccatctatggtcctgtcctgaaggagttcctcctaggtctggttggacctttgtatggtaattagttaagagttagatcccctgttaggaaacctgctgggttaaggatttttgataggaaggctatgggttgtcagtggcctcagtactttcaggctacgcccttgcttacactgataacaaggtggtattggagtgttatagggtaacagagaagaccttcaattatcaattataggttttaaatttaccctggcttttaaaggaatagggtacactgttttttctttactatttccatctctctttctttctctttgacttcttctttgtctttctctctccttctgactccctctttgtctctccctctctttctttgactttctgtttctctctctctgactcttctttgtctgtctcttcctctctctccttctctctttgactttcagcctctctgtctcttcctctctctgtctccctctttgactcctttgtctctgtctcttcctctctttctctctgtctgtctctttctctccttcctttctgctggtctttccctgcctctgccagccacttacgctgctgttctcccctctccttcccctttttgatggcttcggcggtgtaagactgccacctccttgggtttttgcactgcgtgcaataactccatgatttccttgtgatatttaatgtggttccccagaggttaggaaccccctttctttccatattgcagcatgggcatgtaggattagataagcatacttgctatctgtatacacatttattctcctttcctttcccagttctaaggctcgggtaagtgccactagttctgctaactgggcactggtccctggggaagagacttactttcaagtactgttacatcactaacaatggcataacctgcccttcgtatccaattctccaccacaaatgaactttcatcagtatatagattaaggtcaggattaactaaggggacttctaagaattcatctcgggcagcataagtctggactataacttgttggcagtcatgctcgatcggttccccat

SEQ ID NO: 7155 - DNA, 1038 bp, Homo sapiens
gtggctgggcagccccagagagctgggcctgtaggtccagggtggactctaggaatttgcatttcctttgttcttttcctttttgtaatggttttactgaggtataattggtacacaaagctgcacatccttgatatatacagtttgattaattcagacatatttgtgctcccaggaaactatcaccacggccaaggcaataaacacatccctcgcctccaaaagcagggtatctaatcttttgtctcccttgggccacattggaagaagaatgattgtcttgggccacacataaactacactatcactaaagatagctgatgagctttaaaaaaaaaaatcgcaaaacatctcaatgttttaagaaaatttacaaatttgtgttgggccacattcaaagccacctgggccacaggttggacaaacttgtccaaaagtttcttcccgcacctttgctttctttgtctttttgtggtattgtgtccagaatttattccttctggtgggttcttggtcttgctgacttcaagaatgaagccacagaccttgcggtgagtgttatgatcttaaagatggtacattcagagttgtttgttcctcctggtgggttcgtggtcttgctgacttaaggaatgaagccgcagaccctcgcagtgaatgttacagctcttaagggtggcgtgggcccaaagagtgagtagcagcaagatttgttatgaagagcaaaagaacaaagcttccacagcgtggaaggggacccgagtgggttgccgctgctggctgggggtggccagcttttattcccttacttgtccccacccacatcctgctgattggtccattttacagagtgctgattggtgtgtttacaatcctttagctagacacagagcgctgattggtgcatttttatagagtgctgattggtgcatttacagtcctttagctagacagaaaagttctccaagtccccacttgatccaggaaatccagctggcttcacctctcaacccaccctctaaacggaacaccccaact

SEQ ID NO: 7156 - DNA, 1040 bp, Homo sapiens
ggctcggtttggcacagagcaagaatttcccgttcgtcttaattattcccagatggcatcagcggattcctgtttctaaccaccaaatcagtgttctggtagaaacactcctgtcttgtgacctctaaattacacactctccatctgcactgatttgagatgtagttaccacttttctgttcctccagagatgcctgcgtcaatgccctctaggtctgaagatggtcctgttgtgcggctatttcacgtgtacaggtgggactgaaagatcagtctgggactgccctctttcccctcagcacacacatgagcagctttgtgtttgcagcagctgcgtgcacgatcagcttccacttggctttgcttctgcccttacaaaccagctgatgatgatgacacagcatgttacactgttgtccccggttttcctagattccacgcacctttgtaatagaaaccgtggttactggatgccactgctgaaactactaaacacccagagatggcagtgattataagaacattaatcgtgggctgggcgcggtggctcatgcctgtaatcccaacactttgggaggctgaggtgggtggatcacctgaggtcaggagttcaagacctgcctggccaacatggtgaaacccagtttcttctaaaaatacaacaattagcccggcgtggtggcatgcgcctgtaatcccagctacttgggaggctgaggcaggagaatcgctttaactccggaggcggaggttgcagtgagccgagatcgtgccactgtactccagcctgggtgacagagcaagactccatctcaaaacaaaacaaaacaaaaaaattagcctggcatggtggcaggcgcctgtaatcccagttacttgagaggctaaggcaggagaatcgcttgaatctgggaggcagaggttgcagtgagccgagattgcactactgcactccagcctgggtgacagaatgagactctgtctcaaaaaaaaaaaaaaaaagaacattaattgcagcaaagagagtagcaataatagaa

SEQ ID NO: 7157 - DNA, 1049 bp, Homo sapiens
atttcattactttcctttcatttgctcttcaacctgtagccctcaactcttgcaagactccaataatcattatttaaggattcgagttatggagaaattcacctggcacacaagaggtgggtcaggaagctcagttaatgagtctgagagagaaagaaaagaattgccaagtttcaggcagtgagctggagacagtctgtactttttgggaactccaaaaggaagtgtgttgacttggctgacatttcagcggggaaaataaggaaggaaggtgatgggtgactgtgaggccagaggcctttgccttttccgtacaccagctccacagtgagcatcctgagggcaggaaccatatctgacacatctctgaatcctaccacccttagctcgtgcaggcatttgaaaggtgctgtaagcgaggggaatgttggagtccattctgactctgctcacaggattgggagccacgctaacccgacaacctctgaactctggatatggaaccaggccgaggctgccagctcttattagactctgtaaaccaacctgatagataaggaagtgtgattcacaggttctgggaaacagaaagaggtgtggcctcatacactattttggtgacttcatttaaatgatcgttaggacttgttgtatatgttttttggctacttcagagttttgaaagtcctagagccataagtttactccaatttccattacttcataattccattatatgtattcagaaaatatctatcgtataccagccgtaggaaagtgagagtaccacagaactgtgaaatatacataccatctgcaaggagcttataatattgtaaacaaggtgagacttgtttacattgaataactagggaacaatgttatgagagaatatatagaaagtataattcaagtatctaaagatgtgattaaggcatgtggaaatgaagttattgcttcaattaaatgtattatctctggaggacggcttgagttcaggagtttgagaccaggctgggcaacatggtgagaccccatctctaggaaaa

SEQ ID NO: 7158 - DNA, 1041 bp, Homo sapiens
cgactgtttctgaatttcccaagtgagtatcttgcccagacttcttgctttagtccagtctttgatgttggctcatatgaagcattctgcccttccagaatatcccgtacttcctccctatctacataaattctacccaagggaactctaatgaatcccattgcagcatgcccaactccatactgctttctccatgatacagtcagaagccaacccagggcacttggattcctcttgccttaaggacccaggacacttattttgtgtacaactagatgttcattacttatatggccccatgtactgcttcttaagttttcagagctgttccatcgctcccattagaatgtaagcccttggaaaacagaggtcctaataacacaacatggcttatacgtgcctgcctcagagctttggcatatggctgtcacacaataagactggtgaatgaatggataaatggatcatggatggatcaatgtggtctttcactgtagctgagctggatgcattaagaattaagtataacatcttctttttttattttattattattatactttaagttttagggtacatgtgcaccatgtgcagtttgttacatatgtatacgtgtgccatgttggtgtgctgcacccattaactggtcatttagcattagttatatctcctaaagctatccctcccccctccccccaccccacaacagtccccagagtgtgatgttccccttcctatgtccatgtgttctcattgttcaattcccacctatgagtgagaacatgcagtgtttggttttttgttcttgccatagtttactgagaatgatgatttccaatttcatccatgtccctacaaaggacatgaactcatcattttttatggctgcatagtattccatggtgtatatgtgccacattttcttaatccagtctatcattgttggacatttgggttggttccaagtctttgctattgtgaatagtgccacaataaacatatgtgtgcatgtgtctttatagcagcatgatttatagtcct

SEQ ID NO: 7159 - DNA, 1073 bp, Homo sapiens
gaagcacacctgttacacttcagggccacgatgtggggaaacctgtttaaaatacctccaacagcagcagctgctctagctagttcccaagtcaggaacaaaggctggcacttcacctctgggtggaggggcctttcggcatcagaatggagtgcccagggtggagacagcgcctctttcctggacggctttagtgccacctgggttcttgtcaggaggagggcacagtcctcagtttcctttgaagtctgggtttccagaaattccttccccgcatctcccctgactgcgctgtgtcttgctcccacgtcccctctataggacacctctgtgatgttttaaaatatttaatcagtgtttcaggtctcccctagccccatgggtggtgtgagatcagcagaaagggccactggcaccaccattacagaaacactgggggacactgtctcgtgtctgcttggacgtgccccttgtatttctcctcttttctctaatcagagatgcttcgttcataagcaggcccaaggtttcctgaactagggatgcaagagcgactgtcactgtgcctgccttcttccatctgaaggcacatgagtcattgcagggggcatcatcactgagccaagaactttctcagggactgagagtgtgtgcagctttttcaggtgcccagtgagggagcaaagggaggcagtggcttccggccaggaacggccgaggcctggagagtgctggagaggacccagccagctgactgtgccgcagctgagctcctcctgccctttctctgcaggacacgaaacaggaggaggaggagagactggttctggagagcaacccgttggagtggacggtcaccgacgtggtgaggttcattaagctgacagactgtgcccccttggccaagatatttcaggagcaggtacggtggttgccgcgtgtcgattgtttgatgtgctgagactctgcatctgaaatgaacctcgtgtcctagccggcttcctcgtgacacctgcgagggggttcttcggcgctgctcggcaggtgtgcgagacccttctccctccaaggcc

SEQ ID NO: 7160 - DNA, 1681 bp, Homo sapiens
gaccagcctgggcaacatggtgaaaccccatctctacacaatatacaaaaattagtcgggcgtggtggcatgcgcatgttatcccagctacatgggaggctgaagcaggagaatcacttgaacccgggaggcggaggttgcagtgagctgagattgtgccactgcactccagtctgggagacagagcgagacttcatctcagagaaggaaggaagggagggaggaagagagggaggcaggggagggagggaaggagggagggagggaaggagggagggagggagatctcagcattaaaaaagaaatcaaaacataaaattaaaatctcagcattaaaaaaacaaaacaaaaacaaatcatgttccacgaaatcctgttgctcacaaacctgaaatgtcaaggtttgctgcttgttgaaagtgatcacggactaggcttaatgtctacacatgttttatgtaagtttttttttttttttttttcctcttttttaaaatgtccgtcttttcagattgtttgatccaggcactaacctgctactgtatactgttttctaactaaacaaatagagaataaagatataaggaacttgaggaataagcccaagagagcactgtggtctggggatacggttggcatccagggtttctgcttttttataggcagctaattcttttctgctgaattgatcgctgtttcatgtcatgcttctcaggagtgtatgtagctgacgggtgaggtgcggctgggcagtgactccctagtgcttcctgcttatttccgttttatttgaagccaaggaggagtttgtttttgatgtgagtcatatgcccaggacactaattccaatccattctcttatcacctccctgaccagttcctaatcagaatctgtacctcatggaggttacagggatccaaggtcatgataactgaggcttgtactgcatctggactcagaacagagcaaatgtgtgcctggtctaagtacttccgtaaaatacccagtgtcttggtgtccttctgcagcacagtctctgtcgtctttgacataagtatcgagattatacacacatcactgataagggataaaaggcaccctggaaatccgtaaataaaggactagcagtcacggcagtgcactgcattgagtctggtttggttgggtctgaaactgtacctgaaatggtttctttaagtatcttgctttctctatttctcgatgtttaataaaggaagggacacggacatgtagagaaggctaaaataagaaatgctgtgtgaggccatttttccccacacaaaccaagaaagaaataaagaccttccctgcatggacaccctctctactaagagtgttcatgctgctcatagcactgaagattccacatccagtgctttttttcagtgttttcttagctttcaatgatgtacctgtcagtgtgattatagatttaacccttaggagggaatctctcctacattttagcatcggagacctagattaaaggctgaggagagaagattaaatgtggccaagagagagaagcttttctttctcattccgtctggtacagccaaaggggtaaggaagacgcgggcttctcttacgatagattgtgaggctgcagtttctatggtgactggtttctttttcccttattcagcagctaaatgcagc

SEQ ID NO: 7161 - DNA, 1024 bp, Homo sapiens
atcactgttgatcatcactgtttctcagcaggcagacttttttctagtttctttcattacggtaaaaggaatatgtgtttgaattcagcagtgagtcatctgagatgcgtgttgttatggaaaattgccatagcgttcagctgttacgagacagaagtcaaagctaagcacatttaatggccggagatgagcggtatttccaagaagttctttttattatttttacactttagatgaaatgggtatttggatgggatgagtcccattatgctgcggttgctcacgttggggggatgtgttcacacgtctgtgtggttgtcggtgtctgtgcatgcaatgtgattgagctcctgggtaggtgttcctttctgtcttgaatacaaactggaacagtatgagaacaagctcatgattattatttctactgttatttatctttgatttaagagatcactgtgaatagctttggatgccatactttactgggaattctgacttaccttatttggcaaatacagatcatttccaaaatgtacattcagttgaaggataaatagttgatgaaataggtttaaaaaaactcaaaggacattaaaagcctcattttattgaaaaataaataatgactttttttttcttgaagacgaaccctgttatttagaggcctaaaagatttgccaaaactatccatatactatccatgtctataacaagtctgtagaggtgactgcactgtatatcaccgtggctctcagtggattttaatttagagcagatgtctctgcatcacacagctgggtgagtctcagcttttggaacacaaagaaatcttccttttaaaaatcaacttaagatatgtttagaaagtagataaaggccaggtgcggtggcttatgcctgtaatcgcagcactttgggaggccgaggtgggtgaatcacctgaggtcaggagtttgagaccagcctggccaacatggcgaaaccctttctctattaaaaatacaaaaattagctgggcgtggtg

SEQ ID NO: 7162 - DNA, 1077 bp, Homo sapiens
tgataagcagtgtcttcctgagtgcccccttctcactgtggacatcagaggccccattctttcagtctccacagaagtgtgtgttgaggcccattgagtgttcccaattacgttagctactactaagaagaatttagaaaggccaaactagaagaaaaaagttcagcagacaggaaacactagaaaggattatagacaatgcacacacgcagaggatgtgtggttgtgaattaccctttgtgtgtctttgtgtaagtaacaatgacttcgggcagtgcaccgatggcttggctagttctggcaggatctgatacttactgtaattatgactgaataaactgcggaaacaggggcttaaagctcaaggtgagttcaaaagctatgaggatcaaaatagatcgcttcatgctaaaaagcagacatgcaagaaattaaaaatacagtcccaaaggtttactgttgctttttaactgtgcttaatttcatattcatatcctaagcgtctgtctgaagtagcctgggttgatatattgaaggcataaacatatctacttccagtgagggcttctgcaaatcctattttgataaggtcttaaatctgttgagatcaggccataaaattctcctgcagtttcagcaataggtaaaaacagtgctcaacgtttttttttttccttttaattttgcattcagactgtgtaacctccatctgtaaatcttgccccccctcccactgcctggggaaaaatatgggcaacatgtggtgtgttaagcaacatttcaagtgtaaatattaaacttggtaaattttaatttaccttttaataattttctgacttacagggactatttttagcagatgagagcttagagatttagtgaaaatatgttgtcataactgcaaatgccagactagagtcgtttgtagtttagaaatgtatcagataataagttcctcatcagtgggcattgctttcctaggtgataggtggaattttggcccatggatgactgaaggtttttgctaatgtgattaataccattaaattacttacagaatgccaactaaatgcatac

SEQ ID NO: 7163 - DNA, 1097 bp, Homo sapiens
ctaataaagcatttgtgggatttgggtccatctttaaatgtcctcaagaagcatatgtgtgtgtaactcaaactcagaacttgagttctgaaacccaagttcatgattccttccttcactgtgatgtgggcacttctccaaagtgaggtattagtggaatggaacttggatttttaaaaggtgtagtggaatgcttatataatattataactaagtaaaaccttgaaaaaatgttcatgagaatgtggtagaagtttctttcttttttttttttttgtttcttatgactttctaggagtttgccttaatgagttgaaagcatgagcgatgattaccaagttgtgtgtaaaccttcctccacctgaaattgcagagtgtttttctccctgatcatttctttcctgtcgtagcgttcatctttgatgccgtagttgggcgcagggcaggttttgagtttcctgatgtttcatgtgtggattggtccttcaatttgaagaataagataatgatcatagacaaggatttggcttacagctgagagtgctgagttggagtcttggaagagagacgtgctgcagaataaagtttatagttttaaaatttctagttagaagtttaaatggtcacactgagcaatgccaattagcttccattgcagtgaattctaaggacttgcaaggcaacttttatttaccagaatttaactgaattaatcagtggttaaggtaactccatggtctaggaattgtaaattggttatacttagtttttattttatagcaatatttattgtaataggtttatggtacatttgaatattagagctttgagagctaaatgttaactgatatagtttttcttataaaattagcaagattcttgagaacgtttcttttctactttttaacctaaagtggtctgtatacgtttatggctttatagatacgtctaccatggagagcaattcatttaggtagtctgtggctcataaaagattgcttgagtcttgtgcagacacatataaaggaaagctataggacctctgggaacttgaggctcgcaagatgtaaatgtcagagccgtccctagagctccct

SEQ ID NO: 7164 - DNA, 1134 bp, Homo sapiens
gggaacctgaatgaatgtgggttcagtacctccagctgggctctgtcctagctcactgctccagaggactcctggggtccctttgggacgtacctcctattgtactatgagatgtggccatgtccagcgaggaagtgatgtctgtgatatacatcactgatacacatcagcgtaactgatgagatggaaattgttcatctttgcttacgttctttccctctttccatgggctgggatgtgctgaaccatctgtttccctgccctcacttagagcagagtgacaggattgaaagaccctgggttcctaacatatcttgggaagcagagctctgtgtcaccctatatcacctgccttggatgagagagagagagagggagagaaagagagagagagaaagagaaagagagaggaactttgactgtgcttgcacctctgtggctgtgtttttgggtctctttattatgcagtctagctgtgatgcagtatctcatagtcatcttaatgatcttaacgactatgagggccagtggagcttgcccttggtatttgcatcccttgaatctgcctcatctcagtaaagggcaactccattcttcaagtgcttgggccagaaagcctcagggacatttctgtgttctacttctcttgtagcccatcagcgaatcccattagctttaccttcacattaaaaaaaaatactttgaccaggcacagtggctcacacttgtaatcccagcactttgggaggccgaggcaggcagatcacctgaagtcaggagttcaagaccagcctggccaacatggtgaaacccggtgtcttctaaaaatacaaaaattagctggatgtggtagggcgtgcctgtagtcccagctactcgggaagctgaggctggagatggtggtgggtgcctgtaatcccagctgcttgggaggctgaggtaggagaatcgcttgaacccaggaggtggaggttgcagtgagtcgagatcgcgccactgcattccagacagagtgagactcctttcaccctaatgtcatcactgtgatagggctgtgtcatttgcttccaacaattcttagataatgtctttgttaaatcctattctttttttttgagacggagccttgctctg

SEQ ID NO: 7165 - DNA, 1063 bp, Homo sapiens
tgttctcaatcttcaactcccacttacgagtgagaacatgtgatgtttggttttctgtttctgtgttagttttctgaggatgatgacttccagcttcatccatgtccctgcaaaggatatgatcttattccttttcatggctgcatagtattcattcctttttatggctgcatggtgtatatgtgccacattttccttattgagtctaccattgatgggtatttgggttggctccatgtcttcgctatagtaaatactgctgcaataaacatatgtgtgcatgtgtctttaaagtagaatgatttatattccttagtagaatgatttatattcctttgggtatataaatcattctactataaagacacatgcacacatatgtttaatatataaataaatgggattgctgggtcaaatgatatttctggttctagatctttgaggaatcgccatactgtcttccacaatggttgaactaatttacactcccaccaacagcgtaaaagcgttcctgtttctccacagcctcgccagcatctattgtttcctgactttttaataatcaccattctgactggcatgagatggtatctcattatggttttgatttgcatttctctgatgatcagcgatgttgagcttttttaaatatctttgttggccacgtaaatgtctgcttttgagaagtgtctgttcatatcctttgccaactttttgatggggttgtttttttcttgtaaatatgtttacgttccttataaattctggatattagccctttgtcagacgggtagattgcaaaaattttctcccattttgtaggttgcctctttactcttatgatagtttattttgctgtgcagaagctctttagtttaattagaacctatttgtcaattttggctttcgttgcaattgcttttggcttttttgtcatgaagtccttgcccatacctgtgtcttgaatagtattgcctaggttttcttccggggtttttatggttttagaataagtgtcatgtggcactgagaagaatgtatattctgttgatttgggctaatt

SEQ ID NO: 7166 - DNA, 1026 bp, Homo sapiens
gccgatggctgagtgtgcagatacagcccaggccccttcaggcctgtgggcctccgtgcctggactttgttctagtccctcccgggtttcctccgctgtctcatgagttcgggctttcttcattcctcacttgatgattggaagagctgcttgacccatcagcgtttctgtggcatctctcctttcaaaacgatccctgtagagggactggcaactagtccatagtgtcttgctagttactagtgtctcacgctgatttgcacatgacataaagacgctaataactgcctcatgctgatttgcacatgacgttctttatgctgactattcccttccccgagactttcagtgaaggaacttctgttcgttgcaggcatggttctcaactgcctccatcgggaagcatcctggccctggtgccagggcttccacggtatctggggtttactccttccttcactgagttacctgcttacattcctgttttccatatgaaactccttgaacataaggactgtgtcttaatgatctttattttctctccaatatctggacttttgtacgacacaaaggaaaacagtcagcctgtgtgttttcagtagaagcaatttatcatctttctaactgtataatgctaaattccaaacagtctaagcagctctcttggagtttgcagctaatgacagaaatagtacagaaagtcatttaacctttaatccagtgctctaactcactaaatataaaacattcttaaaaatacatttgtgcatttgccaattgtttattagatttctgctcagtgccagagacgatgctgggcctggaggagaaagtttgaacaagagtaatgcttttccatcctcacagaatgcagtgggctgtcagaagcggtagggaacagctgggcagatactgtgatgtgtgacatacaccacatgggagggaaattcccgggctgggtgggcaggggttgaggaggatgttctaaagtatgtgtgaagggggcagtgtgaactgcaggcacac

SEQ ID NO: 7167 - DNA, 1044 bp, Homo sapiens
cctcttccacatggatagcaaaaatgtattctatattcttgttctccaacagctttgtagttttgcctttcccatgtaagtccttagttcaactggaattgattttcaggcagtgcatatagcagaagactaatttcttttttctccatacggataaaccagttgtcctagaactatttatcagagagtctgttctccccctactgatgtatggagccagttctaaccattaattggatttgtctatttgtttgacttctctatttcatttcactagtttgtctagtctctttatctatactgtatctttaaagttgtttatgtatgactgcttttgtcatctgtatggcagggtccctagtttgttggtgttcttgaagagtgttttggctctccttgggacactttacttccatataatttttagaattgggttatctagttctacaaaagaaatctgttgggatttggattggaatagggtcgactaaatcgttttaaggaaaatgtacatctttataatactgagttctctaatccatgaacatggtatgtatttcctttgtttacatcttcttttatgtatttttataaaacattgtagttttctgtgtaatagttttctaccttttagaagatttattcttatatattctatgtgttttgaagcttatgtaaatggtatcttttaaaatttatatttttctaagtgctgtttgcatgaatatttttgtatcaatagtgagacttaaaggacattttgccctaaggtatgccatattttctaccccatggttatcagggatgctttggcatgaggatggtggcttggtaattttagctgtttcctctctccccatatgcaatgtaaatgacatgcatttttaacttcagccagtatagtaacacacttattgataatctagaagttgctagcattgcacagagcatcctggagtagggacaatgttttctcttttcctctttgtcatttgtcatatcattttctctttccttcctcttttttttccccccttttcttgg

SEQ ID NO: 7168 - DNA, 1024 bp, Homo sapiens
ttttacattaagacttctagcaagcctgtgaggtggggactgttcttgtccctgtggaaaccgaggatcagagaggaaaagtaacttgctgaaggtcatacagctcttaactggtgtatctgggacttgaataatctgggttagtagcagattgaaattatttggcatatggactagtcagggttctccaggaacacaaaacctgtaggatggtgatattgagagatttgttccaaggagttggctcctgtgatgatggaggctgacaagtccctagatctgcagttggcaggctggagatccaggagagctgatggtggaagatggtgtaatttccagtcctagcctgaggcctgagaactggaactggtggaatagttcttgtctgaaggcctccaagctcgagacccaggaagagccaatatttcagatagagttggaaggtgggaaaaagccatcatcccccaaaggcagtgaggcaggagggattctccctcacttgggggtggatcagactcttgttctatacaggcctgcgatggatgggatgtggcccacccatagcatctgctctactcaatctgctgattcaaatgctaatgtcagccagaaacaccccaagaaacacccagaataatgtttgaccaaatatctgagcatcatggccaggcacattgacacacacaatggaccctcacaggggatcgtgacgttttactcttgtgctgccggattggctggcttgcttgcttgctttttctttctttctttctttctttctttctttctttctttctttctttctttctttctttctttctttctttctctttctttctttctctctcttttctttctttctttcttttctttctttctttctctttctccctctctctctctctcttttctttctctctttctctttctctctctctctctttctgtttctctttctctttctctctttctcactctgttgcccaggctgaagtgcagtgacacgatctcggctcactgcaac

SEQ ID NO: 7169 - DNA, 1034 bp, Homo sapiens
gataagctcattttttccaatcctagagaatcagcatctctgccctggttctcttgtctgaattggagaacaagtggctgtaaccctctgaccctccggcttgtttcatttataccgcggggcaagatggtagagaacacttaccacatgattggaagtactttgaggaagaactagataaaagtgagtcattaattaattgttaagagtcagcagctgcacactcaggcgtctcgtttgatgggaaagggaagcaacttgagtgaatttaaatcacttcgcatgtatgacagtgtattaaagtaatgagccatgcatctggccaagttggcgttgtcaagctttgactttctctgtctgtctctctctctctgtctctgtctctctctgtctctatgtctctctctctgtctctgtctgtctttgtctctctctttctctttctgtctctctccttctctgtctccctctctgtctctctctctgtgtctctctgtcttcatctctctctgtctctctcagtctctgtgtctctctcagtctctctgtctctctctcttagtctctctctgtctctctgtctctctccctctctgtctccctctgtgtctctctctgtctctctgtcttcctctctgtctctctctgtctctctctcagtctctgtctgtctgtctctccctctctctctctctgtgtctctctctgtctctctctctctgtctctctatcttcctctctctctgtctctttcagtctatctctgtctctcagtctctcagtctttgtctctctctgtctctctctctctctctgtctctctctttggtagcacctagtttaattcctgtagcttacatgctacaaaaagattttacaaaatccagcaataaacaaaatgaaacttcctgatataccataactgatacctgtgactctgggaatttcttaagacatccggaaataagtgtacctttgtacgtgaaggacgtttgttttccccaagatctaggtcaaattaagaacagacttgt

SEQ ID NO: 7170 - DNA, 1048 bp, Homo sapiens
ccgcctcccttctctgcctgagcacacaaagaggtcatgtgaacacgtagcaagatggcggccacctacaaaccaggaggagaggcctccgagtgaaactgaccatgctgcccccttgatctggggcttcccagcctccagaactgtgagatacgtttctgtttaagacacccagtctatgcttttctgatggagtagcccaagcaaactaatacaagtttcttctagctggtaagaacaaccattcccttgggaccatagtggaagtgagtacagccatatctgcctttgagtaaactctgactatgaggagtaactcagggaactcagattggggtggagttcacaagatcctcggctgcagtttgggctctacctcttggtttttggagctcccctgcctggtctcctccgcgtcttctctttttacttctggctcttcactctgcaccatcacctcttactccttattccattatttttcaacgttgcattgttgctgaaccgcagtgtttagcaaacctttattttctcataagctgaatatgcggtggagagaagggtttcccacaaacatactagaaaaaatgtgtgtgtgtgtgattatagtaattattcacacttatagcaaaacattcatttgattcaggaaaggacaaaaggtaaataaagtgttcagaaatctcactattgtagagctagaatcattttgggactacctagacaactttgtgtgtgcataggcaatatatttacacaggcatgtacttttacattcatagagtcctactatattcactaaactgctttataacagtttttgttgatgtttttggcaataaatacagatgaaatataacattttaaatagccatatagaattccattttatgtatgtattatgatggttgtaacttgagggtctttgggatatatctctgtctctgcctatgtctctgtctctataactctatcatctgtatcatttccctaatattacataatataaaatgcaaattttgttaaaaagaaacctttttaagcaaag

SEQ ID NO: 7171 - DNA, 1053 bp, Homo sapiens
ttctcttatggtcaaagaaattttttaaaaagttgaattatatactgcctactttttgttgttgttgcagagaaattggataggataaacaatacgagactgttgggataagagtctggggcatataggctgctgttaaagtagtacttatgtatatttttatttatttatttttttgttttatttatatttttttttttttggagagggagtctcgctctgtcacccaggctggagtgcagtagcgtgatctcggctcactgcaacctccaactcccgggttcgagcgattctcctgcctcagcctcccaagtagctgagattacacgcacgcaccaccacacccagctaattttttgtatatttagtagagaaagggtttcactatgttgcacaggctggtctcgaactgctgacctcaggtgatccgcctacctcggcctcccaaagtgctgggattataggcatgagccactgtgcctggcctattatgtataattttaaatgtaggatggaaggtatcagatcatttactgaatatatttatgggagtaatataggagttttattccaaatgtcagagttgcagtacacaggaaattacatcctttgtgatgattgaaatgaatgaaacatttctcaacgccaaattgaaaatgcatgatgggaggacatgagttcttcaagattcttgtatggggggtatatgaacaagaaagcttgaggaccagttttcacaaatggtactcaaccatagcccttctcatttacccattaagatgttttttttttttttctttatgatttagatgcttagatgttcttagggctttggaaggatttatcataattgagcatttgctgagtttctgtttccgtcattggattcctttggtaatatatttgcaagtctttctctgagttctttgctaataggaaaacaagagctgacaggaagatcttgggtggatgggtaaaaatggctactggctgttgatttggtccactgtatcaccacattactgttgacatagtaatggaaacactttaata

SEQ ID NO: 7172 - DNA, 1029 bp, Homo sapiens
tagaagtagcctcaaaccctgatctgctcaacaccaaaacctaagctgcctaccatcattctactatacaaagtatagtagcagtgaccgaaggagtgaggagaaggtacagagagttaaagacagcatgggttaaatgctcacacagtgctgataggtacagagagttaaagatagcacgggttaaatgctcacacagtgctgatggttctgtaagagatgtggacagggactccatggttttcactaatctcctgtaaattactatgtcacacatttattctatattgtgaattttgcacatcgtaaagcattcgtctgtgtatggttcttggtaacaagcatggttctcctgttcatcagtactctgggaccgagtgcactgaagacgataggaagttcagcatcagtgaaacgaaaagaatcttcccagagctcaactcagtctaaagaaaagaagaaaaagaaatctgcactggatgaaatcatggaggtacagtttatggattgcgtgtggacaccttagaacccaaggaaaattaaatcatttcaccatttattagattaatagaaaattaggaaaattatcatgtacggactagggaatagtgacctagctacatacagttccccgaactggagttggagcccccctaaataggtttatttatttatttgttttttatttttttgagatggagtctcactctgttgcccaggctggagtgcagtggcacaatctcagctcactgcaacctccgcttcccaggttcaaatgattctcctggctcagcctcccaagtagctgggattgcaggcgcttgccaccatacctggctaatttttgtatttttagtagagatggggtttcaccatgtttgccaggctgatctcaaactcctgacctcaagtcatccacccaccttggactcccaaatgctgggattacaggcatgagccaccatgccccacctaaataggtttcttttaatgcctcaggtgctgtctttgaaactccctgcgcttgtt

SEQ ID NO: 7173 - DNA, 1023 bp, Homo sapiens
ctggcatagcatgtggtcaggtagttctacctactttctacattatcttctcttgcaatttttatgtattctttcaccaaatctttattcactatttctgacatgcagtacattcagttttgttatggaggttaaaaaagatgagtaagacaagagagtcaagtaccagtatctactggaatttgcttttaagccagatgatattttctattttacttagtactttacatgttgtttttttaagatctaagtttttcgggtttgtttgtaggtcattgtttatttacactattgaataagtggctaggagtatggaaggagataggtaggctgaatcagcaatatagatcaactttaaaatgatttgccagatgtcttaactttgatcaaaataatgtttcaaaattaacacctacattagatatcatcaagaagttggttatttgggttctacatctgggtacattccagaagaattgtctaacattggcatgatatgacctggaagatcggctcaaatataacacacatgccttatacttttagaactttatgcatttctgtctgttcttttgaagtatgtgttattcctagatgtagatggatgttaaaattggttccagtgttccccaattgacctcccttgtattagttttctatggtcgctgtaacagattaccacaaactgggtggcttaaaacaacagaaatatgttgaggtcatattctagaggccagattctgaatcagtatcactggcttgaaatcaaggagcctgctggctgtgctctggggaagaatctgagctccggggaagaatctgtcccttgccttttccagctctgttggccgcaggcgttacttggctcatggttgcatctctccagtatttaagacgagcatcttcaaatgtctctttgccccatcctcacatcaccttttcctccaggtgtcaaatctccctccaccttgctcttacaagaaaagggatgattgtagttagggtccaccttgataatccagg

SEQ ID NO: 7174 - DNA, 1026 bp, Homo sapiens
acatacagtatctaaatttcattaaatataaatatggaaaatcccatttgctgcatgaatttgtgtatttgaatgtgttttagtgtatttggtgttttgttttgttttgtttttgagactgagtctcgctctgttgccaggctgaagtgcagtggtaggatcttggctcactgcaacctctgcctcctgggttcaagtgattctcctgcctcagcctcctgagtagctgggattacaggtgtgcaccaccacgcccagctaatttttgtatttttagtagagatgggattcaccatgttggccaggctggtcttgagctcctgacctcaagtgatccacctgtgttggcctcctaaagtgctgagattacaggtgtaagccactgcgctcggcctgatttgtgtgtgtttgaatgaataaatatgcagaggtgaaacacattcatatttatgttttgctttgattgtatgctaatttatggcagtggctgtttttttaaggcttgtgcaaagtggacgagacaccaaaaggctggtatattcagtacatagacagggacccagaaactatccgccggcaactggaactggagaaaaagaaaaagcaggaccttgatgatgaagaaaaaactgccaaatttattgaagagcaagtgagaagaggcctggaagggaaggaacaggtgggtaagcaacatcatcctgagaagcaacgtccagaggtctaaagaagcacaatggcttggtttttcttttttgtttttgttgttgttgttgttttggagatggagtcttgctctgccgcccaggctggagtgcagtagcgcaatctcagctcactgcaacctctgccacccaggttcaagcagttctcctgcctcagcctcctgagtacctggaactacaggcgcccgccaccacgcccagataatttttgtattgttagtagagacagggtttcaccatgttggtcaggccggtctccaactcctgacctcgtgatccggccgcctcggcctcccaaagt

SEQ ID NO: 7175 - DNA, 1048 bp, Homo sapiens
aacatggtgaaaccccatccctacgaaaaatacgaaacaaaattagccaggcgtggtggtggacccctgtaatcctggctacttgggaggctgaggcaagagaatcacttgaacctgggaagtggaggttgcaatgagctgagatcacactattgcactccagcttgggtgacgagaacgagactctgtctcaaaaaaaacaaaaacaaaaaactgtactactgcttaaatttcaaaaagatgatgctatatgtttgtagaaattaccttaatgctttcctttctttctttattagggaattccgaaatgactttctagaacttctcaggagacgctttggtaaacattttaaatattgtgcaaataacagctttataaatggcataatcttctgatgatcatcagtgtcatattttgttctcaggcactaaaagggtccacaacaacattgtctacaacgaatacatcagccaccgagagcacatccacatgaatgccactcagtgggaaactctgactgattttactaagtggctgggcagagaaggtaagaatgagattttaaagttgctttttctttcccacttctaatcttcataggatgagatgtttgggataagaaaagagaaaaaaaattgggtcagtgttttgctttttcatcgtgttagttgattccattttgggagcataatttctgccttaagttaatagaacatcatataactgttggacattaaatacttagatagaactgaataaatactatgcaaggtaatacagttgtctctcagtatccgtgggggattgggtccaggaccccttgctgataaccaaaattcacagatactcaagtcccttatataaaataaaatgatgtagcacttgcatgtaacctatatacatcctcccacatactttaaatcatctcgagatttcttataatatttaatacaatgtaaatagtttttatactctattgttagggaaaaatgggaaggaaaaaatgtctgtgcatgttcagtacagatgcaaccatccgtttttctt

SEQ ID NO: 7176 - DNA, 1022 bp, Homo sapiens
cgctcaaactaggaaaagttaaaaaggggtttttaaagggacatctcataggaaggaagcactagttgggcctcaccggaattggagctggaaggtgggaagcgtctggtgagaaggaaagctgcaccttccatctctcccattctgggggccactcagtatctcagatgatctctgtgaactgttcagttcactgtttctctctccagattgcttcctttgcctactggccagttatactgcggctcagattgcacccacagattcattgtgagcattctgttccagtacgtacccccatctgattacagtctctggctttgttcacatttcatagagacagtgtctgatgagtcagtgcaaccaaataactgttcccctggggtcagctgtcctcttctggtccattagctgtggttcctgtggcacaagcatgaatccttaaggccacatcataagcagggactatggggagagtgggtatttcttagagaggaggcatagactgtgcatgggcatcccaagatgtgtctgcttaagggttcagaaatctagaggagacaagacagcatactgggtgttgtagaaggggagactttgccagcaactgagcaaagaagaggaatagtgagctaagaatcatacataaagtgaaataaatattatcactctttaaagaaagtgtgacagtattgaagaccgagtccaataaaaatatgtagcaatttagactttgtacctgtgcatttattttttagcacaattttattctcttatgtggcataatactgtaaagagtatagtatttgtctctagaatggaccattaaatgatgtgtgtaggcattttctggtttttatagagtagctttttctctgtacatatgcatgtaattcgactgaactccccagcttctgtgttcccctttgctccccaggaagtcgggtattgtcaggggatgagccagatcacagctttactcctcatgtatatgaacgaggaagatgccttctgggccctgg

SEQ ID NO: 7177 - DNA, 1032 bp, Homo sapiens
aaaatgttattgtctgtatcaataagtatgaagtgcttttcaaatacataaatgatcaattaaagtaattagatgatcaatgttaggacgtggttgcatggaaaatggactaacacctaattatagctgcttgtttgccacatggtgttaatggagagatttgtggtatcactttgagagttcgtgggaaacagcagcagaattcagtttaaccaacacctgctgtgtatgattcttttcttctagcatgaaaaaaaagatgactttgccccaagattattagggtatctctaggttttattatttattaataaaaagttaaacttttgactgagtaataatttttttcttaaattaggtgctttaaatgtatctccttgtcatctcgtagctataccctttctgaacctaaattttctattaacctttgaaaggagtaagagatttacatctaagaatcttagacccatagattttgaaatatgttccttagaaaatatgtacaaaaaaattaatgtggaataaatgggaaaaaataaaaattgctgttttttttttcttcaacttttattttaagttcaggggtacacatgtgcaggacgtgcagatttgttacataggtaaatgtgtgccatgccatggtggtttgctgcatagatcatcccatcacctaggtattaagccttagcactcattggctattcttcctgatgctctccctcccacctccaccccttgctgacaggccccactatgttttgttcctcatcatgtgcccgtatagtctcattattcagctcccacttataagtgagaacatgcattatttggttttctgttcttgcgttagtttgctgaggataatggcttccaactccatccatgtcctggcaaaggacatgatgtctgagagaacataatatgaaatataaccccagcacctagtacagtgtgcctagcatatggtaggtgctctgttagtatttgtttaaataatgaaagtagaaaatgaaagaaaaagcactttattta

SEQ ID NO: 7178 - DNA, 1034 bp, Homo sapiens
tatatgttcgtggtttatttcaagttaatttttgaatactgttgaggtaaaggccaaggtttaatatagatatagataccatatagatacctagttatttcagcaccatttgttgacaagactgtctctccccacttcaattatgttggcaactttgagcctatgaaatcttgctatcatttgcaaccatcttttttcagcaagaatctaaggccgacaacagagcttattcaaatataaataaatccgttttgtaatctcactcttgagtactatataatttaggaggttgtggcaataaagaagggaactgcctttcagggctaattctaactaataaagaagtacgtgttggtaaagtagaagagatggtaacttcctagaatttctacttgtaaaggaaaaacattgttcatacccagttagtgatatgtgatttactttaggaaaatgaattagaaacatattaaatgtgggcttgattaccacagactgaaaggaaaattggatcaatataagaaaaatctacagtgactacttatactcatgagaaagaaaagataaagaactatacataaaataaagtagctgcttagggtgctctttgagttcacatttaaaaagagtttgggtgaaaggtgggagaaaaggcttatcaccaatagggagtgaaaaaagtagtagatacttaaacatagcatcaggaaaagtaaaaactgaatgagttgatatctgtgaacagtgtggagtctgatagaacaccttcaaaaacttattttggattctacagatcaataataactagataggcctgctgtttggaacatatcatataatgtaaacataaagaaagcatgtatgtcctggactcttttgcttccatctgtttttgttgttgttgttctttttatcgtaaaattatctttgaacagaaaagagaatggacagaaatgagaggtcattgaggctcaaggtcggttaggagataataaaccatttaaatttaggtctttaggattagatgagctgttgtc

SEQ ID NO: 7179 - DNA, 1026 bp, Homo sapiens
tgtgcatgtgaatttagacttctattcatggactgggatgtcagaggtgtatatgtgaggaggaggacaaggaatttataggatatttttgaggcaccatatcttttatgcaaatctgggagcttagagttagcaagatagattttatttttatccacattttattttccgtttcaaatacaaggtttttgagaaattggaaaaaagtattaaggctttcgacagtgcagggtattttggttgactacttaaaaacttgcacatagcatctgtgatgcactgtgaaaatttatagcagagcactttattttttctgtcatggcttttgtgagaaaatgttttcactttgcttagtgatttacagaagattacccacattttgttttgttttgtttataactagttaaggctgtgcatagtaatacattttggactttgaggatggggctttcacacgtgctgaaatcactttgaatccatcatttcaagaagatacagcctatcctttcgttgtttcttattaactgcttcagagccttcatggatagctaggcaaagcattcatttctctgaagttgaactgtgttcgtgcttgagctttctgaaagcagaaatgagcttctggtgatgaaacctgttggatttctagaggaagcagctggagtctttggcttgttaactagcaatgattcaagtcttgcagattgtaaaggagctggtgacaccatcaaggcaaaaagcagccacagtgaaggaaggtaggattagcagaatgaacaatcaagcactttcagggcactcagattttgctaagtatggacccaaggatgtgctataaaaaggggttttgagtttccgtgtatgcttttgcatttctgatatattatggtatctgaaaaggatcaggtaatggcataattgttaacatgcctcattattactgtttttgaacaaaaattagggggatattattaagaggtacagagtaaggggaggttattgcattgctgctgtaatagtactttt

SEQ ID NO: 7180 - DNA, 1033 bp, Homo sapiens
cgccaccaggcccagctaatttttttttgtatttttagtagagacggggtttcaccgtgttagtcaggatggtctcgatctcctgaccttgtgatccgcccgcctcagcctcccaaaatgctgggattacaggcgtgagccaccgcgcccggccaagaaagagcttttgttatttcagctccaatcatgacattttgtgagaaagtttatctaatgtaaagtgctaactctagtgaagatggtaattagttcacaaaaattaaaagaaatggcaagcattttaacttaaaaacgcttacatttttggaaagtgaaataaattttcttctactttgcaatttttgggttctgttaggatcagtgttgcagatgtaagtttttttgacggcaggtagcctgtgcctttcatgtttgaatttcggtgtttgatggtgtcttgtatactgcttaccctagaaaacaaagatcaaagtcttgcgaggatgaaggcagaggggaggaatggcttgccaagcaactaatagtgtttgaaccacataacatttttcacctttaaattgtaatatttatatttcatttgcaagatttttaactggttctttatatccactaatccactaattctttttcatgtccacttaaaacaattggttctgttattttatctctttgtggatcttttacatgcttattttaaagtctttttcagatcatttgataattttaaaattttgtcttcagggaatttatgttttgattgttgatattttcatcatgttctgtaatttgcaggcacattctgatggaagtttttttgctcttatgtctctctctttctttttgtgatttttgtttttttcatgctggtctagcagattcatatttgtctctgcctggctttggagttcccagatcagaatcaggtctgtgttagtgggtcagagccctggccccatggtgacgttgagaacatcacagattcagtcactgagtcagctggcattaggtcagcaacctcttataagctgtagcc

SEQ ID NO: 7181 - DNA, 1033 bp, Homo sapiens
gagagcaagggtcacattttaagcttttttcagaatgtttgacagcttagcgtcattctgaacatgtagctgattagtagatgttttagtagccagacatcaggggacattggggagtgactgcatgctccatgtgggcaggagtttttctctgctgtactcacaggtatattcctggtgcttagaacaatacctagcacatagtaggaattcaataaaagtagaatgaaaagatgaatgaatgagaaagtagaagtctgttttcatctagaggtagcaaaactgattcatactagttagagttttcatcctcccaaataagatatgacatcaagtatcagtaagacatttctgtgttcaatgcataaattaggagattagagactataagagatgaagctgagaaataccatactttcaatttaagtatacattcctgaactcaggttttattggcttttgttttttatttacgagaattttatttgatttgcgaaaacacaaaagaaggctggtatagtgaacttggatttacctatcactcaacttcagttattaatattttgtcagttttatttagctaaggtttggtttctcttcttttttattcttccaattttgccttttaccagttactggccattttcctttgttgtgtttcattttttggttttctctaacccttcacattgaaatgataaggatattttcctaattggtctttctacatctacccttttctgactttctaattgattttatatattgctgctaagttaattttcacatcagatcccttttaaatattatcccttgcataaaggagaaagtctcaactcctcatctgggagtttgagacgctttttaatgtgagtccactttaatcagccttttttccccctcatctttagcatagatagatcctcacgccatgtaagtcctcatccacacaatctctctccatccagtcatccatccatctcttcagttaacaaatggtatacataatcagagaagatatagccttcgttct

SEQ ID NO: 7182 - DNA, 1022 bp, Homo sapiens
atgtatcttggaacttaaaaaaaaaaatttacatgccactaagtgtatgagaatgaatgtttcttttttttttttttttttttttgaggtggtgtcttgctctgtcacccaggctggagtacagtggtgcgatctaagctcactgcaagctccgcctcccgggttcaagcgattctcctgcctcagcctcctgagcagctgggactacaggcatgtgtcaccatgcctggctaattttttgtatttttagtagagatagggtttcactatgttagccaggatggtctcaatctcctgacctcgtgatctgcccacctcggcctccccaggtgctaggattacaggtatgagccactgcgcctggcctgagaatgactgtttctttacactcttaccacattgcagttcttaatttttaaatttgaagtcaggttttagcatctttaagtttattggctgttttataaatgtattattttccctgtgaaattcctatttgaatcttttatacccccaccccctgtcctttttccccttgtatctttttaaaaaattgatttataaaagcacttgggaggctgaggtgagtggagcacttgaggtcaggagttctagaccagcctggccaacatggtgaaaccccatccctacaaaaaatacaaaagttagctgggtattgtggagtgcgcctgtaatcccagctacttgggagactgaagtgagacaattgcttgaacccaggaggcagaggttgcagtgagctgagattgcactccagcctgggtgacagagcgagactccatgtcagagagaaaaaaaaaaagcactttgtatattaaggaaattattattattattattattattattattattattactttgagacggcgccttgctgtgttgcccaggctggagtgcagtggcgcgttcacagctcactgcaagctctgctccccgggttcacaccattttcctgcctcagtctcctgagtagctgggactacaggtgcctgccacca

SEQ ID NO: 7183 - DNA, 1028 bp, Homo sapiens
gtgtgctttaacgttctctctataacaggtttgctttcattgttttgtattttaagttctttatgtcactgttgctcttcttaagaaaatgagtcattaattaccagtggtatttcagattagagttttgggaaataatgcacaaaattagctgtgaaaaaatttcttaaatgcaactacaaaactcatttgtaggagtcttcttcctgggggcattcatttaaaattctaaaggaggaatgtactgtgcctgtggtaattggtgaaaagacctgactttggggccaattttggttgttaaaaggtatggtagactactgtgtagtatttgtacctgaggagcaacaagaagctagaagttgatggagttgctaggcattaggtcaatttctatggaggatggatttggaggggggctgagggagtgtagcaaagaggtaatagccatagcacgtggctgagtattaaactattttaatatttctacaactatttatattgcatggttgagaatctgaaattactgttgatcagaaatttgtataggaggagatccttttctagtttcataagtctgtggtaggggaggagtggtttaagtagttaccactagaagatgattgaccagaagattgaacaggagtagtgtatgccagtagtacagttagggcagggtcaaggtagagactgtggttaaatctttgtggctgaaggtcactcagaggtgagaatttaagacggcaaaggtgttatcaatagttcttttaggaaaaaggaaaaggcttatccttgttttgtgttttgatttgcgaggactggtttaaactttgaagaggcaacctgagagtgtacttgtaccatcagtaatggactaaaaaggattatggtggtgctttattcatacttctcacttacttagggcttaattatgatttccatatgctttgtcaatttcatagtcctttgctcgtacatcctacctaatacatcataactgatttgtgagtatgctaatagtatgctaatga

SEQ ID NO: 7184 - DNA, 1024 bp, Homo sapiens
gtagatttgccattagctttttcgtaaaataaaagcacagaacagatgtggtggtggtatggaattgtaattacaggtaggttgtgaccttcctttaaatttgttataactccagctaaaattaacaaagaatataaatgcaagtatgtttactccaatttttttaaagctcaacagcagttaactacagctcagttacttttctagtccagtctggtagacaggggtatttgtatagagaaatagacctgagttctcaattaggtcatttccactctcaacccccaatataaaattctaagctgggtatgcaaataaccatgtactccgttagtgtttaaaacagcgttaaaaagaaaaaaaaggctttttggcctcttctaattgaatttttactatgcaaaatttatctagggtagttgaatccaactagggtagggttcgatagaatcctctactagttttcagttcatctatttactgaggctgaaccagcttttaagtaaggaaaacggttgactccattcactacaccaaggctaggagactaatgaaaattcaggtccatcccgcaagcatctgcacgtgcttgaggatctcttttcctattcttacctcaaagagtacttgaagtttctgaaaacaaatctgtaagactgacatgtttggggcagtaatatcttgatgttaaaccatgaacagaaccagcaagatcagccagtacctgaaacccaatacagagtagttcacagcaagaagtacagattgatctggttcccatgcctgaaaccctgtcatctagcagttctaccagtgttcctgggccattttcttagcttcttgagtgagtttagctctttttgtgttgacttttagggcctccagcagctccatgattttccaggactttccagtctggcccccacggaattctcaggatgattctcatccagccctaagtcatgtttctagcctggctccagcgggtaagccaggccctgagaaccatatgaaagggctctcc

SEQ ID NO: 7185 - DNA, 1023 bp, Homo sapiens
gatacaatagtttatctggtgcgtatttggagaaaggcatgacaatcaatacgaggcagcgcagctcggagtcacaggcccgactcggtttgaggctccgcggaccataattagctatcacatcaaacaggttctgtagcctctctcggcttttttcataaaacaggaacaataacagcccctccctctgaggaggtgcgtggaaagcagggtgacgtaggcaagtgtgaaatgccgtgcggggttatcttttagtagaagagtatcctttttgtaaaatgtcttccttctcccttccaccttcttaacttcacttttggtcttagaaaagggagaaaaaaatagaataagtgaggggaggtggagagagggctactatggctataaaggaggaggggtaaaagaaccaagttgcctagctttagcagaatcaaaatacagtaatcaaaccgtttattcaaccagcaacatttgagaagtcggaaggaaagtattacattttaagatcagtttgctggccgggtgcggtggctcacgcctgtaatcccagcactttgggaggccgaggtaggctgatcacttgaggtcaggagctccagaccagcctggccaacatagtaaaaccccatctctactaaaaatacaaaaattagccaggcatggtggtacatgccggtagtcccagctactcaggaggctggggcaggagaatcgcttgaacccgggaggcgcaggttgcagtgagccaagatcgtggcactgcactgcagcctggcgacaaagtgagactccatctcaaaaacataaaaaaaaaattaaaaaaagatcagtttgctacaaagagtagcatctgccagttaccaagcacctgctgtgcccaggtgagtaggacatgcttcctgcctgcaaatgtccccaggcttgttcccaaacaagcggctaggaaaacaagaggctgattttacatctggcaacctccatctgagtgaaacaaattttaatgaaagcctgtggtaataaggt

SEQ ID NO: 7186 - DNA, 1026 bp, Homo sapiens
ttttaaagggggtatttatatgtgcaccacagtaaatcagtatcagtgatattctttaacttcttaccctcttcagttgttcatatttatgtttcagtatcccactgcaactaattttaagtcttattttttgccgggcgtggtggctcatgcctgtaatcccagcactttggaaggttgaggtgggtggatcacttgaggtcaggagctcgagatcagcctggccaacatggtgaaaccctgactctactaaaaatacaaaaattagccaggcatggtggtgcgcacctgtaatcccagctactcgggaagctgagacacaagaatcacttgaacccaggaggcggaggttgcagtgagtcaagatcacaccactgcactccagcccgggcaacagactgagaccctgtctccaaaaaataaataaataaataaataaataaataaataaataaataaataaataaaataaatcttaatttttgaactgcacatatacatatgagacactgtggaaaagtttggcagttcctcagcatattagatacagaattattatatgatctggcatttcatctcctaagtctacacccagaagaagtgaaacagggactcatatacttgcgtgcctgtgttcatggccgcctctgtggaaacaacccaggtgtctgccagcagatgaatgcatccacaaagtgtggtatacacacaaacacacatacacgctgaaacatgcgataacatgatgggcaaatactctgattctacgtatctgggtgcccagaatagacaaactgatagaggaagacagtagagtaagcgctactagggatggggaattagtgttgagtggatcccgagtttctgttgggtgtcatgaaaagttctggagatggatactggtggtggttgtgcacctttttgaatgttatttaatgctactgaattgtaccttcatagtggttaaaaggtaagtttttatatgttctgtatattttacataatacgcagattcatatctataaa

SEQ ID NO: 7187 - DNA, 1048 bp, Homo sapiens
tagtgttgtgtctattgacattcaagacagtgccgaagtcaccctctgaccctcccgcctcttgtgttggtgaactagagggaggaaggccaacaggcttttccataacaaagaagactaggaataggatgatctcactggaagcagaatcctaaagctagaagaggttttggagaaaacatactcattcctgctttttacaaaggagggaagagcctcagggaggctggagctctgggcttagctggcgggcaagtagagacgaagagctgacttccagtcagctgtgcatctcacaggccctttgaagttgttggagctctcactgggcaatcttattccgagatttcttatcaatgcgtttctgttttattgctggtgatttatggctcgttactgcttgtttccttcaccttaaccacgataatgatgctcctctttttgtttcccttattcctagtgtttgggatgggaccttcagtgcttttcccagcactgtcttcttcagtctttaggactaaccttaggaggcagcagagagagctatgccaaaaggtgttcatctcttgcaatctgtatgatttacttaccagcattgcttgttggtcagctccttgctactaacaggaatgttgggctgctgtgagttgtcatagaagtctgtttgattttcctgtgttcattttgacatatttggccttcggaatttgggtacaatgctgaaagacctacaatttccagacagtctttttgttttgttttttaaaaagcaaattaaatatttgaacaattttaatgaaaatatgacaaggtccaaattttaaggacagccggataggaagcatgagcaggagggttccgaggaggatatcttgcagctcttactatcgagatgcaggtggtaactcctttttatcccaagccccagagccacccacatgtttcacttcctttaaaagagatcctaaaattgtttgcttctccactctggtctcttaccactgcttttttctgttgtagggagaagagagtgaagggagaatgttcc

SEQ ID NO: 7188 - DNA, 1042 bp, Homo sapiens
gaatctctagtgtaaaagacatcaacgtgcttagcctttatttcagaaaaaaatcagggtggttcccagctccccagtccaggacaaccattagtcctgatgagtgagctgacgctggtgctggaacctgctggcacctcactggccacatctttggaaggggatggtggccttgcatccaagatgcctgaaaatcagcacgtgcagggcctccctatccagccagcattttccttccagctgaggcaggtgaagacttcataagctcatcacaggggagggaattaggagcagggcagcaggtaattaaacaagataaattatacctgatttccaacaccagctacaaagagttgaagatgatacctatgggtcgcgttaacacagggggcaactgccttgatcggcctgccatgggtcatcagactgcttcctaaattgagagaaactgagcaatctctcagccactgctatagtctaacttcttgtttgctgagtaattgtttctaatgtctctgaactcaaagtgaggtgctccaagacgctgtgaacttctgcaaagacacctccttacctactgggatcacgtgacctgacctcactcccagccaggctcccaaagggctcattccagccattccaatctcttcttctttatgcaaacacttttcccccacaacaagccttgtttgttccgataggaatacgtgtacgtcagtgcacttgtccttacgtcagttccttacaccaccaaagcacttcacctttctggaaataaaacttttaagacactactataagtaaaaatgagagtattcactagacttattgctcaggcacatttgagtgggtcccagctgtgtgattaagaagtcaactgggtggccttttctgggttatcttctgatcatggcctttcaacccaacaagggcccttccctgctcttccaccagtaaaggctcctggcctctcatcaggatctgccccccagagaccccccccagacactgcagggcctggtgatgctgtcctctgtaccgg

SEQ ID NO: 7189 - DNA, 1047 bp, Homo sapiens
ttacaaatgttatcagctagagatgtgtgctaaagtatttacaggtggtatctgacatgtccttaaaaatgctatagcaaaaagtagttggggaagggccagcagatagatgaaatgagaggcggaagtgctagaattcttgtagtagtggtgaggctacatggaggctcactatactcatctctctacttttatgtgtgttcggaaatttccattttaaaaataatttctttttggcaggggagatggaaaacaggaactggtaaatatcacgttggctgatatcaggatcttggggcctctttcttggttgctaatatactactctaaaaatgttaacatccctttttttccaaaatggaaattgttttggagtaataactatattttattcatctttctagtgctaaataaatgctctgagtttatgtattttttgtttttaggggtatacacatttatgattataatgtctttatgagttgacctccaatgaaatatcctgttatctctagtaatacttaatgttgttctgaagtctactttgcctgatatcaatatagccctacaagctttcttatgcttagtgtttgcatgatatacctatataactttttctgtccttttgctttcaacctatttgtgcctgtatatgtaaacagcatgttgttgggtcttgctttaatctctgtacacttattagtgtttagtccatttatatttagttgtttagtctaccatcttaatattttgtatttgtcccatctcttaattgaccttttttcctgcccaatagaacaacaggatacacagcaaggaaagcaagccctctccataaggacagatgtagaaatctaggaaatgccattctttgtgctccctggggcacaaatctaatacatcataaataaggcactctagagtgggcaccatgccagccctgactgtttgtctctggccctcatagctaaggcccctattgcctgccatgcttaagttcagctcaaccagttcttggcctatatgaggaatatataattgggttat

SEQ ID NO: 7190 - DNA, 1013 bp, Homo sapiens
gtgttgacttgtcccaacctttggctctaagggagggtcccgcagccttgagctctctggccatcttccacatttctcgcctctcccgactgcaccctgccccacctcgtgttttgtttctgcgtaatttgtcactgtggtgggaaagcttctagagcctactacgaaagtactggaggcacgtccagcatcttgggcttcggtctgtttacccaacactgctcagggctggaatgtcaccttataaatctccctgcctggcagctgctttctgtggccaacaggcagataagccttgaacccagggtgggggagttcccatcctcaggggcaccaggactcagactgtctctctcccgcctccgtctttctctgtcctggcttttctccccatctctcccaaacacacacagacgacacactcaaagataatgaaataatgactccagagttctgtaaagctgcaggataaaaacacaaaagatactcaaaagtctgtctatgctttttgttgcttttgctttcaaggacagtacagttatgctgagaaaacctttgtgtgtgtgtgtgtgtgtgtgttgtgtgtgtgtgtgtgaaatggagtcttggtctgtggcccaggctggaatgcagtggcacgatctcggctcactgcaacctctgcctcccaggttcaagtgattcttctgcctcagcctcccaagtagctgggattccaggcatgtgcgaccacgcctggctaatttttgtatttttagtagagacggggtttcgccatgttggccaggctggtcttgaattcttgacctcaaattatccgcttgcttcagcctcccaaggtgctgggattacaggtgtgagccactgtgtctggccaggaaaccccttaaaaaggagagaaaattgttattttccttgggcctcacttgtgagtgttttgggtgccatgggacgcaatggtaagggctgagcttggaagaggctctggctttgaccagccatgagatccaggc

SEQ ID NO: 7191 - DNA, 1119 bp, Homo sapiens
ccaaatgaatcttggtttgtttccatgggagggcagtgggggtgtctgggtggagggaggactgagcacctcctcgctcagtgttgtgaaatgggcagaggcgtcaaagaccctacacagaagacatttgttagagcaaggagccgggtcagggtcttgggaagagcttgtgaaggaggatctgagcccacaacactaatttaaacctagaatggaaccagccagaaaaccctacctagtgactagagcggcgtgagtttggcatggacgagactcctggctttgccagctgtttcagcatctcgaaatctcctaacctcagtgtttctgagtctttatttgtcacgtgacatgtgaggtgggcataattcctacctcgcaggggttaggaatgtgtatgtgtagaaaacaccaggtactgtgagtctctaatgcatagtgggttctcaaaaaatattagtaacgttcaacgatgaaaccagaggaatatatcactggggagactgtgctgccatgaaatccaaaggcgatccaaatctggtgatgaaacctttgtctgtggctgggattcaagaatttggcagtggatgtgctctaagaagacccaaggaagaatgaatgatccgggggtgtcatgttggccggggaggatacagcccagcctgggtcttcctggctgtgggctcagccctcggccccatggtgactcagaacttgaattcagtcagtcctgtgctccacacctctgcttcccagcacctaccccacacatcccctgccttcagaaggctgaaaggaggctgagtttaggtggatagaacagacacacgtacaatttctaaactccatataattgatatcacttaaatatcacagtcaacccgcagtcagccccatcctctgctcctggagataacaactgtgaaaacagggtgggagcaaaacaggacagggataaggtcagtccctgccagcaggacagcggaaacctctggcctgcaccaggctgccccgtgcctatgctctgttgatgacgacttggccaggttcagaaagcggccccctcctagatggaaactccaggcaggaagttcgcacatctggctctgtcttctgcat

SEQ ID NO: 7192 - DNA, 1094 bp, Homo sapiens
aggtcaggagttcaagaccagcttagccaacatggtgaaactctgtctctactaaaaatacaaaaattagccaggcatagtggcacatacctataatcccagctactcaggaggctgaggcagaatcgcttagaccttggaggccgagattgcagtgagctgagattgcactactgtactccagcctgggcgacaagaacgagactctgtctcaaaaaaaaaaggtaataggaattggaagccactttaggttgaagagatgacttttaaactgaaatctgaaggacacagaaccagccatacaaagatcaggcagaaaagcatgccaggcagaccaagaagccattgcaattggccccaaggtgaaaatggcttggccttctcgaggggtggaaaaataggaatgagcattggcggtggggagagaatggaacaagctgggtttggagaggtgagcatgggctggatcatgtggacatttctgagcatgtgggggaagattagatctttgtgatttggggagccattgaacggcgtggtgagacgtgatgagcctttcagaaaaggaacactctggcagctgagtgaaccacagattgctgaggggcaaaagcggaagcagggagaccagttgggaaaccactggaactgtctaggcaagactggaggcttggactagtgggtagcagtggctctgggaagaaatggctggctctgggatatgtctggaaggggcgctctcctgtgttcttccaatttgtctttgatcacagaccactgctgtcactactttttaagacatttgctctgtgtcatcttcctccagcacctcgaccacccccagggtattggccaatgtcatgctttgtgctgcaaaatattacacttcctttgggaatatttgtacctgaattaattaataacatacctagttgaaaatagttttaaggcagaaatttgcatctcgatagatgcaagaatagacaggtccttgataggttttaaaatagagttctgggttctaactgggtgtcacttgaccattctgaggttagttgctttatctgaaaattggttataatatacctactgtg

SEQ ID NO: 7193 - DNA, 1053 bp, Homo sapiens
cgcctcggcctcccaaagtgctggtattacaggcgtgagccactgtgcccggcccagtgaagatattcttaaattaaactggcatttttttttttctgcttgcacatggcactgaagaatgcaatgactgctagaatcatctggtcccactatcttgatttgcgctatgaggctggcagtttaacttgccttgctgttgcaccagcagcgcaaatgacaaacagtgaaaaagacaaataaataacatcttagtagtattccgaaaatagttttgatctcatggactgcctaaaagggtgctggggccaggtgcagtggctcacgcctgtaatcccaacactttgggagactgaggtgggctgatcacttgagatcaggagttagagaccagcctggccaacatggtgaaaccctgtctctacctaaaatacaaaaattagccaggtgtggtggcacgtgcctgtaatcccagctactcaggaggctgaggcatgagagtcgcttgaacccgggaggtggagtttgcagtgagctgagatcgtgccattacactccagcttgggcgacagagagagactttgtctaaataagtaagtaaaatgaatgaatgagtgagtaatgaatgaatgaatgggtcctggggccccctaggattctgcagacttggggaactgctgctctggactaagtcagtggtggaccatggtagaagggaggtattgactgagccgagggcttaaggaatgggggatttaatggtctgagtgaagggaggtttgtgacctcagtatgtggcccagaatttcaggagaccttgagtgaacattgagcttggaatgatttcaggagctgggcttctagccctgctgaataatgggcagctgcatgggcagcgttgggccagattgtagggggctatgaagacctttgtaaagattccagggctgagactcaggagactctggattgagggggctcgatctggactttggagagtgactaagcatatactgttttcagaaagcttttgagctatttataatcgtgctactc

SEQ ID NO: 7194 - DNA, 1024 bp, Homo sapiens
tgttttcagtaaacatggggtttcaccatgttggtcaggttcgtctcagactcctgacctcaggcgatccacctgcctcggcctcccaaagtgctgggattataggcatgagcccccacgcctagcctcaggttcttgatacatatttttaggatgtaatttaaattttttttttttttttgagacagggtctcactctgtcgcccatgctggagtggagtggcacaaccagtattttttgtagagacagggtttcatcatgttgcctgggctagtctcaaactcctgacctcaagtgatccacttgcctcggcccgctaaagtgctagtattagaggtgtgagccattgtgcctagcctgtaatttaaaaatgtaacttattttgggattctttttctcctttaggtatactctggataataacgttctaaccctggaacagagaaaattttatgaagaaaatgggtttctagtaatcaaaaatcttgtacctgatgccgatattcaacgctttcggtacagtaacactatttgttattttacaatagtatgtattgtgtgcatgtaatgagaatacaaggtggattcgctcctggctttacagatgttttttaatgatttggtttgttgggaagtgtttagaagcatgggctctggtgccagactggctttttattttttatagagaaaggttctcactctgttgtgtaggctgagtgcagtggtgcgatcatagcttactgcggcctcaagttcctgggctcaagcaatcctcttgcctcagcctcctgagtagctgggaccacagttgtgcaccaccatacccagctaattttttatttctttgtttttagagacagggagtctcactatgttgcccaggctggtcttgaactcctggcctcaccctcctgagttgctgggattacagtcgggagccaccatgcctgggcttcagtctcagctccaccacttaatatcatgtgtcctggggcaatttacttcacatcccatgcctctgtt

SEQ ID NO: 7195 - DNA, 1022 bp, Homo sapiens
tcacaatagctaagacttggaaccaactcaaatgtccatcaatgatagactggattaagaaaatgtggcacatacacaccgtggaatactacgcagccgtaaaaaaggatgagttcatgtactttgcagggagatggatgaagctggaaaccatcattctaagcaaactatcaaaaggacagaaaaccaaacgccgcatgttctcactcataggtgggagttgaacaatgagaacacttggacacagggcgggtaacatcacacaccagggcctgtcgggggtagggggctgggggagggatagcattaggagatatacctaatgtaaaggacgggttgatgggtacagcaaaccaacatggcacatgtatacctatgtatcaaacctgcatgttgtgtacatgtaccctagaacttaaagtataattttaaaaaatttaaaaaaaaagaacatcaactttatggtacaactgagtctgaattcgaagacatttatgtcttcaggtctggtttttggaaaacaagtttcttgcgtagtcacagaattctatttttcaaagctgagagtggatacaaatggtataggttgagctggggagctgggtgttggtattgaagtctgtggccctggctttgttttcatcgacttgggtgagtacctgaggaggccagcatcggggaatggaacgattcaggagctcagctgctgaagctgcgaaaggcacaactctcagacctgcttcctggtagtgtgaatgcaagtctggtagatgtttcattcgggcaccagttgtcatcttttagaggtgcctttttagtattgccttctgtctctaagacagggaccaccaaggcgtctgggtgccaggtaggaaactcaccatcagtcagtctgagtttgagaacctggaggcagaaatcaccaagacattagacccacagattgcctgcaaatccaccaaacccctgggccgaaaaatccgtcctgagtctctagcatatcagtgatcataaagaagcac

SEQ ID NO: 7196 - DNA, 1137 bp, Homo sapiens
cagtgtttctttgatggtctgcgatccaatcagtgagtcaaaaactggatttctcgcctcccatgttgcctatttattttttattattactttttttgcttttatagatttgaggaatacacatgcagttttgttacatgaatatattacataatggtgaagactaggcttttagtgtagccatcacccaaatagtgtacatcgtaccccctttatttttttttaatttttgtgggaaggattagaagagcaatcaatgttatgattgctatgttatgttcttgtaacttatgtagagaaagtacttgaaacgcatcaagaggggtactcttgacagtttttaaatcatggagtatgcaattgagattgttattacagtaaaaactttttaatttttattttcaatttaattgaattgaattttctgttagctgaagattaagcagaaatactttattcccttttcctaaaaggactcctaaaatgctcacattcccttcattgccctaggaaaggcggttccagccttagggttcttgtgctgtacttggatggcagtgactgtgtcaggagggcattggggttctctgcagggtgcatcgggcgaaaagcgtgttacggtgaggaggtgggactgctccagacccaggactggatggatctgttcttgaccccaggatgtcatctggaaccagggcaatgtctttttctttactacattcctgatgtcatgagtgatttcacttttcccaaacacagagcttagaaacaaattctgggctcctgggatattgtttattcatgtttcttgtgcagtttattaagtacacagtacaagactgtgatcacttttcttgtgttcgacgcatagtttcggaggtttggatgttcgataattactgtgtgacttgatcagttttcttcctttttttttgaaatggattctcactctgtcacccaggctggagtgcagtggcgtgatcttggctcactgcaacctctgcctcctgggttcatgcgattcttctgcctcagcctcttgagtagctgggattataggcccctgccacatgcccggctaatttttgtatttttagtagagatgggagttttaccatgttggccaggctgttctcg

SEQ ID NO: 7197 - DNA, 1049 bp, Homo sapiens
tcgaccctagcatcctcctatcagccctaccccttggatgacagagtaaatccaatcttcgttattttaagcaccttcctctcaacacctcttgatcactgcagataccattttgaatccacttagccaggtacaactacctgggggcaaatcccaattagaaatgaaggcaggacagtggagaccaagatgtatatataggatattcaggtctcctgcagggcatggggcctgtgctggcctctttctgaagagtcagcggtagccctgcttacccacacagcagtcatcttggcggtggcatgggccacctaaccctgatacccccttgcaactacattatttttagcagaggcatcaactaactcttcaagtttgaaagctcagaaacaccttgaatgcctttttttctttgcaactcaccctgctcaattacctggccctatcaactccttttgtccctcctctctcattcagtgccctttggcttctttgacaccatcctggtccagctgtgcatcactctgtccttgaaattctgcaaaaacactcttgaaatgtcctgcctaaccctcctttctccttccagttcctaatgtatcctaacagcctagtaacacccagaaaaccaaatctcgtgacatcgttttcctacttacttccccttggcctattcagtccgaactctggccttttccaagactccgtaacttgaatttctctctccttgtgaacatatttcccggtgcttcctcccgggtgagccagcaacactgttcctcaagcaccactcgttcattgtggactctgtgttatgctgttctccacagggccgtggtgcccttctctccccgctctttatagacaagcctgacttgttcttcctggtttaccccaagtctcatcccctgtaccatgagactttttcagatgccctaacctgtactgattgcccctttctctgagtgccagtaccacttactgcctttagactgcttagcagggcatcttaactctccgccttgctattgatgacttctatggaggat

SEQ ID NO: 7198 - DNA, 1533 bp, Homo sapiens
gaggccgagatgagtggattgcttgaggccaggagttcgagaccagcctggccaacatggcgaaaccccatcactactaaaaaatacaaaaattagccgggcgtggtagcgcatgcatgtagtcccagctacttggggggctgaggcatgagaagcgcttgagcctgggaggcaggggttgcagtgaaccaagatcataccagtgcactccagcctgtgcagcagagcgagaccctgtctcaaaaaaaaaaaaaaaaaaaaaagaaaaagaaatatattacatataactgtgactactttggtatttcattgggattatttataattttaaagttgtaacattacaattttgctacaattttgaatgtaaataattgtaccactacaatcactaagttatcctgaagtatttcatggttttgctctggtgaatttttctatagtattcctaaataatgcatattacaggatttaaggtatataaagtataataaaacatataattggaacaaaaccatggaacttaccttgctggcctgtgagacaatgtgagcgctggaagtctctaaactgctccattttatggtggtcaggtgaacaggtgctggagggaacccactgtaagagcaatgtccaaatgtcccattttattctaaggacaatagaagatacttgcttacctatgagagaaacagaataagataggtttaccaaggaaaaggcattaaatttaaacagtgcaaaagaggctgtggcaagggaaagataagacatgggaatggagaaaagaggtagagagattttctttgtgaagctgaagaaaagccagccagcccaccaataccctcgaacgcatccaattcgaatatatcctcccatccctgctcctctgtgcttccccaccccaaacgccacacccagagagtattctaaaagttttcatgtgtgcacagttctttgtttttgaaataatgtgcttaatatcaaaactattttcaatagaactcatataatttttaatatgaactcttaaacacagctaccaaattttttttgcaaggctgtcctcagggctccttttttgtgtgaactagcatgagtgtgtttcgagtgagtttttgaggtgttgttatttgagatgaacagctctgacaatagggaggcctgctgtgcccactcattgtgtgtgtgtgtgcatgcgggctcccgcaccgcgccacagcacgcacgttacagtatggaagcctggataattagataaagtcagacccccagatttaggttgtgataattagtgggtacgttttccttaggcacagcttcatcataattgcacatgcttcaaaatcctgccaagatactttcttttttctctccacctctttatgatttttttttttttttttggtttgtttggagtatgtcattcttttctttcatgctcaggagaacttccagtggtgaattcatcagctggatcaaactgctgtacttgtaactgccagtcaacgttgcaggccattctacaagaac

SEQ ID NO: 7199 - DNA, 1284 bp, Homo sapiens
tcatgaaaaatgtattttttgctgtgaaccatggtcagaaaagtttggaagacactgatttaagttactgttgccttagccccagagatttcccacgagactcactcagggaaggctgccattctccaggtcccttggggcccaagttatccaaatcccttgagatccttggaagaaaaagccattgtgaatgtgatctgtttgtcatcattattaataatatgtacattgaaaatgaaattgtgcaatagcatgtgtgtttaactcagaatattttaaaaatttaaatgactgaagaaatataatccagatcgtacttaatgatgttcatacttaactgatccatgaggtagatgtggaattaacatctcaggaaggaggggagatttgcatttctgtgtcaagactctcttagaagttttctgtacaggagagcagaggatcagcatttcaacttacattgaaaagggcgtctctttgcaaatagtaaattgtgaacattttcttgttgaatgaaggcaagacttgtgttactgtaggaattcagaagcagctcttaatctacagtcttgttctatttttcctaggtgtattgtcagcctttggagacttttgctgtgtgtttcatagaatcgtgaacacagacttttatttcgcttttctgaagttttcatctttggcttttgtagaactaacaggcttcacatggaccaagtttccagtttgtttttttctaagagacaggatctcgctatgttgtccaggctggagtgcagaggctgttaacaggcgtggttgtagcatactgcagccttaaacttctgggctcaagtgatcctcctgcctcagcctcccaagtacaaatttccaacttaaaaggaaatagcctcattcttcttaatttggagcagtgcaactaagtcagaatctgtaaagatggtttggtccagtgatttccttgtttccaccctgtgtgctaacattcctaggtagttaaggtaccagctagttcacacggcacccacgtcttgttgtgacagctccctggacaccggcttgatagtctcatgaatggagtccttcctgccattcagctagttccttgagcagcttagtagaggagtgtagcacagggacccagaagcctgatgcatccaatgcagatctctcacctcacagtctctgcatctcctgggtaaaatgtatacgccagtgctcgaacctcttagcttggtgtcaggattcaatgtaggcagggtgcttaccagaggcctggtacatact

SEQ ID NO: 7200 - DNA, 1024 bp, Homo sapiens
actgcaaacggctccctgtgtgtaatatgtgccagcatgtgtactgtccctgcaagacagtccacggcaggagcaatgaaggaagctaggctttgagggatcgtctttagtctctccatgttgtccctcattccatgtaggatgcagagggtcactcacacaggctgctcaggctctctgtgactaccgttaatcctctgtgctcacactgcagctcaaaccctgccactgactctctaaatcacatcacgagagccaagcgcctatggggactgcaagtacaaagagtccctgacttacagatgaaatggtgactgactgacttgagtagtgactgctgcaatcgaatccctggccccctaacttaataggcatctcctcctagcaaaactggaagtctggcctccaatagcatccctgcatgaaaaactcctggatgggaagccttacagaagccttggccactagagctagttgatgctgccgaaaaggaaaacaatccactgagaatcacatctggaagtgagcccatcaagagagtgttctctacttcctacaccctaaaaactgcccgtgggagagcctgaagcctcctctccttggggaagcaaccaggccatctcaaaatcatctacacttgaaaaaagacaaagggccctcacgtaagtcttctacatgtaaatatgtcacagctcaggaaattagcgtatcatcttctcattaagctctaccacatgaaagcaactggtagataggaagatcctcttcccatttctttcccactgcttcctacttttcacctcttcatctatcaatctgtttatctgccctttcattgtgccaaaaaaggtgattccgaacatttaattattagagaacacaaagtgaacaccccactcctggtagaaagtattacaaacagccagctctttattttcccaggataccatttcaaaaaggctctatgtaaaactctctaaaaagaggaatatgaagtcaccactgatgagggccagcaggcaga

SEQ ID NO: 7201 - DNA, 1027 bp, Homo sapiens
tgggagagaacgggaaaggggacttgagttacagggtgacccagaaagacgattcagctgtgtccagcctgccacccatacgtaggccaaccaagcacttcatgaagaggaggcctcgtggcatattcagtttacacctgaaatattccttgatgggacagcttgtggggatggctatgggggaaggggaggttgagaaaggaagttctcgacaccagaaatgcatcggaggaccacaatcagttctatgctgccaaagattaaaaataaataaaaacataaaaaattaagaggggccaagaggaagacattctttctgcaaggaaatttcttttaaattctgaactgctactacacacaagtgaaagtcaaccctatgtaaactggtgtcctctctctagccctctcccttactggcccacttctctctccgtagagagcctgaaaaactgccccaatgccacggtaaaggcgaggaagtcttggctggcgttgctgactcacagtcgccatccatctggacacaaagagagacctgtgggagtcgtagagggtactgttagccccggtccatgcagggggttcagccgagcccaagactcaaagctgctttcctttcaggatttgtagtaacgtaaggtgataatggccaaaagtggttctctctcattaaaccaaccagtaaaagcgtatcctatttttttgcacaaggtgtttcattttcgtttttatgggaaaccaagggaaaagcacattgcgatccattcagtgtttaactgtcgtggctcattttctgttcgttagcacttgtgtgacaaaagagctcagatccgacttctcctatgtgtcacttattccaagaacccaactatgcccttaggtagaaagatttgactcgtgtgtctactagccaacaggcagagcagggttgaaaaaaatatcagctcccaaagggcccatgtgtctacatcatcagttactgtcatgcaccacatttgtgtgcagataccaaaagaggaggaaagaa

SEQ ID NO: 7202 - DNA, 1012 bp, Homo sapiens
tcctacttgaaggacagactaccaatctgtcacagccatcactcattcattcgctcaaaaaaacagttattgtggccgggcgcagtggctcacgcctgtaatcccagcactttgggaggccgaggcgggtggatcacttgagttcaggagttcgagaccagcctggccaaaatggtgaaactccgtctctactaaaaatacaaaattagctggccatggtggcacatgcctgtaatcccagctactggggaagctgaggcaggagaatcacttgaacctggaaggcagaggttgcagtaagctgagatcgcaccactgcgctccagcctgggtgacagagccagattccatctcaaaaataaataaataaataaataaataaataaataaataaataaataaatagaaaaagaagaagaaaaaaaagttattgcatacctattaggtgccaagcacatcactgggcactgagatgagacataaatcctgtcctccaagatgtgtgataatccagccagtgtctgagtggtgtaataggaatctgtgtgagggtcggggatgattcaagaaggcaggcgtcaactgggtgtaaggagaagagaagtccccacagaggaagcagagagtgagtggggtcttcaagggtgcaaagaattttgcagacggaggaatggggcggggaggcatgcaggggagaggccagtgtgcctgaaatcacagtgacaggggtaggggacacagtgcccttcattctggaacatcaagtgaaaagagaggagttggtgagggggctggggcctgcaggctcctggaggcttgaaggctctgcgaagaggacttcctcctctatagggagtgttagccgcggtctatttgaagctgaggagtatagtgtcagatttccattgtcgtagaagcactctccggaaactgcttggaggctggataggaaaaacccaggacaagactgagaaaccaggacatgatgagggtagggcgggcaacacctggc

SEQ ID NO: 7203 - DNA, 1034 bp, Homo sapiens
gtaaaatgtttggatactggcatatctgaaaaagtctttattctagctttgtatctaatgaatagtttgactggatatagaaatatacaaaaaaaaaatttctctcagaataccaaaggcgttgctctggaaaagcccaccatcctatccattgtatgtgacacccccttgggctccccaacaatgggatcctttgggaactcctttttgctccttctgatctaaaatttcaggatgggtgccctgatgtgggtctttgtaaatccattgtactctgtgttcgatgggcacttttagtctggagacgtgacatgcattcttttttagttgtgaggttctttttggattgtttctttgacatcttctcccctcttgcctgtgtcctctctttccagaattcctatttatcaaatgctgggcatggcctcccactcctatacttgtctctccagctgtctatctctgtctttttattctactttctgggaggctttgtcagtatttactttaatctcttctctggactttctaacctttgccattatggttttgttttttgttgtttttttttttcttaaatttctaagagtttctttatattatctgattttttaatattatgctattattgtttcaggaacataatatcctctcttatcactctgataatattagttatcattattattctatgtttccttccagctctttttttccagtttatttgtgttggtctctctttcctgtacgaggcttcctcagttgtctgctggccctggtctgttgcttcacacttagaaactaagcagatgctccatttcagggtgggatggtcccccagtgggtgtccctgtgacgtgatcccgtcgcaagctggttctttccctggggaaccccgaatatcagtgtcttggtatctggacatctttcctctctggctctccattctctccagaaaaaacccttcccttcctgcctgggacatgtcctcccacatccagggatcgggagggaacagtctccacactgggtat

SEQ ID NO: 7204 - DNA, 1026 bp, Homo sapiens
ctagcctggccactgaccagctgtgtgatcattggttgacacaaccactctggcccatggtttaccggagggttggactaggaaatcgtaaagacatttctgagctgtaaccttccatgaatctatagataagaaaacagtattgggctgcttggaaagataaaatggaagctctatcaagatgctgttgtccacccaaggacatcttctcttgacattctcatcccatcactacccgggtcagcctcaattcctcaatcctttcagaatccacttagtaagagagttaaccttgtgtgaagaagcagtgatagcgccattcctgttgcaggctcatagcacggaggttgagatggagaaataccctcaggcctatacataggcattattcagaaatctaattttaatacaagaccatatttttaataggacaagaaataacatgtatggcatccaattaaatgtagactcctgtcttttgagtatgaaatcaacacaacattgactgctgtcctctcatggaagtagacagtaggaaagacctcacattctagccccttacactgcaacagttgacatattcctaaatggagagtgaggaaaggtgaggagggctggatttgaccacaggccttgaagaagttgactgcccatgggaaaagccaatctgtgaccttgaagaagtcaacccatgaccttggcctcagttgacgctgctctgagtgaagcattgtcagacccccaaggaagcacgtactgagaaacatgacttcactccatgagtacttggggaaactgaaagggtttgtgcccttcagtttccccaagtactcatgggctgtagcaatgtttctcacttcctaacccataaagccaaatggctcatggtggaccggacttcaacaagtattaagttgttttctcacatttatttcaatcaaagagctgcgctgtttgcatggccaaataattggaaacaaataccttaatacaccttacaaatgtgtatccctttgcactttagaa

SEQ ID NO: 7205 - DNA, 1035 bp, Homo sapiens
ctcaacctgatcacactgaactccccatgaagagggccacaccacagggttcccatcaggctatgtctggcaaagactcagctattccgtgttcttcattggaaggataagaagttgctttctatctgacactgtgtgcacagacagagaaggcacgtatcattagaatgtattttttaagcctttcttttttacggaaggaactttcagaatgataagtcagcaaatgaggcagcattagtatgcagaaatagctacaaatatataacagaagagttttctatctaatgtcagggaaaacaccttgaatcttatgcagacctgtcatgttctgttgaagggtgtatggtcccagtggtccccaacttttttggcaccggggacctgattcatggaagacaatttttccaaggactgaggttgggggatggtttcaggatgatttaagcacattacatttatttctattattattacattgaaatatataatgaaataattctacaactcaacataatgtagaatcagtgggaaccctgaatttgttttcctgctactagatggtcccacctgagggtgatgggagacagtgacaaatcatcaggcattgaattctcataaggagcatgcagcctacatccctggcaagcacagttcacgaacagggttcgtgctcctgtgagaatctaatgccactgctaatctgatgggaggtggagcccaggtggtaatgtgagcaatggggagtggctgtaaatacagatgaagcttcactctctcacggctcgcctcctgctgtgcagccagtctgtggcccaggggttggggatccctgctacataagatccccaagaaataaagagacagctctgatggtttaggtattcacctgcccaaagacagacctggacagatggtctcttttggtttgtccaactctttaattctgttgtctctgaatggtaggaacatatcgagtgcccttactgatggccggagttatttatagtctcatcttttacgctgtcaccttga

SEQ ID NO: 7206 - DNA, 1023 bp, Homo sapiens
tttataatggaatcatctgggggttttactaaatgcagatgcagtctgcattcctccaagttcccgtgtagttgctgaggctggagcctataaagggcattttgaggtcgaggatctaaagtatcctctctgacgtccatgctcataggttatttttctttttcatctttgtttcaggtaggtaggtaggtaggtagatagatagatagacggatggataggcagatagatctctatagaaatctacatagagatctctctgttcatccatctatctatccatccatctgttcaactatagagacctatctatctatcgatctatcggtatctatccatcggtatctatccaccaattcatccatccatgtacccatccattcatctatctatgtatatatgtagatatctgtctatccatccatccatccattaattatctttcccacagctattttatgcaaacacttagacaaaattagtagtgactgtacaacccactcaaagagaaacaaaatcctcctggtggaggtgatcataagagagaaaggaagggactaaacacattgaaatgtccctgtctgaaagcattcctttcttgggcactggggatacttaaaaatacaatccactctaaaaggatctcttcctctgtgacatcctaccaaggtcgaagagtccactatgagaatttcacatttgccaaattgcgaagtcctacagacctgagcagtcctgggccttaaaaactctgtaactcctacatgaccaaatgggagtctttacggttgtgtataatactaaagaagtgttctgcatggatacgaggcatattgtagcctttagatatgaagtacattattttcactcctctgttttgtgtaactattaaataagtgggcctgagacactgcttttgcctactgtctgatcagattttttttattttctagcgtatatcaaatgtgcttgtttctgttaaattgagagtcccctcttttaaaaaagaaaaactgaagtgtt

SEQ ID NO: 7207 - DNA, 1029 bp, Homo sapiens
ataggagagagaaactccaaatcacttaatagtcatctatcaaatgttatttgataagtgtaatttatcaattttaaggccaatgagtttaaggcaatcagttattaaagaaatccattaattgggcaggatttccattgcttagaagtttttgcagattaatgtgctgcatattaatgaactaattatttcatgggaatatttatgcaagccagtgtactaatatatctatttctcaccagacaaaagtctaagttatctttctttggcaaaagactcactgttgatacacagcaattaatgttacggagttttagtgaggatttttttgagccatcttaaaagcacgtctgttggttagagaaatgggtatttggttctctgtactggtatgtgttaagaagattatgtcttactatttctgagctctttcaagatcaaatgaagacagaattgttcaaagcgtgggttgacctcccctactcagtttttggctccttttggaaatctgatgtctgcccttctaagcgtaaggtgagcattatctggtcagtttcagctgaccactatgtgactgagatgtttctgaggttaagaattgagtgcgagtcaggccctccctttgtggggttaacatgagaaagaagacaacttcaaatttaattttaatagaatcagacttcagtatcctacaagaggtattaatggagtcctgcaggagtgtaaaggggaaacactgaggaggagccagggaagacttggtggggtgagttccttcatttgggtactctaaaccgcccgtattatcctgttcattcaatacttttttttttttttttttttgagatggagtctcactgcattgcccaggctggagtgaagtggcgcgaccttggctcactgcagcctctgcctcctgcgttcaagcgattctcgtgcctcagcctcctaagtagctgggactacacacatgcaccacgatgcctggctcatttttgtattattattattatttttttaagtagagat

SEQ ID NO: 7208 - DNA, 1082 bp, Homo sapiens
gatttaaatctccctggtatggtttccattagaatggaagctctttggcaggtctgccaggaccatttatcaccttgtccctggtactcagacctcggtgctggcaaagctgggctcatgaaggctggctgcgcaggtgggtggctggctcacgcgcttggtcctggaggtgggggagaagagatggtccaccaaatggttcttgcagttctccccgtcctgccctctggacatggctgtgttgtggcacaggccgtgttgtacttgtggctgatcttgatcgattctcttctctgctccctgtgctggagctagacaccaggtgttttttttttgttttttttttttttttttgaagttccacaggtgattttgatgtgtgagccgtggttgaaagccacagctggactgcgttggaagggaaatggaggtcagcttaggccagttggttcacatggaaatcaacaaaaccagcgtggctttgaaggatgtataattctgttactctttgttggacccacacaactcagcagttgaaatttattattagtttttttttctcctgcgttttcatctcctaatttgggctccccttcatatagagcttttggaagcaagtaagaattcaagttcatcaggcacattttcactacacctggcagaacatattaaggtgttgtgttttataaaatccagccagaaactataggtggtctccagctccacacacttagcaaggcccctgctcaactccccacccaaccccagttttccagtccttcctgcgttcaccagaggcacagtcaggatcaccttagacgctgagttcagaaatggagaaggaatacagttaaaaaaaaaaatcaagatcaggtgagcagtagccagatggcttctccacacaactctctttctggatgcttctggaaattgccatccaattttggtcattcttttggctgtataataattcaaacggtgctttgtgaataagttaccttttaaaagttatgcattttagcatctataggaaggtcaaggaattattttacacctcagggtgaaataatttaattaggtat

SEQ ID NO: 7209 - DNA, 1050 bp, Homo sapiens
ctgacaaccaccattccactcttcaagtctatgagtttagctacttagatgcttcatctaagaggagtcacatggtatttgtccttctgtgcctggcttctttcacttggtcctccaggttcatgcatgctcgtgcttgtggcggaactgcttcttttctaaggctgcctggtattccactgtatgtatattaccacatgtgtttacccattcatctgtccttgatggttaagctggttccacaaaactcctagaagaaaacataggggaagaggttcaggacactggtcttggcagtaattacgcggctgccacgctaaaagcacagtcaacaaacccaaaactaaaccagattgcatcgaactaaaaagcttctgcacagcaaaggaaacagtcaacggagtgaaaaggcaacctgtggaatggggaaaaatgttggcaaactacatatccaataaggggttaatatctgagaagtttaagggatttccgcaaatcaacagtaaaaaaatgaagaacccaactaaaaaatgggctaaggacttagacatttcaactcggagtttttttttattattttgtctttttgagacagagtctcactctgtcacccaggctggagtgcagtggtgccatctcggctcactgcaacctccacctcctgggttcaagcgattctcctgcctcagcctcctgagtagctgggattacaggcatgtgccaccacgcctggctcacttttgtatttttagtagaaatggggtttcaccatattggccaggctggtcttgaactcctgacctcaaatgatccgcctgccaatcctctcccaaagtgctgggattacaggtgtgagccaccgtgcctggcctcaactcagagtgttagtaatgcagccggcagtgatgtcaagatgcggacacagggacacttggaggatgggagctttgtcccttgtccccacctgctcctcagtatctcttcatgccttcaggagagttttaaagataactgggttttcatattagaaatagcctgttttattccatt

SEQ ID NO: 7210 - DNA, 1081 bp, Homo sapiens
gcagcttgttttaccgtttagatcagaggtactcgacacagatttccaattcatgttactaacaggcgcccttaaagtgctccattccccttgcttggtactccaaaaaaccatcctggtcccattatcatgtcctttcaaagaagcataatggctagccattttggacttctagagagagctcttcggagatttttcttctagaagattaagaagtcttttaagaattacaggttcagacatacactcatcacaacagtctagattgcttcgaaatacgaaatgaagctgaaattaatttttacatttaattttataccttaaatttctttatcattgaggtgccaatgttttaatggaaaagtagaaaacagtataaaattcagtatcacctatttgtctcaaatacaagtacagtgagtattaaacaggaatgacaatagagtagcaaaaacagaactgtagatttgcccaaattaactgtttctccgaatttgaggtgtatggcaagttgaatctttgatctctcagcagttgttaattacattatcagcttaacgctttcaaacactacgggaggcatttctctgttcacatagacttaagtacacatatactaagctgtaaatagtctgccttccattagtttggtctctaagcactataaatatgtcgacttcatatcagtctatgagacccagtgacccccttttcagaggcatcggtaatacatttggcaaatgtcttgaaacatgaattgtaaattaacataggtagaaccttgataataagagtcccaaatatgtatttttaaaaatgttaacattaggaaaaaaatattataatcatcagctctatttcctgaaaaagttcagttgaggtaacctctgcaagtcacagctccacatttacatactgttctgaccctctttttggctgggctgtggtcaatagaatctgaagatatatctccagaacctgaagacacagaaaaagaaatataggagaaagagagttaagacaatttagaataaatttcaaattttctattatattagctttattatcagtgatagagggt

SEQ ID NO: 7211 - DNA, 1129 bp, Homo sapiens
cgtcagctaccgtgtccagccgaaacatgaagtttcaaaatgccaagatgtatcacagaagacactcagcagtcagccacatttatcttggagaagagttccaggacttaaatgtttgaatagtataaactagttttttaaaaagtctgcctgaagccgaagattaaatactttaaaaagttcactgggtgatcttggcatgttgacattatcttaacagtctaagcttgttaccttacaccaacctgacaggttcattagaagcacatgaatacatataaaaggcataaaagactgggtcaatgaatatgagctctgaattctaaaattcctttgcatttctaggcagtacttaccatagtatgtttacgtacctggtgagtgacaatgctcaaaaatttctgaagtattcatccacattatgctagcgaaatgtcaaattgtcctttaatattcaaatgcatgaaccatcactccttggccttttggccaagatcaagtgtagtatcaaatgcatgaaccatgaaagctatcttaaaaggaaagtaacatttaaaggaattgaatataaaccttcggttaatcttgctagcacgtagtcaatacatcagtatttttctgccccttttatagtcttactggaaatgactgtaaaacagaaacaaagctaagccatggtaaatagaacattaaatgcccaacctaatttattttgctaagagaaactgatgaactaaaagagaaacaactattgtctacattttagatatgggggaaaaaaccctgagattactaattatgtatcaccatcctcttaatgtagatcctgaaaatgatggtatcaatataatacatacagtggattcaccttttaaactggatctattacctttgatatttgtcttacactgaaaaattctgacatcttcaggaaaccaatatgatggataagctaaatgttgacttaaaatagttaaaccccttaataacatcctttagtttctattatttcactgcttaagttcagcatctgaataacaaaggtaacataagtagtacttaagatcccaaaggcccattacattctatcaataaagacaaaacaaaactacatgtttactgaaaatag

SEQ ID NO: 7212 - DNA, 1082 bp, Homo sapiens
ctcttgtcaaacgctgagtacaagactttcattttgaatttgctttaaaaaatattgtttcaattaaaattattaaggctaattagtgatctttaaatgtagtggtttgagtgatcattatttttctctaaattttaaaataccttagcattaaatcctgtgtaatttttaaagtaaacattgcatttattcatttagatcactattattgtagtaataatggttccattagccaaaagcctagttgcctagcccttacgataaagcataatttcaaacaagagagaattctgatccacagcatggaatgttttcctgtaggccacggtgagagctgcagtgtaaattatttttgctgattggtaagctgcatattctatgttgcattcagggatttatttcttcactttgtgtgcatgtatgcacatataaatacacatatatattcacatatacagacacgtccagtggattcttggatggataaaaatgtatacataaaacgtaaaccggccgggtgtggtggctcatgcctgtaatgctagtgctttaagaggccgaggcgtgtggatcacttgaggtcagcagttcgaaaccagtctgctcagtgtggcaaaaccccgtctctagtaaaaataaaaaaattagctgggcatggtggtgtgtgcctgtagccctagctactagggaggctgaggcatgagaatcacttgaacctaggaggcggaggttgcagtgagccaagatgtcaccactgcactccagtctgggtgacagagcaagactctgcctcaaaaaaaacaaacaaaacccataaacttagtggctcacatctgtaatcccagcactttgggaggccaaggcaggtggatcgcttgagtctaggagttcgagaccagcctgggtaacgtggtgaaaccccgtcactacaaaaaatacaaaaaaaaaaaaaaaaaaaaaaaaaaggtgctgagtgtggtggtgcatgcctggagtcccagatacttacgaagctgaggtgggagaattgcttgagtttgggaggtggaggttgcagtaagccaagattgtaccactgcact

SEQ ID NO: 7213 - DNA, 1049 bp, Homo sapiens
aaaaaagaaaaaaccttgtttctgttacttacgtgcaacttctaacaatgttcagatctgcccttatgatgggactacattgtttcacaaattccttggcttcagcaaaatgcttgggggtgcctccaaattccataaggtaatgacttatttgttcttctgacaattcatcatctttgggaatgcgatgccaggcctttgacttgaaacatgaacaacaacacaggcctgatatttcatataacacacttggctcataaactgaaaactgttgatctaagggaaaagtcattaaaccaaggctgggaagtagactgctttatctataggcttcaggaaagaactatgtcgttttgaaagtagggagaagaaggctcatcagtaataactacagcatcataatgccaccaaaatggctttgtagatttagaatcctgggacaggcaggatctttctccagatgaagtgggaaagaccaaagaggtaggaggaagagcagcaggagcaacagcaccaggtttaaaaagccatggtagtcctaagaacttgacatcactgtccccttttaacatttcaaggagtctttcctggttctgatccagttactttgctcaaagttggttaagttcccagctgacccacaatgaaggaaaaagcactatggtcagcattagctcagagacgccaggaatagtaccagtaggaaacagctgaagtgcatttcagggaaacagagaatgatattgaaagagatttaagggacttttcaacagcaagtattaggttggtgcaaaatcaattgtggtttttgccgttgcaagtaatggcaggctgggtgtgctggctcacacctgtaatcccagcactttgggaggctgaggtgggtggatcacctgaggtcaggagttcaagaccagcctggccaacatggtgaaaccccatctctactaaaaatacaaaattagctggctgtggtggtgctcgcctgtagtcccagctactcaggaggctgagacaggagaatctcttgaacccagtaagcagaggtt

SEQ ID NO: 7214 - DNA, 1090 bp, Homo sapiens
atgatgaaaatggggtggggaacctaatcaggttctgcaggtgcctgcagtaattcagcgtatgagatggatatgagaaattcttagaagaatctaaaatccttattaaacctgaaggttgaattcatctccaatactgagctgctaatatagagcagtagggaatcactgtagattaacccctttagtttcttgctggctgaagaaaggtctaatgactcggaagcctttgaaaaccaaagcatacatccttctggaatttccttttctgctgaaagaaatactagcagtggcatgtgtgtggtccagcctcttcagccgcacgattcaaacacatcatattctaaaagtcagcaaggccaccacagctaattacaacaacccgaacaatactggctaatttcttgtattggaagctttgccagtgatgatgaaatgaatgtcatccattgtatcccttatttttgatagctgcaaaattctccagttgttcacatgtgtatattttggtgcagtagtaagacctttcacaagcttgcgaactcttccaaacagcttccagactctacccaaccttacttaggcctgatataattctttctgtgtgctaagacagtgtgagatagtacacagtatcttttagttggagaaggcagccctctaatccttaaagcttttatttctgcaaaaacaatgaatctgcttttatcactgttcccttagtctaaagaattgactcatttgtcagcctgagggaagctttccttttaggacattctgcttctatctttctttcttttttttttttttttttttttttttgagtctcatcctgtcgcccaggctggagtgcagtgacacaatcttggctcactgcaacctccgcctctggggttcaagcgattctccagcctcagcctcccaagtagctgggattacaggtgtgcgccaccacacctggctaagttttcatatctttagtagagatggggtttcaccatgttggtcaggctggtctcgaactcctgacctcatgatccacacgcctcatcctcccaaagtgctgggattacaggcatgacattctgct

SEQ ID NO: 7215 - DNA, 1022 bp, Homo sapiens
aaactattttacttcagttataaaatgtggtttatctctgcaatcttcctgcttcgtgacttctaagcacctgcaggatgactgagcgggggctggtattcttctgcattgcctgttaccgtcttcactccactaccttttattcctcacctacatcctaacacagttattttctactgcatgtaacagctgtgttttttgaaatgattaattgtatgcaattcaatttcatttaatgatttttgtttgttggttggtttcaccatctttgcatttcctgcagaagtcctggagggtatttgggagccaaaaagaaaaagaagaaacagaagagaaaaaaggagaaaccaaattccggaggcaccaagtcagactcggcatctgattcccaggagattaaaattcagcagccttcgaaagtgagagctctgttttattttttcctctgtgtggtttctcgtgcatgagtgggtttacgcagtttagcgcgctgctgcatcagatgtgtagggactttgttgtgactgtgtgttgaatgccactagtaactggaagctcttgacagcctccttaaaatggactttggcacccaaataacgaaggggtacactgtgcttttgtgtgtgtgtggatacctgctgtgtttttcccttttctcagtgaatttgtatttagattgtcgttctagaagaaagtctcagtgtgagcttgttaggtttttttgaaattacactttaatatttgattacttttcgttcagaagatattcacattgtaatttttctgggtgtctgtctaattacctgaatagcacaacaccatctggcagcagatttcagcgggagcagccatgggtaagtctctcgttgactttgaattaaaccagtttgcagcggtcgttcttcattctaatgccaagggtgggaaatagttcctgacattctcctagtttaaaccaaaccagaagttgtccagctgggccccgtgttggcagatggtggccaagaagagggttgattgta

SEQ ID NO: 7216 - DNA, 1026 bp, Homo sapiens
agctctgcctcccaggttcacgccattctcttgcctcagcttccggagtagctgggactacagtaggcgcccgccaccacgcctggctaatttttttgtatttttagtagagacggggtttcaccatgttagccaggatggtctccatctcctgaccttgtgatccgcccgcctcggcctcccaaagtgctgggattacaggcgtgagccaccgtccccggcctaagacgtttttaagagttctttttcttagaaagattgaagatctggtattggacaaagatgaaaactttggaattcttttaacaaagaacataatctgtcttctaccatccccaatttagggggtaaaaaaaggaagttcttctttgggcactatgttgttgtatctgacttcatatgtctgttgttgaaattgagttgggaacttcccctttgtcagctgtgtggtatcagtgggaaaatgcagaaacattatgacttgcaataagtttttcttatggaaaatttagggataactcaaagctgccctttctgaaatttgatctgttatcaactgtataaatctaaatggaaaaatagattaacgacagtctttgcctgagggacctcctcaaatcaagaactactgtttgaaatgatcaagtgtctgctaagacttgcatctgaatgggtgatgtcaccctttggcccagaacaaattttttccagggttgtctaaatataggacacatactttgccatctttgtttgttagtgcaaatgtacgttatacatctatactagttaaaatcactttattttaacagaaccaagttctactccaagttcaagaaattgattgttgttttctttgaaaacatgttaatgacgttttaaaaatacgcttattcaaaaatcaaacaatagggccaggtgtggtggctcatgcctgtcatcccagtgctttgggaagccaaggtggaggatcgcttgaggccaagaattcaagatcaacctggggaacatagcaagaccctatctcga

SEQ ID NO: 7217 - DNA, 1978 bp, Homo sapiens
aggtttttcccttaaaggcaagaaaatctatggaaagagaaggctacgagtcctcgggcaatgatgactacaggggtagttacaacaccgtgctctcacagcctttatttgaaaagcaggacagagaaggtccagcctccacgggaagcaaactcaccattcaggaacatctgtaccccgcgccttcatcacctgagaaagaacagctgctggaccgcagacccactgaatgtatgatgtcgcgatcagtagatcacctcgagagacctacgtccttcccacggcccggccagttaatctgctgcagttctgtcgaccaggtcaatgacagcgtttacaggaaagtactgcctgccttggtcatcccggctcattatatgaaactccccggggaccactcctatgtcagccagcccctcgtcgtcccggctgatcagcagcttgagatagaaagactacaggctgagctgtccaatccccatgccgggatcttcccacacccgtcctcacagatccagccccagcccctgtcttcccaggccatctctcagcagcacctgcaggatgcgggcacccgggagtggagccctcagaacgcatccatgtcggagtctctctccatcccagcttccctgaacgacgcggctttggctcagatgaacagtgaggtgcagctcctgactgaaaaggccctgatggagcttgggggtgggaagccgcttccgcacccccgggcgtggttcgtctccttggatggcaggtccaacgctcacgttagacattcatacattgatctccaaagagctggaaggaacggaagtaatgatgccagtttggactctggcgtagatatgaatgaaccaaaatcagcccggaagggaaggggagatgctttgtctctgcagcagaactacccgcccgtccaagagcaccagcagaaagagcctcgagccccagacagcacggcctacacgcagctcgtgtacctggatgacgtggaacagagtggtagcgaatgtgggaccacggtctgtacccccgaggacagtgccctgcgatgcttgttggaggggtcgagtcggagaagtggtggccagctgcccagcctgcaggaggagacgaccagacggactgcggatgccccctcggagccagcagccagcccccaccagagaagatctgcccacgaggaagaggaagacgatgatgatgatgaccaaggagaagacaagaaaagcccctggcagaaacgggaggagaggcccctgatggcgtttaacattaaatgagctatcgcagacccacctgactgtggaatataaaattgccaaatatcctttctcatggaagcgcgtacccgttcgtggaggaaacggaacggcagcccagccgtgggacggacgtggacgtttactgcattcctgtttgccgtgtaaatgttagaaaggaattaaagttattactcggaataaaggatgactttggcggatgtcgcccctgcaaggaggtggctgaaagtggtgtccagatgtccttccgaggactcggcgtatccgccaccagggacattaagaaaccgcacgtgatgtcgctatgctctaacgatcacctcagttctccctcggattctgggaacagatgaaactttttgcatcgcttgagtcatttttatcacaataatcctactgtgaagctgtcgttgagaacttaggttggcacgtagcgtctcaaggtatgcgttctctcaaaggaaagctatgcatcgctgcttcgttgtctgattttgcttagattttgctttggttaggttgcgttttggggtttgcctttttttgttgtcgcttaaatgcaatttggttgtaaagatttgattcctttgtgttcatctgttccgcttctcagcggtccatctcagcgtctcccttcaggaaccgctgagtgtcctctcttaacatccaagccttttaatgaaatcgta

SEQ ID NO: 7218 - DNA, 1032 bp, Homo sapiens
ttttaagcttctttgttcatatgatagttcgggagaggaacagagattcagatagagagacagcggaagacacagaaagagacaaagagagaaatgccttctcctctcttgagttccgtgaatacaaacactttccctactcctctttgcagtcgtagacccgttgcagggagattctcagtgccagttgtctggattttgtgaaggtgctcagggtatatagtgcagtggttcagaattgggggtgactttgccccccctccccagagacatttagtgaggtctggagaaattttgggggctgctacagacatctagtgggtagaggtcaggggtgctattaaacatgctgcaatgcatgggacacccccaaacaaagaactacctggcccaaaatgtaaatggtgctgaaatggaggacccctgatctagttggaatggagacagagcattactggaacatagtgagttgccaggtttaactcatcttcacataagtaccattgagcaccaactgtatacagaacatagtgccatgcatttcacagaacgcctggtttaaggagcttcagtctataatgggaagaggaaatgggaaagcagtgcttatccaggagacactgttggacaccatccatatgtgttctgaaccaacatcacaacagccatattatgagacaggcatgattcatacccattttaaagataacctgaagcccaaatcactcaactataaggtggtagaggaaagatttaaacctggagctaagtgattccaccacccatgttctcatgatgctcttgattaggcagatgaacaaatatacaaataattatgatacaggacatagtaagagcagtgctacaagagagatgcaaatagagcttagagcttagggtgggattaacagactacatagaagaggtggcttttgacatgcattttgggtgagctgtaggatgaggggaagaagtttcagacatggagatgcatgaatgtatatacacagagaggccaggcgtggtggttca

SEQ ID NO: 7219 - DNA, 1109 bp, Homo sapiens
tttgtttgagacagagtctctgttgcccaggctggagtgcagtggcgtgatcttggctcactgcaatatccgcctcccaggtccaagtgattttcatgcatcagcctccccagtagctgggattacaggcaagcaccaccacacctggctgatttttgtatttttagtagagatggggtttcactatgttggccaggcttgtctcaaactcctgacctcaggtgatgcatccacctcggcctcccaaagtgttgggattacaggcaccatgcctggcccaactttctttctttctatctcttggtcccttcttcttgggaggctccagtgcctgtgctgggcccacatttcttctttctggtcctaaacatctcatctaggcctctggcttccaatgctctaattactcctgattccgtctctccagcccagaccctccccactgaaatggggccttggatgacgcctctgcttggaggcctgtcaggcacctccaactcagtatggacacatagagcttgatatttttggccttcccgtgatcaatggtataaacgtctacctaagttgataccactataaactcaggccaaaactcgaggaattgtccttgattcttctctcctcgaatctcattcttttgatgaggttggtgtctccatctgcattgccacctcacaaatccaggataccaccatgtcccctcaggcactgcagtaggtttttaacgggttatcccatttcactcttgccaaaccagtaatcaagtgtttacaaagtgagggtgaccaaatcaccttgcttggatcttcaatggttttcccattgtacttggaataaaatccaaccccttccactcagggctggacaatcccctggccctgggcctctggtggcttctgtggttgtccaggtcctccctggtaaggaagggacgaggctacagcatttatacacacagggcttcccacacagccggctgcctgcaccccttcttctgccagacgtggcttttaggcccacgtgctcactgtcggcctcttgtcttctccttcacagccaccttcaacatccactgtccccacctttccctttactaagatgctgaa

SEQ ID NO: 7220 - DNA, 1049 bp, Homo sapiens
gcttgcaaataccatggcccactgtgcccttactgtggtagcccaaacaccattgaaagagtattgttgtctgggcacggtggggcacacctgtaacctcagcactctgggagcctgaggcgggcagatcgcttgagcctcaggagtttgaaaccagcctttgcaacatggcaaaaccccatctctacaaaaattagctcagtgtggtggcacacacctgtagtcccagctactcaggaggctgaggtgggaggatcagttgagcccaggagatcgagactgcagtgagccatcatcacgcacctgtactccagcctgtgcaacagagtgagactgtttcaaaacacacacacacacacacacacgaagtattgcattggttgcccaatgtttaaaagtatagaatttttctcttgatcatttgttgatttgagcaggcagtagtaaagaagaaagcagtttgggtcaggctgtggttttgaagaaaatgggaaattgtgtgaagtaaaaagtagacctgtaaggagaaaatgtctctggtaaaaactgcatattttgagtgtcaaccttgatgtccttacagagccctccttccacttcccatcacagtcataccagagttgctatgaatgtttcccattgacagtagctgttctttgtgctttctctacctccagaggtgacgttaaaggtgcacatcagcgacgccagcacccaccagcccgtagcagatgcgctcatcgagatcttcaccaaccaggcctccatagcctctggcacctcggggactgatggcgtcgcctttatcaagttccagtataagctgggcagtcagttgattgtcaccgcctcgaagcatgcctacgtgccaaactctgccccatggaagccaatccggttacctggtaaggcgttcctcatctttctttaacacagagggcattggctggtgggaggatcgcataaggccaggagtctgaaaccagcttgggcaacatagtgagactgcatctctacaaaaaaatttaaaattagccaggcatcatagt

SEQ ID NO: 7221 - DNA, 1047 bp, Homo sapiens
agtcatatatgcatgcatgtgtgtgaaaacatgctgtaggccgggtgcggtggctcacacctgtaatcccagcgctttgggaggccaaggcagtggatcacttgaggtcaggagtttgagaccagcctggccaacatagtgaaaccctgtttctaccaaaaatacaaaaattagccaggcgtggtggcgtgcgcctgtaatcccagctacttgggagactgaggcaggagaattgcttgaacccaggaggcagaggttgcagtgagccgagatcatgccactacactccagcctgggcaatgcagtgaggactccatctcaaaaaaaaaataaaataaaaaattagccaggtgtggtggcacatgactttaatcccagctactcgggaggctgaggcaggagaattgctcaaacctgggaggtggaggttacagtgagccaagattgtgccactgcactccagcctgggtgacagagtgaggctccatctcaaaaaaaaaaaaaaaaaaaaaagaagaagaagaaaaaaatatgcttcagaggcttcaaaactgcctgggtgttcaggagtgctttttaggccatagtagaaaaggtgagtaagaggctgcctgtgggtaacatttacgtttgtgtcagaaataaactgaacagctttcaattggttgcacaacacttattattagggcaatcttattaataaaggccgaaagaagttctgtgctaatctatgaaatctgagtatctgtcatctctctgcccttgactgtcacatctgctttttctcttctacttgcatttacctattccatgactcccaaagaaatgcatttgtttacctttaaaaatatgagaggatcatgattttgacactgtggtaaaataattcagaaaaagtcttggtctgttgcccaggctggggtgcagtggtgcaatcttggctcactgcaacctccacctgccgggttcaggcgattctcctgcttcttccctagtagctgggattacaggcgtgcaccaccatgccaggctaatttttgtattttt

SEQ ID NO: 7222 - DNA, 1031 bp, Homo sapiens
ctatcccccgtccagacctccctcctgaccaccggcctgtgcagtggctgttgtctggatatcctcactgatgacatatatcctcactccccggccaccctgcctttatacaggtcactcttctagggtgtttttgcttaatggagtcattttcactcttcctaaagcatcaggtgttgtcccctttgggtgtcatcccctctcgttctgccatcccaggtctgtgtgcttagctttgctatttaatcagaaaatatttatggaacggcacagtgatccaagccctgttctaggcactgagggtccggacacttcccgccccagattgcaattgctggtgcacatcttcatgtctgtctctccttagggccagaactgccactcactcatctggtcctgcgcagtgttttctgaaaaagtcaatgtgatcgtaccaatttccttcgttctcttctctccttaagttctactgtgtgtcttcccctcacctcccacagaagcaaaaaataggaagtggaacttcatagttacaagattaaacagatcaaatttcatcatcatttctggcttctacagatagctgaagttttgtgcgtgtatgacgcaaggtgtgagttgaatgcttcctttgttccatcgatttgctcagctgtgtttcctttctgctgtgtcctttgttcagggctgaagaactccgctctgaaaagtaactgtgagacgaatattctgcctattcttaggtggcccctatgcctatgaatatcaaagcattttgttgggaaacaaacatgagattcgcaaatgtttttatccagtaatactgtcatccttttccactgagacaaagtaacaaagtctgaaacacaggacaacatagctagacaatttattttggggctgttatccctagggttgccagttataatacaggacaccaattgtatttgcatttcagataagcaacaaataaaattttaatataaagatattccaaattttgcatgagacatatttacacaaaattatttgtt

SEQ ID NO: 7223 - DNA, 1044 bp, Homo sapiens
tgattggtttttagatgcctcctttagaacagggtttttcacttctcaccctcttctctttgttacctaccatctgctggacatgtttttgaatgtgcgataaggcatatggctaaggaatagaaaagttaatgcatgcaactggtgtaagtggaagacacagtggctgcagtctggtcaagtttgtagcccatctgccggagcacagagcgcccttttaaaatgcggctttgctatccaggccctgcatctaccgattgtccaaatgttgctggtagcaaaattaagtgtctcctccctcagtgacttcatgtgcacacagcgcatatgctcagtgcatagttttatggatacgtttgcttccctttactctaaacctaaagattacatggtgaaagtaaactccaagagtgagccttttagcccattcacctcttggcagagcgaaccattcaagtggcttttaacacacactttgtattctctttagaattgattcttgtgctgtaacttgtgtttttagttggatttgaaatagacaaaagactttcgttgtgtactttccccacaactttttgaaacaattttcttcacctacttgaacctcatttgcctttatttaaaacttaaaatcactgcctgtactgttagaatgtttctttctgcgtcttgatggaaatctgttagatgccgcattaaatattaaacttaggcattctaaatcaatacatgttaaagtgcttcataaatgccaagtaaacatgagggaggagctactagcttttggacccttggtattttttatgtgcactcattagacaacgttttattaattgggtgaggcccattcctgtttcacattcttatttctgaactttgacttcttagagtccatgagagaatggactaacaatacttgaagttagatacttgtcaaccctttccttctgttttttaatttttattttaatttaattagtatatttattttgagtcagggtcctgttctgttgcccaggctggagtgcagtggcgtgatttcgg

SEQ ID NO: 7224 - DNA, 1059 bp, Homo sapiens
tctcctttgacattagaaggtcagtcccaactcactgagttcttcaaagcatcttaatgttcacttgctgtagtatgacgtagttttaaaattcatgtgttctctgctttcctggatcatgtacacgatgaagacaaatgctgcatctgatttcactttgcatttcccacagtgggttgtaggttgttatgcatacagttggtgctcagatggtgctgagtaggtaagcatcaaccatagctaatacctacaccataacgcaacctttagtgatcatcattggcttgcattttaagaagaaaagttcaatgtttaccttccccaaaagctaatttgtaagaatcttgcttttatgtagaatctgttgtttgaatcattctttgaacaagcattgcacatacatattatgcaccaacaggatttggcaattactttggtaaaactgcttagagacctcaaacagacggaaatcatatactgtagtagtccaactagattgctagaactaaatgacacctttttgattaaatgagtctttatgtcatctgatgaaactagcatctgcagaatttcttggcattactttgctttttatatattcaagataaaattggaggcttggcttcagactctcttcccgtagctgcttcgaattggcaaagtgatttccaatgccacagtcagttgtcacggtaagggttggctttgtttatcatgaatttgaactagctctagactatgactatttttattaagtgtttcctctcagttgctctggagcatttatagtatcgaatctattttctgggaatttttcaaaattgttgttcaaaagtattgacccattttgattttcttcacctcttttgcaaaactgtaatgaggctgggttcaatagagagagctgtcctggaggagcagtaagctgtgcagatgtactctttagggatgtgtttttgaagcccagcactcttatttatgtgccaaaaggaaggtcagagctaggttaagaacttcatgctcagacatcttattggatgatgtttattttgtcgctgg

SEQ ID NO: 7225 - DNA, 1014 bp, Homo sapiens
ctgttaaaatgacagtaatatacagcagctataaagcaaagtatggatgtcattaagtcacagaaatatgttttgaagttaatcaggagctaaaattataagctgcatagcaaggtcctgttagaaaggaaacagacaaaaggagaatgctggcaaagtgagatggagtctgagccgccaggcatccgagcctgattgaggccatggaggtgggtcatggcaccttgcccaagcacttctgctctaatgacatgagtacatgaagttctttgtgaaaaatagggccgattgtatttaacttaataacttgaattatattctttgtgtataacttttcagagaaggcagttttgctttggggactgaaaagcccgagttgtagtttcaatgtcaatttatttcatcaacactagaaactaatatattaactaaaataaagatgccaaaaaatgtatttcacgttacaatgtatctttagcactttcttaggaatgagtagattcatgacacaagattatctgatctagtaatatattctattcctatatttaatgtgttttagaggcaactaccatttaaggataataaagttgtttcttttggctccttaaatagcttatggcttttattttggaagaacataattacactcatgtgtatcagccagtgaatgtgtaaaaataattttatacactttggaagaagacagtcgtctgtatctgtttcttttaaattatacagcatcagaatttctcttggtacaaaaaagaaattaaccaccaaggagtgccttaatgtccacagtgagcccttggtaatgagttagggtttttgttgatatgtccaaaatactttttaagtatgtttcattgtaaattaatcagaataaaatttttcttgctattcacctgccagtatatatttctgtgatcactgccactgcatatacagtatctggttagtttgatctttcaacgtctcttttacttttctttctgtcctgacatccttttt

SEQ ID NO: 7226 - DNA, 1090 bp, Homo sapiens
gaggtctccacctcccatcccctgtctctaaagtggctacattctcacagcctatctttctgtaggagctgaagctccagttgccagcagctgtcttcccttaattccagttggaaaaaattctaaggagggccatgtgcctgtttgtatccatcggatatggccaggaagacaagggggatctatccaggcagactcagccaggggccctgagggaaatcactgggagccaggcctgtaatggccttgaacgccaggttaagagggttgaacgtgatctttagctaattgaaaagcaaggttaagatagtgggaataacatgacccatttttctacaagcttactctgttagtgatatataggatatcctttctttattgaatattactgaaatcgccttaagcattataagtatgttttcatttctcacagtgctcttttcactaattaatggttgacaatattcaaatattggatattttttggaaaagaaaccactaattaaacatcgtgggccaaattggaagtattggtacatactggaagtgtatttagtctgagtaaaagtgatgctactgcttttctcaattcattgagaggaacaaattatttacatagaaaaggagatatactttagcaaatgttttagaagcttgtcttttgaaaaaagttatagtgatacatgcacataattaaaaaaaaaataagttagttctgaagagcttataatggaaatcaaccttccctactttccagcatcttcttcagaggcaacactttcaacttcagggctttctggtagttacaactccataaacctaagttccttcttttgtcaaatgagtccccagtcaaaggataaggatttgagaaacatgcattttactttcagttgattagaaattgcctgatataaatataatttaaagtgttaatagtcctttatttataatagggctccagtggtccagaatcttttactgtctaccactacaatggattgaagcagtcaaattataatgaaaaggtatgataattcacgtagtcgtcggtgttcaactgggttgatgaaataattatgtgagtatg

SEQ ID NO: 7227 - DNA, 1022 bp, Homo sapiens
ttatcaaaccatcctttgctggcattaagttctccacctttagctcctttacttttgttttgctttagcttgtataatgactgcactttttcttaaatcatattagaatctaaaggtgtgcctttcctatagcaaccctgcacttacatacaagttgcattttttgtacaaggaggtattttgcaaaaagcggaaggtttgtatggctgcagcaatggcttcaggaatttccttttctttctttacgatatttatgctggattcatttatcttgacatagtgagcaaccacagcagcagacctcaatccatggtgcatatcaagcaattccactttttcttacgtcctgactttggtttcttgggagaacttccggcatcactagtggcacttcatatgggttccatggttttttttcaagagttacagtattgcactaaacatgatgaaaagtatgtgagaactgcttaagatcactttttactgtgatgtggaactcactggagtgatgggctgcacatgcggagatgattagcgccatacttgtgctctgagcagatacaacacaagctcaccacaatagcatcaggagatggtgatgaaattattccagtagtacagtatgcactaaagttaattttatgctgttgtgatctgatactgcatctttacattcgtttacatctcttgactgtgagtggtgccaggtacagtccgtatgcccctgttttgatacattttaactttttataatagatttgtggcatttcatggtagtagaaaaaatagactagtatctacatatattttatgcatgcatggcatacttaattttttcttaacttttgaaaatatctctaggctgcacagtttgcgagtttttcaaattgtcacaaatttccaagaaaaatttcttccaagaaaaatttccaatatatttattgagaaaaaattcacatataagtggacccatgcagttcatatccatgttgtttgaggatcaactgtactcgcttcttagt

SEQ ID NO: 7228 - DNA, 1067 bp, Homo sapiens
tataaatgttcttgcctccttaagccaagtgaacatcagttacccttatgtactctttgccttatgcagctgtatttgtatattctggtttttgtgatttccctgaattttctttttcttttacttattacttctcagtcatcagtgatgtcagccttcctggaagaagtctctcttttccactgaatttttctttttctcttacaatagtatccaaataattgtctaaagataaaatactgatggaagggcctagaagtattctgttaggaatgaagcctatgagttttaattaagagtcagtatcattaagcccacacccctagctatctgttcagaattgatagaaaaaaatcatagccagtagagttgatagcagagtacaaaaaaaggtcttgtatggttaatagatgaccgccactaagtcttactaagtttaatttgggggattattgtgtgtgtttgcacatgctttgcttatgttatcctctgcccagaatacgcttatcaaagtcttgctcagcattcctggtccaaccttccaccattcgtattgtgtccgctgattctcctactctcttgttgctcctgttctttcttccaacttccttccttcttgtggcactaactgatttcccacactacctactgtcacacacattcagtattgtggtaagtactgttggaacgtaaggattaataatacatggtaatagtttactgtgagtgtttactgaatgttgtctgtatgttaggcagtatgctaattaatcatctcaggagcattcctcatttaatcctcaaaccaaccctgtgagctgcgtgccgttttcatctgcatgttacagtctggggccagtgagaaaaatgacatctccaaagttagatactagtgagtaccaaggcaggatttaaactccagtcttctgacttctgagctatgcatttaactacttccctcccttaagaaaacaactcattctgctagagtagagtagaccctggaagagggaagaagtaggtgtagaaaagattatacttgaatgaaaggacatggtaactttgag

SEQ ID NO: 7229 - DNA, 1048 bp, Homo sapiens
taagtttcgtgaatgtaattatgtcttactgtatttacttttattgtgttggcaaaagtccagataggggttatagagcaagatacataattgccttttctcaagcacggaaagctttaaaattaaatgctaaaagtacagagttactgatacattgcatttagtttgaaagcttttgctatttatttccttcctgaagtagagagaggaagttaaaaagcacaatgtgaactacaaaaactgacaattactaattcctgagtgaggatttcattttataaattaccataaaagaaaattaattctgacttacacacaaaaatgtattttcaaaccaatttttaatcatgtttgtctgcaaccttattctttaaggaaaactaattatatgaaactaaaagtgttgaatataaaagatgacaatattttaaatcttaaattttataattgatgtttaagaaatgattttgttgtcagaacagtaggagagatttcacagaaggtataatacaaggaacagtgtcgaatgagctgtgagtctgaggacattatctgaaaaagttagtgatgttgagggagttcccaagagtgaaataggcccttctttttatgagtacactcttcctacctgtcctgatacttttgtggttcccatagcactcgcccattgtgctgtcgcatgtgtcaaacagcacacagtttctaattcccatactgttttctgcgtgtcccatggcagccagtgaactttgtctagggcaggggctgtctctcgcccacctttttattcatagatccctgtcatgtgcaataacgtgttgaattagagacatggagttaagagaaaaacacaaaaactcctgccatgtgggtgtagaactcttgaattttatactaattgttactgttttgagacttacctgtgtagtctcaggatctagtatatagtctggcacactaggggtggggggaattattagttgaatgaataaaacttttgtacaaatttcccgcatttgggttccagtgacgtttatatcccctaaga

SEQ ID NO: 7230 - DNA, 1089 bp, Homo sapiens
ggctggtctgagaaataaagggacagagtacaaaagagagaagttttaaagctgggtgtcggggggagacatcacatgtcagcaggttccatgatgccccctgagccgcaaaaccagcaagtttttattagctgagatcacatgctttaagggcaataaaatatcacaaggcaaatgggggcagagtgagatcacaggaccagggcaaaattagaattgctgatgaagtttcatgttgtactgggccggcattgtcattgataacatcttatcaggagacagggtttgagagcagacaaccggtctgactaaaatttactaggcaggaatttcctaatcctaataagcctgggggcgctacaggagaccagggcttatttcgtcccttatctacaactgtataagacactccccgagcggccattttagagacctcccccctgagaatgcattctctttctcagggctgttccttgctgagaaaaagaattcagcaatatttcttctatttgcttttgcaagaagagaaatatgactctgttctgcccagctcccagacagtcagacctaatgatcatctcccttgttccctgaacactgcagccatcctgttgcttttgggtgcccaaatttcatattgttcaaacacacatgctctacaagcaatttatgcagataacacaatcatcacaggatcctgaggcgacatacatgctcagcttacgaagatgacgggattaagagattaaagacaggcataggaaattataagagtattgattggggaagtgataaatgtccatgaaatcttcacagtttatgttcagagattgcagtaaagacaggcgtaagaaattataaaagtattaatttggggaactgataaatgtccatgaaatcttcacgatttatattcttctgtcacagcttcagcaggtccctccattcagggtccctaacttcccgcaacattcactcatgggttgaaaaccagattagtgagggttaagtaaattgtgtggtaagaaaattgaaacagggcatatatagatgactagctggactttgggaggacaagagtgatggagt

SEQ ID NO: 7231 - DNA, 1046 bp, Homo sapiens
agaggaatgaacttcccttcttaagccctgttataagcgcaccgaatacctttcacaggggtttaggtgtgcttgtaaacatcatgacttaatcacctcctgaaggccccccgctcaagatgctttcgttgataattaagtttgaacttgaattgtagagggaacagaagcattcagaacctaacacttcagagtatctgttcctttctcatttaatagataattcgtctaggtataaaaatctcgagtcaccttttcttttactggaatcttgtagatactgtctttgggcattgaatttccttaatgtgatactgggggctaacttgagttgcccacttaatgatgacttgctttctctgctaggatgtacataggattatttatttttatttattcatattctctctctcttctcccatctctactatatttattaaagcatcgtacatgtacacaaaagcgcatataacataagcttatagttcagcgaatgatcaacatgccaaaactcacgacaactattcaggtgaagaaatagaacaccactggagtttcagagtttcctctgatctcctttcagtcattaggcaggccttcctctctgctcaaaggtagctacttcttcagcttctaatatcattgacttttgctgttttgggattctacatgaacggaaccattcagtatgctttctggcttctttcactcaacattgcttcttgagattgatcccgattgttgcatagagcagtatttcattcattttccttgctcccatgatatgtgaattatctgtgtgtcagccctagttctcgtttgagctacttactggcttaagcaacagccttgtcacttttgagtcattccccactttgggactggcagtgaaatagaggctgtcagtgggttgatgagtgagcactatgtcccctccctcgttcctgtcacctccttctcggacagtaaagtcactgttcgtgattcccccttctgctcctcttctgccacgtgctgttagcagggtttctctggggatacccact

SEQ ID NO: 7232 - DNA, 1046 bp, Homo sapiens
gtatatgtacgtaacaaacctgcaagttctgcataggtatcctggaacttaaaataatttttttttaaaaagtacatttcttctgagttagtctgtattgtccccatttttattgttaatttatgttttccatttttcccccctttgattgattggtccaaatagctgattgtagtttcactgagttattttattctttgttttgtatttcaatgatttgcttttcttcttctgagtacagctggctgtgatttttctagcttgtttaggtgaaagcttacgtgattgattttcagtttttcttctttttttttgagacagagtcttgctctttcacacaggccagagtccagtggcgctatctcggctcactgcatgctccgcctcctgggttcacgtcattctcctgcctcagcctcctgagtagctgggactacaggtggctgccaccgggcccagctaattttttgtattttttttttagtagagacggagtttcactctgttagccaggatggtctcgatctgctgacatcatgatccgcctgttttggcctcccaaagtgctgggattacaggcgtgagccaccgtgcccggcctcttcttttttagtgtaagcatttcaagttagaagtttttctccgttgttttagcagcatctcacacattctgtaatttcattatcattcagtttcaaatattttcttttgtaagacctggggcctgttatttagaaattgagaatttgtttgttttcaagtattcggagatatccgaaacattttgttactgatttctaatttaaattatgtcctgatcaaaattcatagtctatataattctagtccttcacaatttgttgatttgttttatgggcctgcgtattctctagttggtgaattttacatgcacacttaaaagttttatgtgccccatcagtgttccataaatgttaggttacattagttgatatgttataactcccagtaatattgtttttttttttccttaagttagttttcttaaataactttagagaggagga

SEQ ID NO: 7233 - DNA, 1052 bp, Homo sapiens
ctgccaatgaattaaaagttttctgagccaaaagagggttcccagaccagcaacatcggcatcccctgggaagttgttggaaattcagagtctcaggctttaccctaaacctgctaaatcagaaactccgggatacccctccatctgtgttttagcaagccatctggtgattctgacgtctctgtggtttgagacccactgccatcgggtagggctgtgtaataaaacattttgcggtgatggaaacggtcagtatccctgccatgcagtagtggagccactggtcaccacatgtggctgtcaagctcttgaaatggggctgctgtgaccaacaatagcattcatcattttatttaattttgattaatctagatttaaattcaaacagctgcatataactagtggctgtccaacagaaagcccagcccagaacataccctgctaattattattgtataaactcctaaaatgctttgagttgttggttgtggaattattaattttagatcatagaacagaatcttccttactctattcaacagaattgaaactgcgattgttacaacaggtgattttgattcttcctatggaggggagacagtttgtgggctgctgaccagttgggggaagcctattcttgagctgattgattgttgattttgtgaatgtgcatcagtggtgcagtaccggctggcacatgcctgttgcaggtattaccgatggccgtagatacatgtccttttaggagtaaagctgttgctcaggaaggggctgtgtcagtatttcacgcagatggactttggtttctccagcctgtccagcaaagtggaggtgcttctggccaaagagaagttaatgaacccttcaggcactttgggctgcttgtggaaccttccagaaactgctgggggagatgggagtgctgaattgccaagtctgggctggcacgtcagatggacaaaactcttgaatcacattcagttcttcagtttaggaggacctgaaggaaagaaggtcatgccgggtgtgttaggcggaactgctgctgcaaa

SEQ ID NO: 7234 - DNA, 1098 bp, Homo sapiens
gtgatagagatggtggggggaagcctatttgcttgaagaatgaatgaatggccgggagtgatggctcatacctgtaattccagcactttgggaggccgagacaggagaattgtttgagctcaggagtttgacaccagcctggaccccatctctgcaaaaaaattaaaaaattagcctggccaagtggcacatacctgtattcccagtaactcaggaggttgaggtgggaggatggcttgagcatgggaggtcgaggctgcggtgagctgtgatcacaccactgtactccagcctgggtgacagcatgaccctgtttcaaaaaaaaaaaaaattgtgaatgatgaggccattaactgagtaaagggagtagatgatagtgagtttgacttgtaaacttttgggtttaaatattatatagtttgacataagagttcagagcttgggataggatctgagctagacatatacaattgaggataatttctgtatattgggtggttattaaagttgtgggagtaggtatgatcacttttaggagtattttaccaagagaaaggggccaagccaactcctggggaaacactgccatgtaacgggtggatgaaagatcagaggagaggaggctgaggaggtgcgctgagtgcttggtggagaaccagaagagagtggtagcattcaaaccacgagggaagctgaatttcaagggtgggtgatcaaaggtatcaaatcccatgcaggatgccaacgagcgtgaggattgcaacaaagcccctggattccgtctttaataacctgcaaggagcaggattgtggcgggtggtggtggaagactcaaggtcacagtggttaggaggtgcaggagcttctgagcttttccccagagttacggaaatgagtggcataaggagaaaatgggcagtaaccaatgggttaaccaaaatcagtggagagttggttttttaaaaaaaatggagaaatataagttgtgtgaagagggcaggtggaaaaagagcagctgaatgtgagagccaggcgaacagtagagaaaatcatgttttcaggacagagacaccaagaagcgccagattggttctatga

SEQ ID NO: 7235 - DNA, 1087 bp, Homo sapiens
catggaattaggcttatctgatatgtgaaataatcaaagatgaaaggaagacacctaacgtatagctaatgattataactgtgaaattattcatctaaaaatagattggaataaaataatgatagcagttatgttagagtaatagcattttaatttttcttgtttatatttttcaattgaatgtgatcttttttgttgtttttgttttcatcaatgtggcataatattagttttatcatttaaaatgttctttctttcaaaacactcagtttcaagtctttactgtagagtctgttcattgtaagcttgtaagttgctacctcatttgcatcttgatgctatgtaatataatcccctcccctgctgacttttttcctccagagcagaagctacatcttgcccatttgtgtatcctcagtacctttctcagatgctgacagatagtgggtacctaataaataattgtccaattaactgacttagatatgagtatgctgagtatggtaatagaattgtaggttctttcatggcttgggggattgtttgaataattctgtcagccaaaaagaaaagaagtgctgggcatggtgcctcacacctgtaatcccagcactttgggaggtcgaagtgaacggaccatgaggtcaggagttcaagaccagcctggccatgataaaaccctatctctactaaaggtacaaaaaaaaaaaaaaaatagctggatgtggtggcatgtgcctgtaatctcagctattcaggaggctgaggcaggagactcactggaacctgggaggcggaggttgcagtgagccgaggtcgtgccattgcatcattccagcctgggtgacagggcaagactctgtctcaaaaaaaaaaaaaaaaaaaaaaaaaagcacactagatgttactggaagaatatttaatgccaaaattgtgtataactcctagggtattgtttatgtctcttctaaacatagtctaggaattgttgacaaagcttgatttagcagtacttccgtaacaaatatggtccaagtcactataaagaaagcatacaaaggtgttgttttttatagatcttagaata

SEQ ID NO: 7236 - DNA, 1076 bp, Homo sapiens
ctattctagaatcttcatgctgggacatttttaacttggatatcttgctattcaagttgtatcggatttgcatcaaatttagcatgcttgcaacctaagcacactccattctatagtcagttccactcttgactttaatatttatggtacggttagtctccacatcttccaagttcaagcttcataaccaaagatcatcttcaccttccttctcactctgcattccattggtcagcttctgttaaaatggccttcctaaggcaggcctctgaacgatcatttatttttaggaaaacttataaaaagtcactgagatttaaaaacacccacacatatatttgcaatcatatttgtgtgcttggttaaacatgtcaacatttaacagatttgagccttctaaatttaatccagcatgaatgtcgtttttactaaaatatttgctattttactcacttagctggttccttacacaagtccagttaaatttcacatgtgaaaaaaatgactgaaaacactgaatggaatgtgatactccttgtgtagtagaaatgagttgactttcatatttaagagctgatcctatgaatgagtagacaataagctgaatagctgttacgatctgagttttaaaaatggaaaatgtttcatgttttagagaatgtaaacttccacaagggcagagattgttaatacgttgtccccccagtgacttaaaacagtactggcacatagtaagcactcaataaatagttgttgaatgagtgaatgtaggaaccatactggaatcaatattgaagctacatagaaagcaccacactgtggagttcaaacaatgtctttaagttgttctcttgaaaactatttaatttgtctgttactgccacttcttccatgcccagaggaacagccaaagttactcaagtctggaacacatgatttaaaaaataattctgggataggcttttggcttttggaaagtagcgcaaataaaactttttaaaatactgtattctgacttctggtcttgacaagagagtgtagatttatttctccctgctcctccctgaaaagtgtaa

SEQ ID NO: 7237 - DNA, 1035 bp, Homo sapiens
ctctggtagaatttggctgtgaatctgtctggtcctggacttttttttggttggtaagctattaattattgcctcaatttcaaagcctgttgttggtctattcagagattcaacttcttcctggtttagtcttgggagggtgtatgtgtcgaggaatttatccatttcttctagattttctagtttatttgtgtagaggtgtttatagtattctgtgatggtagtttgtatttctgtggggtcggtggtgatatcccctttatcattttttattgcatctatttgattcttctctcttctttattagtcttgctagcggtctatcaattttgttgatcttttcaaaaaaccagctcctggattcattgattttttgaagggttttttgtgtctctatttccttcagttctactctgatcttagttatttcttgccttctcctagcttttgaatgtgtttgctcttgcttctctagttcttttaattgtgatgttagggtgtaaattttagatctttcctgttttctcttgtgggcttttagtgctataaatttccctctatacacatgcttttgaaccctggtcctctgttcctgctgctcaggctcaattcaagtcttcatttctgcttgatcctctattcctgctgctcgggctcaattcaagtcttcatttctgccttatctttggtcatgttgtgaatctttcttgtaggatctatttgctagcccaagtactgcctgtttacatgacttgttttgaccctggttactctaaccaagttgcacctcctgcttatagaatctagacttcagcttaagtctctcctatttactttggacaaaattgtgttagttttacctactgctttgattggcttagattggccaccagtgccattagcttcgggttgctactccattcagcagttcgttcctctgaactctggttacatcaccaaggggaaagcaaaaagtgtagtcagccagcacatgtgtgtgtgttttcctaaacatagtgattttaagagagcagt

SEQ ID NO: 7238 - DNA, 1068 bp, Homo sapiens
aagaatgcaaatgttccaagagcctgactgctggcctggttgcctgagatcttgactacacacacacacacacacacacacacacacatctaaatccagtaacataccaaatggtgaaactttaaaagtattctcattaaaataataaaaagacaaggatgtccaccattagcactatgacttgatatagttgtggatctgttagctaatgtacttacacagagaaatatcatataaatagaaatatttaaaaatgtgattgagtatgccggaaaataccaacaagttaagcaaaaataatatatgaggaacaattagtgctttaataaggacgctggctacaaaaatatgataacctacagcatacaatatacaatatgtctactagaagacataataggagaaagttcctatttttagtaacaacacaagaatctgtataacaagaaatctatataactcacatgggagttaaagagatttgaaaaatgatgaaagcgtactgtggtcttggataggatggctgaatattgtaaaaatattggctctgtttcactataacttcaataaaatagtcaaaagttgttgttttctaatctaccaagttcttcctaaagttcaaatgaaaattcagtttaagaatagccagaaaactttctgagaaaataggcaataaggcaggcagagggacaaatacacctgccagtcaatacaggatgaacagtgttagcccactgacttgatctaatattatctgaaagcaaaagtattttccttaacttgtatagtcatataaggtaaaaaatcaatttcctttggctttaaaatatttagtcattaaaaataacctgtgtatttccatgactactttatttaatccaaatacactttcattgacctagaataccaggttaaataagttgtgaagggttcaatttagtgatgaatttttgcctaactgccttatcagttggcctacactattaaaaaaatcactattttcaagaatctgttaaagctgtaatttttttagtggctagctgtattagagacattgactctgtttac

SEQ ID NO: 7239 - DNA, 1029 bp, Homo sapiens
acttcttttgagaagtatctgttcatgtcctttgcctagtttttaagtggggttgtttgttttttgcttgttcagttgtttaagtttcttttagattctggatactagacctttcccagatgcatagtttgcaaatattttctcccattctgtgagttgtctgtttactctgttgatagtttctttagctgtgccgaaggtctgtagtttaattaggtcccacttgtcaatttttgtttttgttgcaatcgtttatgaagacttagtcataaattcttttccaaggccaatgtccagagtggtgtttcctaggttttcttctagaattcttattgtttgaggtcttacgttcaagtctttaatccatcttgagttaatttttgtatatggtgaaaggtaggggtctagtttcattctcctgcatatggctagccagctatcctagcaccgtttattaaatagtgagtcctttccccattttttttgtctactttgttgaagatcagatgactgtaggtgtgtgcctttatttctgggttatctattctgtttcgtttgtctgatatgtctgttttgtaccagtaccatgctgtcttggttaccgtagtcttatagtatagtttgaagtccattaatgtgatacctctggccttgttctttttgcttaggattgctttggctattcaggcttttatatggttccatatgagttttagaatagtttgttccaattttatgaaaaaatgatgctagtagtttgacaggaatagcactgaatctgtagattgcttcaggcagtactaccattttaacaacattgattttttgaatccataagcatgggatgtttttccatttgtttgtcacctgtatgatgtctcttagcagtattttgtcattctccttgcagagatctttcacctccttggttagatgtattcctaggtatttttatatgttttttgtggctgttataaagaagatcacattcttgatttgactctcagtttgaacattatttgtgtatag

SEQ ID NO: 7240 - DNA, 1027 bp, Homo sapiens
cctgagctggttttcctgcaactatatggtcccatctggggatgatgggagacaatgacggatcatcaggcgttatgttctcgtaaagagcgcacaacctggatccctggtatgcacagttcacagtggggttcacgctcctacaagaatctaatacccaccgaccactatcagaccatagcccagggtctacagcatttctaagcacttctaatctcttcccttaaaggaataaagtagatggtcttttattgtcatttagctgctttgagtgtgttagtcttgttcccatagctagtataaaatcatgaacatcacgattctctaaaacagtgtttaaaacatcagaagggaaagaaaaaccttaaagacactttctgggaggtatctttgaacatttgagggggaaaacatagctaacaattccctgtagactataagtgattttttaacttcatcaatgtctaattcacagtctatgacagaggaaagagaaggtggtaagtatgtagggggaacacaagagtttaattaacaaatggaggagaaatctagtgcaaaaataagttccagctgatgttggacaaagaattaaagccagattttcagtattagttcacttgatcaaaaaacagtaacaaccaaaaacaaacaaaaaacccatcaatccagttataaaaacctcatgtcacttgaaagagccctgaatgacatcatcccagtttagttactggctgagttagactaccataagaaaactagcaggtatttgcccagtggcctataatgttgtttttccttttttttttttttttttttttttttttgtagacagaaaaagattatgccacagctagaaaatttgccaagtgcaattggcgtcttgggaatttactctgcctactttgaggaggtcatgtagttccccagtggtagaattttttttctcaagatatttaggtaagggacctaataataattttgtttaatagcacaattttcttttttaacttttattttaggttca

SEQ ID NO: 7241 - DNA, 1034 bp, Homo sapiens
aacaattgcaataaaataatgagataagtgctaagcagatgtgtcagaggacagacaggtagggagaattagagaaagttttctgtgagagatcacagcatttaaactgagcggtgaaggacttaagtaggcataagtggggaaacagcatgagttagaggacagagatctgaaattgcaagacatctgttgaggcatcaagaagagggcttgggccgggcgcggtggctcatgcctgtaatcccagcacttgaggctgaagcaggcggatcacgaggtcaggagatcgagaccatcctggctaacacagtgaaaccctgtctctactaaaaatacaaaaaattagctgggtgtggtggcgtgcacctgtagtcccagctactcgggagactgaggcaggagaatctcttgaacccgggaggcagaggttgcagtgatccgagaccatgccactgcactccagcctgggcaacagagcgagactgtctcaaaaaaaaaaaaaaaaaaaaagaagaggacctgaagtgtagagtgggaaatgaaggcggacaggtagcttggggcattgcactgggcctcagatgctttgctaacatgtttggattttagtctgtacacaatacacaaaggtgttgtttaaaggttgtgtctcattcctttgtagctgggtaacctcagataagctacttaacctctctgactcttagttttctcatctgtaaagttggaacagcacaactacttagctagattataaaggaataaagagataatggatatgaagttcttagcaggatgcctgatgcacagtggatgtttacaaatgttcatttttattcctagtggtttatttaaaattgtacttttttttttttttgagacagagtctggctctggagtgcagtagcaccagctcagctcactgctcagcctcccaggctcaagtgatcctcccacctcagcctcccgagtagctgggactacagtcacgtgccaccacacctggctaatttttaaattttttgtagaaacaa

SEQ ID NO: 7242 - DNA, 1085 bp, Homo sapiens
gcacaggcctgtaatctcagctgcttggaaggctgaggcacgataatcgcttgaacccaggaggctgagagatcgtgccactgcactccagtctgcactctgtctcacacaaaaaaataaaacaataataataataatttctgtaaagacaggtttttgctatattgcccaggatgttctcaagtgatcctcccacaatggcttcccaaagtgctgggattacaggtgtgagccaccgtgcccagccagtgaacattttgaaatatctgccttgtgttaactgggtgtctgtcctttctcttttcagttgactctctgtcttgaaagccaactgatatttcaaaaatgaacatcaatgcatagctccagtttaaagacttcagtgactccctgccacctccaccctgatctaagggattcaggctatctgccattcaaggctttttgcaatctgctcccgattcccctttccagtcaacttgcatttgatatctctgactcactcgtccctcaaagcaccatgtattttcacagcgctctgcttctgtgctcaggtttttcacttttgtataatgttctcctgttattcccatgacttctaatcaaatctacctctttgaagttttccgggtctcctgccttacctggtgcagaattaaatgctttctccattctgtccctctgacccttccccggcaaatcagggcttgttctaaacttgtctccttctgcctctactgagaagtttccttgtcatatttacaaaaataagggatattgaaatggaataatctctgtaactgactcttcagatgctttctagaggcggtgagatttgaagaaggaataagatttgcatacatagagagtagacatttcaggtgatataaattctggaaataggcatgatatgcaagcctgatgtattctcttgattgaactggagggtgctgttggggaatagtggtaaataaggttgaagaagttgtagtgttgaaatcgggacaagaacttacacgttttatagggtggacagcagaagactagttgaggctctttttgttcatttaacttatttctctgtt

SEQ ID NO: 7243 - DNA, 1024 bp, Homo sapiens
ctaagccatgaaactatatcaatttaaaaattcttgactatcatgtctcctcaaattctctatacatcataaaggctattacaatagcctaattatagaaagcagaacataaaatacattttaggaaagtttgattatagagcaaacagtagcagtcctacttaccttaggagaagaaatctttacatatactataataggggccaaggaggttttactgagttgagctggatgattaattgtatccgcgtcaaggaccaccaactgcaatgttcttgcaagttcaaaaatcctttcgatttcactctgaacttccgctgtaaagggcgaaacaattcagttaaagtgcagtatttttaagataaagtaaaatggtatactgtttcttcaacagaaaggtgagtaggtcagccattatgttaatgcttacaggcaatagaattgataaaaatttacaacagtaatttatccttttggaaagggctgtttctccacacatcattaggatttaaggaatttttctgtcaaccggctacagaatttacttttagtataatacttggattgtggaaatttttagctctctgctgacattctttgtgcttgcagtctatgaaatcatttcataaaactgctgtaaaataagaaccttgacatatcttccgtgtgttcattgcagaccactttgcattagcaaccatgacaggttttcctttcagtgcacgggctgatctatgtttacatgtcacctgtatgccgtctagatgtttattaacaagatgaaatacaaaataaaacagcaaagacgtgaatggcaccagaaagaaacttatccaaaaacacacctcatattttccaaccaaagtagtcatgttttaaaagggcagttttcagaggcagcactacagaaatctaaagtataaaatttatagaaacttatcacaaaacattagaatatctagttgaactccgagaaaatggcattcagttcatctgttctgtgatctccaaagactcaaaaacc

SEQ ID NO: 7244 - DNA, 1073 bp, Homo sapiens
ggaatagaatatggaatggaatggagaatggaatggagagtagaatggaatggaatgcagtggtgaatagaatggaatggagaatggaatagaatgaaatataatggaggctggaatggagaatggagtggaatggagaatagaatggacaatggaaaggaatggagaatggaatgaatggaatggagaatgggaaagagtggaatggaatggagaatggaatggaatgaaaaatggtatggaatggagaattgaagggaatgggtaatggaatggaatgcagaatcgaatggagcatcgaatggaatggagcatggaatggaatgaaatggagaatggagtggagaatggtgtggaatggaacagaaaatggagcattcaatggaatggagaatagaatggaatgggaaatggaatggaatagaatggagaatggaagggactggagaatggaatggaatggagagtagaatgcaatagaatggaatggaatggagaatggaatggattggacaggaatgtagaatggagtggaatagaatggagaatggaatggaatggagaatggaatggaatggagaatggaatggaatgcagaatggaatggattgctgaacggaatggattgtggaatggaatagaatgaagaagaatggagaatggaatggagaatggaatggaatgtggagtggaatggattgcggaatggaatggattgtggaatggaatagaatgaaaaagaatggagaatggaatagaatgggatggagaatggaatggaatggagaacggaatggaatgtggaatggaatggattgcggaatggaatggattacagaatggaatagaatgaagaatggagaatggaatagaatggaatggagaatggaatggaatggagaatggaatggaatgtggaatggaatgaaatgtggaatggaatggattgtggaatggaatagaataaagaatggagaatggaatagagtagaatggagaatggaatagagtggaatggagaatggaatggaatagagaatggaatggggattgtaatggaatggggaatggta

SEQ ID NO: 7245 - DNA, 1056 bp, Homo sapiens
tccccatgcccttattccagaagtcatgtcaatctcatttaacacaaaattgttcctaaattacacaccacctcaaagtaatacagtttcagagatccctaggtgtagttacaggtgcgaaaggaaaataaatcttgggaccccaaatcactaagctaaagggaaaagtcaagctgggaacgggttagggcaaacctgcttcccattcttttcaaagttatccctctgctcacctgagacaaatgcacatatgattgccttctctcccctattgtttatgtaaaaatgcagatttattgaggcagactaaattgtgtattcagtggaaggctgatcaagactcaaaagaatgcaaccctctgtctcttagctactcctaacctggaagccccacttccaccttaccggagaaccagtgtacattttacacatattgattgatgtctcatgtctccctaaaatgcataaaagcaaactgtacccccaaccacctggggcacatgtctcaggactttctgaggctgtgtcatggacgcattcttaaccttggtaaaataaactatctaaattgactgaaacctggttcagatattttgcattcacacaggactatatattatgtgaaaaagcgtttaatgaataaaaatatgaggccgggcgacgtggctcacgcatgtaatcccagcactttgggaggctgaggcgggtggatcacgacgtcaggagatcaacaccatcctggctaacacggtgaaaccctgtctctactaaaaatacaaaaaattagctggatgtggtggcgggcgcctatagtcccagctactcaggaggctgaggcaggagaatggcatgaacgggaggcagagcttgcagtgagccgagatcgctccactgcactccagcctgggtgacagagcgagactccgtctcaaaaaaaaaatagtaataaaaaagttaaaatatgagtattcttaaactataaataattcttagcatatatctcatgcctttctaattttgaataaaagaaacttcactcacgccaggtatgtctgg

SEQ ID NO: 7246 - DNA, 1129 bp, Homo sapiens
tgaccgctgagaccaaaattttgtacattttttgggaaaaaagtccagagtggtcctgcaattttagaggtctctggcttccagaatattgagaaccattgggattcagaaaaggaaataatatgggttatttatttatttattttttgctggtacccagaaaatactgataaggcaattgagttcagttgacttgaaaattgtgtcatgtatatttttgcgcaggtggtttgtgtgtaagtcctgggagatcgtaggatattctaggaaattgtgaatttcctaacctgagtatatttataaaaattgtcctcttagcagacgtgaggatgctgtagtggattacccccaaagggttctttatattctctggttctcaaattaaaaatgctttaggattattgataatcgattacatttttttccttatagaatttgccatctgccttagtaagtcatgtactaaatcctcaacctggagagaagattctagacttgtgtgcagcacctggagggaaaacaacacacattgcagcactaatgcatgatcaggtgagactgtcttcacagcaaatccactctcaaagtagtgtatatttcacaatgtgtaatttctgaaacatagagccattcacagtctcatttagttcagattcagccaaaatgaaaactattcagttatgtcagtcactacatattaagctcagtagacaatgatcatttatgaagactgtctcaagaccgtcttgaattttacaatttgcttatatgattatagacttaatctgttaagaaattaaatttaatacatttagattatttcattttcttataagatttcatagttgtttaaactattaaaatatattctgccattaaaaactaatttcacagtatattatcaaagtgtgaaatatgtatatgttaaaatatataaacatagttgtataatacataaacatatacacatacatatagaatatttactatttgaagttatcattttggtctaagaaagatctccaataaaaaaggatattttttaaatactgagaatgagaatcaaaaaagagaaaaggatatttgttgtttacattttgaggaatgtaatactcattagagaggatat

SEQ ID NO: 7247 - DNA, 1031 bp, Homo sapiens
ttctgtattctcttttataaagacagcaggactttgtgtgctgtgtttctggcacagatattacctgcatcagagattcccaagacagccctcaggtttagtgattggctaagactcacagaacctagcatacggtcacaccaatggctatggtttattacatgaaagcatacagaagcaaaaccagcaagggaaaagaggcatggggtgaagtttggaagaaaccaaacacaggctgtctcagtgaggtcccataggacatgcttaattcctccagcacctaattgtgacatgtaaaatagttgtctagaagaaaagctcatcagaggcttggtgcccaagggttttattgggctggtcacataggcaccctctgcgtagcatgtaccgaaattcccagactcccgaaaggaaagcaggtgctccgaataaacatgtgtttgtaccttgcttgtacagagtttaggaattgtgagccactcttatttatcattagggaaggttttatgtcactgctgggaactcattccagtttctagctgcttagctagccaagacccatcctctcaagcaaccctttctaagaaccgcagtctcaagcctgttactttaattttttttttctgttaacatattcttcaactccattcactgatctttttcttccgcattcgttctttttttttttttttttgagacagagtctcgctctgtctcccaggctgaagttcagtgccaggagctctcactgcaagctctacatcccgggtctacgccattctcctgcctcagcctccctagtaggctacaggtacctgccaccatgcccggctaattttttttttgtatttttttagccaggatggtctcaatctcctgacctagtgatccaccctcctcagcctcccaaagtgctgggattataggcatgagccaccgcacccagcccatttgttgttaggcctgtcttggtcactttggctctgtttcaaagtggctctcttgtcaatagtataggagataagttttat

SEQ ID NO: 7248 - DNA, 1051 bp, Homo sapiens
gaaggatcatttgagcctgggaggtggaggctgcagtgagccatgattgtgctactgcagtccagcctgggagacagagcgggaccttgtctcaaaaaaaaaaaaaaggaaaaataagttttcatagtataatgattataatggagttttattcctatggagcattttaaaattcctaattatagtctaaagtctttttaaactcctaagaattataataaatatagaaatgcttttgttaaaattgaagtttgttaaaacttcaatttagtgggcagcaatagagcagtggtttaataaactatgatttgtccatgcaatgggatagtatatggcctttaatatgggagaattctacttaccaatcagagaagatgtttatgatcagtttttaagtatcaaaagcaaattgctatacttgggataattactttttttgcagttaataaaagtacacaactgtggatttatgtatatttatttacatgtaaaaaaacatctggaagctgtaacatacccaccttttaatagtggttaactctgaggaaattagattgggagagaggggggaaataaaaggaaattttcatgtgtaatatttttgttttttttttttttactataagaatgtatttttgcaattaaagttgatttgtataggctcattctatttagtttaatttttaaagtttttcatcttgtattcagttgtttaaaggtgaaagttacatacagtgaaacgaagagatcttaaatgtttagtttgttgggttttgacaaatatgtacaactgtgcagccaagacccaccccagtcaagatagagcatttccattatcccagaaacatctcttgtactcagctaccctaccaggaagctgctcttctgatttctatcatctcttagttttggaccagttagctgctactataatagaccataatcacagatctttggaggttactacactccttatgaggatgcaaaattgtacttatttaggttcaaactttggccatttcttattctgttaaacactttttctttattc

SEQ ID NO: 7249 - DNA, 1030 bp, Homo sapiens
gaccattagcccaactttcaaaaatatgaaccctatgaacttcacaactgaagtcagatctgtatgcctgagagaggtaaaatcatgtcatgaaatcaaacggtggctgatgcgcccaaattctggcctcatcctctaactggaggacatctggcaggacagcaactgggctgtgccttttttcagtccagcaacatcttccactcaacccacgccatttggctgtttccccattgcccctggcacctagccctccggtaccgggaactaaatatctttgaccatcccgcccgcggggtctgcctacttaacctgaggcaggtgaaagagcctcacgcagggttaggaacctccgggggcgtggcgtagcgtaacgcagtgttggggaaacttgcggctgtggattgggggaccggaaagggaggggtgggccgcaggcgccggacgtgacgtaagccggaagcgactttccgccgagaaatagggggcgcgtgtttggaaattgatagaaaagataaagggaccgagctgctgtcagcctggcttactgatctgcgtccgtttcaccacggattcagttactaagcatttttttctttttttggttctttgcaacgtgagtggcattggctcagtgatttccatgagcatctctaccagaaaacattgcctcgatgaggtgtggtggaagcccggcagccccttctaatcggctaggcttgagaaagcgtgtacctctgcatttccgaaattaactcagcgtgatcggcaagattttcctcagcatctggtgtcaagacactcgtcactattaattcggaaagaaaaaaaaaaacaaaacaccgttttccagcatttctcttggtggagaactaaacaacaggaaaaatgtctattttccctaagatatctttgagacctgaggttgaaaactatcttaaggaaggctttatgaataaggaggtaggtcaagtaaagatgttagttgatattttgcaaaaactcaaatattcgcacactcgagagaaat

SEQ ID NO: 7250 - DNA, 1044 bp, Homo sapiens
ataagaattgtgaatacctccaacacaggcacaactttgtagataaaacaacaagacttctgaattctggaaggagttatgaggctagcaagtcatttgggaacaaaatgcactgtccctgtcacttgctgactggacctgaagggaatggacatttctatcacacatctgactctccaagtatactaagaactggagtcaattatgaagctgacatatccagtttgtctggaattctttgagaacatcaagaataataaagtcattgttaccctcactttacccactggaattctctagcattcttgatattcttctaggggcttgtagtgaaactcagaaggttgttgcaagattatctagtgttactgatcatccccagattgaagcaattgctccttcttctgaatgtttattactattacttctaagtgactcatttagttaatgtaatcttaagtacatttaatatctttttcaattttctccacttgaactctccattgggttgtattacttaagctttcttatgtctatgcttcatatagctgacaaaattatagttacgatgatgcccaagatctcggtcttacactttctaaaatgccctttgcttatggcctttcaatttcaaacaacttgatgttattttaattgtttctattgggagacttttgtctcagaggctttttaacacaatgattgtagagatctaaaccccaaattttatttgggctgctagtctgtgtagggtttaatgtgagggcatcccaagtaggatgagggcagtaagcatcctgggtgctggcactgaaaatggagttgaaaagcatcaatgcacacttgttcctcctcaactaggacagctctgtccattgtgtagaggatagataggctaatccagtggagaggagttctctccaggacaactggctgaggatgaggtggacagaatgcacaacctctctaagtgccttttctgtcactctgctgtagcatggtcccggagctgagctgtagttgagagaggctcagaggggaggc

SEQ ID NO: 7251 - DNA, 1044 bp, Homo sapiens
tttgtgttaggcattctgctaaggattttgttttccagatacatataatacataaaacaattccgtgatagggcactatcattatttccatcctacaaatggggaaactgagacttagggtgttattacctggctcaaggtcaaatatttaataagtggtggaggagattctggatccagaagacagccttcttgtcagctgtgcaaatctaaatgacttttagaaagtttgtttttaacatgcgtgttgctagtatagcaaacacattatgtgcttttatactgtgatgatttaatgttcaagacaaatagtaaagtatttgcttatacatttttttatctcttaaaatgtaaaaaagtcatattttttgtcaggagctttttaaatgtgagcatgcaactccctctcccgtaagtttattcgttatcaatgccagatacctaaatggttactcccttgctctgtcattcaaattcccattagggaggtaatgaaatcaagtagagggcggagctacgaagacttgttctctggtgcttgatgactctgaatccagttccctttctttctttgtcctgatggcaaatttatcttttatttcctggaagaatttgcagccagatgtattactctaacatttatgcttctatggcaggcttcttacagtggagaaggtttggggaggtgaaggaaaaaaactaaataaccaaagaaacacttctacaaagagagaatgatactttttgctttgcttttaaaatctacctttattcattaaaataatgcatttcgacaattcgtggttatgtataactgttggctgaaggaatattcaacttcttcattcacatttttatggctggagcagtttttgctctctgggaagtagaaactctcttgggtggaagcagccgagtgaggctgcctttcttattgtctctatgagggagatccagtgggccctatctatggtgtttgcccacaaatcatgattttggcctgaagtcactgtgagtaagaagagtgaggagttttactagcca

SEQ ID NO: 7252 - DNA, 1050 bp, Homo sapiens
agcaaacactctagcctctgagatccaaagaaaatagacttgtcttcacaccataagtcctaaaacatcagtgtccttgaaatatctctgaagattttttgttctttctttctctgtttctctctttctctcttctttttttattttttattttttttgcagaggaacattggaagagggaagagattgttttctgtgatctctgctgctctgagctttactttactgaactatctccatctctgaatggtcttgccaagtttgcatgttctttttcttctgccttgtgcacatacagccccattctatgtcttcaaaatgcaacaaatacaaaattgtaaatgcagcacaattttaatgacattttatagcaatggggtagtctcttataatactgtttctaggtggttgaaaatagaatattaaccttcctcttagaagtcatcatgcattttgtcactgagaatttctccctggctagtttttctagcatctaacctctgatcacgttcctcagttttcacttgtcttttttctcattttccccattcctccttttaccgccaaattcctgtcaatcctttattcacagcaggttagatttctgtttgttttgctgatttcttctagaccattgcttttcaagttgcaggtagtaaccaattagtggattgagaagtttgttccatgatgccttagtccctttgggctgctataaaaatagtgctaacctgggtggcttattaacaacagaaatttgtttctcattgtacaggagcctggaaagttcaagatccaaggtgctgacagattccatgtctggcaagggcctgcttccttcatagactgagatcttcttgctgtgtgctcacatggtggaaggggctgggagcttccttcccccagccccctgtcctctctctttctctctctctgtctctctcaggtccctctttaaagggcagtagtcccatcataagcattctaccttcataacctaattatctcccaaggattctacctccagacaccatcccattggggattcag

SEQ ID NO: 7253 - DNA, 1036 bp, Homo sapiens
ttggggaagaaattattttcttttccctcaccgacaatcctgcttatatttgtggtttgaattatagttacaacttgcagagtttatcctaagagagataaaatgagaaacaaatctgagggaaaaaaatggaagtggcaattcgaatctaaatgtagaagtaaatgggctagattattctgaagtaaaatagcagaaattctaaaatctaaagctatctagttgtatttaaaccatattatggtttagctcagttctgtcagaacatttgcagactaattttttctagagaaaaagcagttggcttcaaaatcaaaatgtactgattttcttggtttgtgaggctaattaagtttaactggtggaaaattaaaaatacaactaatgttgtgtgttttttcaatatttaggaactgcagagtccccaagataatattttagagaagtttttttttttttttttttttttttttcttgttttagactgagtttcactcttgtcaccccaggctggagtgcaatggtgcaatctcggctcactgcaacctctgcctcctgggttcaagcgattctcctcagcctcctgagaagctgggataacgggcgcccaccactacgccctgctaatttttgtattttagtagaggtgtgatttcactgtgttggccaggctggtctcgaactcctgacctcaaatgatccgcccgcctcagcctcccaaaatgctgggattggaggcatgagccaccgtgcccagcctagaagttctcatttgagacaactaagtcaaatatatcaatgaagtgctgaaatgtaatgtctgcatatgtagtttaaaaagtacaaagtatgtatgtttccttttgcagttcacaggcaataaagaatctttaatccattaatatttaaggaatattataaacctggttatttatatttggggaagaaaatggttaaaaatctcatggaattaattgtattttcaactaaatctttcatatattggtgacagcattgcttattctaatactgatgg

SEQ ID NO: 7254 - DNA, 1541 bp, Homo sapiens
tttgaaaatacacctttggtaaacttaattaaaacataattttaaaaattaattcattatttataataaaaatttaaacccttaataaaatacatttccacactgaagacttatttagacaggtctggaaattaaaatcaggttgtagactttattgcttgcttattaagaccctgagatcattatcttaaatgtaattttaaaggttttttccatgcttaaggtatatatgatcaaattgaaaaatagccaattatttccagtcttatagcattactatagagctatactgtccaacatggtcaccactatctacatctgaccattgaacacttaaaatgtggctagttggaattgagttgtgctgtaactgtgaagttcaaatacacaggattttaaagacttagtaggaaaaaatataacatgtctcattgtagtgcgtagtatgaagtagataatcatagatatttcataaatgaatgtatgattgaaataggagagaaagttagagatttttgttggttttgttcgttgactggagagattaacatgaggcctggcccatagaatgcacacgagaaacatttgtgaacttattaacaagtaaaatttgttgaattatatttgttataattcattcatgtccatcttcattcattggtataacaaatgagtgaatgattgaatgaacatagacacacccacacccccaacacacaccctcacacaaataataaagaagataaagtcctcagagagaaatcaccccaatatacgttaaactagttctcactcttcagagagtaccagttattttaaagcatcattaacttcatagctgttttaatgatatatttactttaattataattttattttgatattatcttatagtttaagttaaacatggaaaagctccatggaaataattggaataaggctcataaattagtgttttaaaagtgccaaacttctgagcatcagtagtattgttttccctggcttaaagtgggatgaaatcatgatttcaggaagaaggattcctcagtgaacataggtgttagtaacttgatgcttaaggtttgagaaggaacattgacatcacttgtttagtaaataatagaaaaaagaggtgcattttaataataaagctgtaattatagaaatgtaaaagtgtgaaatgtataaacacatttaacataaattttatttcagggtctacataatacgaatgaatttcccttaaatatttttcttccaaagattcataaatctggaaacactttcttcactaagaattttcataaagtccacatacacaaagagtattctgaagggcaaacaataacctgaagaaggaaaaattatgttcaaggcacataaagggaatagagaagctgtggtagtgctgcttccacagttaattgactaggaattgttataactgcaaaggcttcatggttcaaactgacttcagctttttgtgttaggataagtgatttctatacatttccgtcatgtagctctcccctgacatcctg

SEQ ID NO: 7255 - DNA, 1035 bp, Homo sapiens
tctcttaaccaaatggtaatttacagtacacactcttttgtactttgctttttcctctattgctgtatcctggactccttagcggtatgcagaaatctgccttatacattttgacagctccagtgtgtcgctggactacaatttctttaactagtcccttgttgatgggcatttgggttatttccagtcttttgctattgctagtattgtaatgaatagtcttgtatatttatcatctcatattttttaccagtacccctgagggttggttgttataagagtgactgatgggttaaaaagtgaatgcatatgtcattttgctagatattgccaaattctcctccactggggttgaaccagttatgtttccaacagtaatatatgacagggcctgtttttccacagtccaacagaatacgttgttaaactttggagtttttgctaatttgaaaggtataaaatgtcatgttcttttaatttatatttctcttatcaccagtaagaagcttgggcgtcctctcttacactaaggaccatttgtatctgttttctgtgaactattcatcttttgtccatattgggttgttgattttttttctcaatttttagatacttcttttatattaggactcttagcccttcatgatgcaatttccccctgctaccttgcttttgcttgcagtggtggttttctttttctgtgtacattttagattattattcatttttattttcatgtagtcaaacttatttttatgtagttgttatttttcctgtaggttccggattttgagttaggaatggtttcccactcccaggttgtaaagcaattcccctatgttttgttccacggtttcatattctgcatttggatctcatttggaatttatcttggtgtgaggcatgagaaatggatccaattatatgcttttcctgtgttgttgtaacattatttattaaggggttgtccttttctcccttttcttggatgacgtttgtcctgtggacatgggtctatctctggactgtttatct

SEQ ID NO: 7256 - DNA, 1048 bp, Homo sapiens
ccttacagtttcttgcaaggttttcctaaaatgcacatctgatcatgtcacatcctcttttaaaatctgttaagtctctctgctgcctttaggataaaatgtaaaatcttttgcctggaatgtgaggctgtccctggcttagtgctagctgagacctctagcctgggaggccctcttgcaatctgaacccatccatttcacacttctgcctgcaagtcccttcatacctctccccatccacactggctcagaggctaccattgagacagccagatgggagggggtccccggaaaaactccaaccagcctgcccactagggtagagccttgggaagtttgtgctgtttgcagagggggcggggtggtggtgggggagccaggccccctcctcttcctgtgtgaaacctggaattcgaactatgaggcaggaagctctctagcaggggactctggccttgcagggagtccctgtttcccccttttcttcctttcacccagcaaaaccctgtcttactcattcaaattgtctgcgagcctgaattttcattgccgtgggacaaaggaccccatctttagctgaactaaggaaaagtcctgcaacaccatctttccctagctgctctgacagtcagcttctatagctgcattatgagttttcctaccctcagactgaactctatgaagaaatgggctgtgtctttttttctatacagacccagggcctagcccactgccatatttaataaacaaatgtatcgaccatttgtgtcaacaaatatttttattttttactttgatgagtgaatctcctggccttgtgtgaatttcatcttacagtgaagattattactaggagttctaatctctttcaaggtctacatatccattgcacatcaattttcttcttgaaagctcccagattttttttctattgtgtcattgtctagcacaaagtagttatcaaataaatatctattcagtaaatagctggattattttatgggattactttctctatatccagggtgttttttctttcttttttttt

SEQ ID NO: 7257 - DNA, 1073 bp, Homo sapiens
ggctgttaagtgctctgaggtctggtgaatttattattcatttataagactgcaacttcatgaactttttcccttacctcactaggttttccatattactcaaggatctttttctataagaaacttgggttgatccaaaaagtagtactttggcaagtccagttttccatattactttaatctaaacccactgaacagtattggctaaaacccaaacagatattttttgacagtggctggattgtgtctgttatgagaggaaacaggtgagaaagtgtctagactggaaagaccccagaatcttccggctagagatgctgggaaattataatcctgaaaattatagatcctgaaaattattaggggtatgaaatttgtgagtcttgcatttgagtgccaagtttaatataggttaatataggtaggttaactaagatcggcagtctttgctgtctttatgtttccctgtgtttcattttctcctatttgtttctagtttatctctgaatattgtgtggctctttcttagctgcctttaatctctcttgtataaagacataaagcagtgaatttaatgacaactcctaagtgttttgggtaatatgttacggatgaatgggaatttttgattgcttatgtctatgtcaatgttttgaaattttttcagctcttctcatgtttgtttattgaggatttgaaatcatttggaaatgaccactcagtctgcatgttactgaggtgtgggataaaatacaaccgtaaatttcaaattgagtgtgatgaacgaggtgagagtgggtgaacttgccttttctgggtagctgtaatgacaacatattgaacatgggagatttgttaaatactgcaatttataattcttctgctatgttacccacttagtgtagccacagaacaaaacaagaaaagaggcagtatttcagaattgactaaatggctgggaagaaaaagaacttggcttctaaaataaagcaaaattatttttttccccatgaaattccagaagatgtcttcatctcattgaatatattaatattcagatggggtttggttgc

SEQ ID NO: 7258 - DNA, 1083 bp, Homo sapiens
cgggttcaagcaattctcctgcctcagcctcccgagtagctgagactacaggtgcgcactgccatgcccagctaatttttttttgtatttttagtagagacagggtttcaccatgttggccaggatggtcttgatctcctgacctcatgatccgcccaccttggccttccaaagtgctgggattacaggcatgagccactgcacctggcctatattgatttttaaatttgtatttctttttctcttttgctgtttacagagtttttttcttcttttttcagttttgtagagtggaagaattatgtcttgttatagaaaaacagttggtgtttgcctgatcaataatgccattgcaggtatgagagggaggttaggaacaattttaatgacattatcaatctacatatctagaaacattgaggaataatctgtcacttttatcagctgtgacgagactttgagatttaggacaggttattttcactttcatgactgttttgtgttagttcactttgtttatatttgcttgattctgggtttatcctgtttctttaagctagttaggatgtagcttttcttttctgaatgactcatttcctaattagttattttctaactggaaattacttatttcgtaatactttataattcagaatatgtacacaggactattccctgttgtgatttcttattctctccttattttaaccttgtgtggtaccttctggttcaaagtaatttcaataatattctattctatggctgggcgtggtggctcacgcctgtaatcccagcactttgggaggccgaggcaggcggatcacgaggtcaggagatcgagaccatcctggctaatgcagtgaaaccttgtctctactgaaaatacaaaaaattagctgggtgtggtggtgggcgcctatagtcccagctactagggaggctgaggcaggagaatggcgtgaagccgggaggcagagcttgcattgagccgagattgcgccactgcacaccagcctgggtgacagagtgagactccatctcaaaaaaaaaaaaaaaaaaattctagggttgggggagggggga

SEQ ID NO: 7259 - DNA, 1035 bp, Homo sapiens
tcaaatccccttaacctaaagggatatgtttttaaactttttaattcttgcacaaataattttataacaacaataatgaaaataaaaatctgaactcacctgtaggcccattctctaagaatctaatgcatcaacatttttattttcctgctggtccttttatatagagatgcacactggttttttttaaaaacataattttcgttatagctttcacttacctttttagacagagctactctccatcctgaatattgtatgttcagtatagctgcatactagtagattgtgggaaataaataaatagtatttatttatttatttcaactaaaacagtagagtgttttcactactaatagatgtttctgactgcctgaaatgagtagcaggattcaaggagcaatgtgactggtttgtcggatatttaattagcagcttagattgagatttcatggtaatgagtttttttgatccatgttctggtattttatatgaagataatcttattagaatgttagagactctgaataatatgaagataatcttattagaatgttagagactctgactaaaaaatattttttgaacaaaattttttgtgagtgggtaaaggaggtttccttgaccacctagcctatgaggttagagttgctgtgatccatttgaggttgaagggcatggggatagagttgctgtgatctgtttgagattgaagggcattacagatgtggggcattttcttcaccatagcggtcaccaacctttttggcaccagggaccaattttgtggaagacagtttttccatggatggggcacaggatggtttcaggataattcaagtacattacatttattgtacactttatgtctattattacattgtaatacataattaaataattatacaactcagcatcatgtagaatcagtgagtgccccgagcttattttcctgcaactaggcagccccatctggggatgataggagacagtgacaaatcatcatgagagcatcagactctcataagaggcaag

SEQ ID NO: 7260 - DNA, 1060 bp, Homo sapiens
gatggggtctacctatgttgcccaggctggtctcgaactcttgggctcaagcgatccccccatcttgaccttgcaaacttctgggattacaggtgcaagccactgtgcctggccagataatggttttaaaacagatttgcttatgtacattttaaattttactgttttacttcttcacagtcagtaacactgaggctttaccattcaggctgctggggactaatctggccaatttgaccagctgggggtctccctgctgatttcttagatgggtattctgtgacttattgctctaaaggcattaggtcttttagcaaatgtttattggatgtctattttatgtcatatactaggccttgtgctccttaaagaactaaggtgtgagtgtgtgtgtgtgtctgcacaagtcagggactgttaacagctgcaattgaactttctgtcctcaatttggtatttgtctgtttatttggttgtgagcgtgcaaaatggagggcataaggtgttactctcaggccagtaagaacctaagaatttgtttgggtgaggtcttgatttccttttttgcctctattaaatggcctacccttaattcaccagtttctccatagaaatgcctaaagaccttgagaggttaatactgaaagggttttagaggaaaaagaaaggtgagatgctttctgtgagtcagtgtttctccaaatagtcttttcctgcctacctgtatgcatcacagttacctagcgaatatggtgagaatgctcattcatgggcctggccccagacccactgacagggaggcccagaaatctgcattgttaattctccaggtgattctttttttttttgagatgagtctcgctttgtgccccaggctggagtgcagtggtgcaatctcgactcactgcaagctccacctcccgggttcacaccattctcctgcctcagcctcccgagtagctgggactacaggcacctgccaccatgcctggctgattttttgtatttttagtagagatggggtttcactgtgttagccagggtggtctcgatctcctga

SEQ ID NO: 7261 - DNA, 1038 bp, Homo sapiens
ggcttgaggccaggagtttgagaccaggctgggcaacatagcaaaaccctgttcttgcaaaaaaaaaaaaaaattaaaaaattcgctgggcatggtagcacacacctgtagtcccacctactcaggagactgatgtaggaggatcgcttgagcccagaaggtcgaggttgtagtgagctgtgattgtgccactgcactccagcctggtcgacagagctataccttgtctcaaaacaaaatgaaacaaaacaaaaacaaaagcaaacaaacaaaaaccatatatctcaattcagcatgtctctgtgatcccttatacagaggagctgatctaaagcaatcccatttcattaaattaacaggctcattagggaactattccttaatacccttaatcaacactcttaatttcctaacaatgtattttttgaaaggaggacactacttagacactactgtctcgtaatggccttaaacaacaaaaccaaatttataggacaatatagaattcagaaaaggcctcttggagataactctaggggtaaccagcagcctgcggtagcccttattgtgccctgaatgtttaaactctcatgaagtacatatatgtgtgcttaaaaattatatattttaagcagaaattatctagcctacttgtcattttcctttacctcagaactttgtttagagcacccattagcttcagaaggaccttcccaccggaattctctgggggccttgcaaaaggataaaaacaggctcaagaaattctgtagagaaaagatgactatgttaacatcattctttgaaaaagcttccgtttgggacaattgtattgtattctgaaatgagatacttgggcttccaaaatatgggttgtgctttgtaaaatggagtttttctcattacaaaatgttggaagagagcaattagaatttccttctctgcctccttccctctctcttgatttttggtgaagtcaagggtcaggatgatgctaaatcagaaattaaggcaacacaaatttgatcccaactggta

SEQ ID NO: 7262 - DNA, 1056 bp, Homo sapiens
ttttcttttctttctttttttttttttttcggagacaaagtctcgctcttgttgccaggctggagtgcagtggtgcaatcttgactcactgcaacctctgcctcccaggttcaagtgattctcctgcctcagcctcccgagtagctgggactacaggtgcacaccgccatgcctggctaatttttgtatgtttagtagagatgggacaattttcaataagagatttctgttctacatggatgaattttgagagtgacagagatttaagttttaatatttgtgatatattcttataagtgggaactaaacatttacacatttatgtacatctacacatggtcttttcttaaaaatagaattattttatggttttcccccatctttaggctttaaataattatttttgttcatattgcacatttgctataggtatgatacttatttattatctttatcaaaggaatcgaatgtgatccttcttgtgcttctaatgttctgttttcttataaactttgttttgatatttttcagagtatactcatatcttagatactcgagtcccaaatctgcgtgtgtttctcttggctgtaatcaacagtgccggttggtgttcctgggcacaaatcacagggctgctcgatgtcacacatttccttgtttgtgtattcccgtgatcaatatcagcaacagcacagggaatagactctcttccactagctcatatttttcttaaacaatatgtaggtgtgtgtgtgtgtgtattaatttctcaccttttacaccataattcaaaatctaggtgacatgtttcaatagccgataagcatttcatagtagggtaggtcaggtttaccgtataatccctttgataatgccttcttttataaatacatgagagaagttacaattgagtcctgctgaggaagtagatcaataggtggcaagctgtttgacccttcgagccagaaagagaatttggtaaattgttagacaggttattgactgccctttagagagccaggggtttggattctgtaactcctttcagctggggct

SEQ ID NO: 7263 - DNA, 1154 bp, Homo sapiens
atatttaccacaattgagaagagtcaaaaatatatgtctcatgcacggaatgcaatatcaaaagaggaattttcacagagttttgagcagtctcaagatcacagaatatggatatcatatccaaagtatctatttagaaagtgatgacatgcttttgttgtatctatgtgttgtgctgttaagaaatcgctttcattactttatggtcagccatattttatatgcattataaattatgtgcttattacaaaatcacagccaccagaaccgtctctctatgctttacagttcacctgtgaagatttatgttctgagttagctgagacatcatagaattctcttcttaccaggaaaggatcataatacatgctgttcaaagcaatagcgtaagacttattgatatacagtatctatactccgcccctctctgaggattctatattggtcattgttcaaggcttctagtgattttcttttattatatgaaaaaggagagttcaatgtaggacagaggtggagctaccttgggtggtggggcagagtacaaagaacaaataatgatcttatatgtctgtgcacgtccttcctccaaatgtttctataactgcgatcttttgaaaattaacagccttggccatctcaaaggaggaaaaataaataaaggaatatgcagctcaatctgtgtgtttacggggcagataggtgaagatgagaaccatagatcttattgagagggaagctgcccacttttgtccttctatttgggtgagaagttgttgagcctccctatgtttatactgggagccctatttttataaagccctctgaaggctgtgtggtgttgccaacttggagaaaaggttgaagctccagtcctggatccacaaattctgtgtgcccactcttgagcaagttacttaagccctgtgagcctgagttttctcacttccaaaacaaggtcctcacacaggtgtgctgggaggtttagatgaaagcacctgccaaataaatcacagaaatgagagcctaccaaagatttgtgctccctgcattttatcttgtatttttttaaaatctcaagatggtggtactactgcctcttcacctcctcattttctttctttttctggtcttgccctgttatcccctccacc

SEQ ID NO: 7264 - DNA, 1045 bp, Homo sapiens
ttagaacacttatagtatgtgatgttaaaccttattatacagctctggtaatcaggacagtgtggtaatatcatacaggtagaagatatacagggcgatgtagagcagtgattttccacaaagacaccaagttaattcagctgggtgaggagaattctttcaacaaggggtgcaggaacaattttatatccagaagcatgaaaagaaaacaaaacaaaacctgagcacttacctcacagctcatggaagaattaacttgaaacatatcataaacttaaatgtaagagttcaggcaattaaacttctagaaaaaaatgtagactgtcttagtgactttgggctaggcaaacattttaagaatatgtctcaaaaagtataactataaatgaaaaaaatggatacattgactttatgaaaatgaaaacctttttcttttcaaaagatactaataatcgcatgtcatgactagggagccagagaataggagaaaatatttgcaaaatatgtatcacacatatataaagaactcttgaaactcagcaggaagaagacaaaaacccaattagaaatgggcagaagagttgaaggagcctctttttgtcaacatcattagtcattaagtagatacaaagtaaaaccacttttgttaggatggctaagatggaaaaggctgaccttatcaagagttgaaaaaggcctggtgcggtggctcatgcctgtaatcccagaactttgggaggccaaggtgggcggatcaggaggtgaggagatggagaccatactggctaacatggtgaaaccccatctctacgagaaatacaaaaaattagccgggcatggtggcgggtgcctgtagttccagctactggggaggctgaggcaggagaatggcatgaacccggaaggcggagcttgcagtgggccgagattgcagccactgcactccagcctgggcaacagagtgagactccatctcaaaaaaaaaaaaaaaggagttgaaaaatgtttggagtaactggaactctcatatgctcctgtacataca

SEQ ID NO: 7265 - DNA, 1032 bp, Homo sapiens
aatagcatgacgatatatttaaactcaatcattttaatagccacattaaatgtaaatggtctaaactctgtcaattaaaagacaggctctgtcagactggattaaaaaaaaaaagcaggacccaactttccactggctaaaagaaatctattaaatatgaagacacagatagggtaaaagttaaaggacggaaaaagatacagcatgccagcgttaatcaaagaaaggtggagtagctgtatgcatatgggacaacgtatatttctgagcaaggaatattactaggaataaagagggtaatttcaaaatgataaaggaatcattttctcaagaaaacatagcaatcctaaatgtggttgaagtttctaatcctaaactgaaagaagaaatagccagaccaccatttaggtggagatttcaacaccttactcttgataattggtagaacaaatagacagaaaatcagtaagaatacagaataattgaacaacactataatcaacatgatcaaattgacatttatagaacgtcctatctcacaacagcagaatgcagattcttttcaagtgcacacagaacatttaccaagatagaccatattttgggccataaaacaaatcttaatcaatttaaaaagatttaagtcattcagggtatgttttctgaccacagtgggattaaattagaaattaataacagaaagatatctggataatccccaaatatttggaaaccacacaacacacttgaataacttgaatcaatacaagaaaaaatcacaagtgaaattagaaaatattttgaagtaaatgaaaattaaaacaacatattaaaacccacaacaacaatttgtgagttaccaataaacaatgcttaaagggaaattaatagcattaaaagtgtattatattagaaaactagaaggttctaaaaccaatgacttaagcttcaaccataagaaactagaaaaagaagagcaagttaaagcaaaagtaagcagaagaaaggaaataataaactataggagcagaa

SEQ ID NO: 7266 - DNA, 1075 bp, Homo sapiens
aatataactatatatgttatattaagtatattacaaatatttgctttatacctgcacatatacacgtttgtgtatgtatataaagcaaatatgccaaaatgttggtgattggtgaatctagatgaagggtatcttcatcacactagttttgaagctgttctgcaggtttgaaatttttcaaaataaaaagttaggaagaaagaactttgtgttagagatgaggtagtggagaaaaatgttgagctgttaaattcaggttcatgagaaaatgacatgttattattgtcgaataaagcaaagctagaagacatagtatccacaaaaataaactgtaaagtgagattgatttagatcatccagaattaactatttttggagtagagaaaggattgctgttgggcatcttagtctctctcttcttttgtttccatgatattagctttctcatgttgcaagtccttagctcacaagattgttgtaagaatgattgagaagatgtgtatgaatgtgccctgtaagcggtgaaagtaatgtctctaagcttctttgtgtttaggatgtcacttgtgctgaactgtaacacccaatgttgtattttgggttgtaacttgtgctgaagtacaacatccagtgtttgtattttctataaatgactatgcattcataggaaagagaaacttaatcagtggctttattaagactcatttcgcacatatgtaatttagaaaaagaaaactgactctgtttcactgagattaatatagttctgcccatggcatatctaaaacagtgtctaaatacatctaacaaataatagttttttttttcagtaaagaaacaaaatttcacttatttttaatgctcatttagccagttgcatttatggaaaatctttccccagaggttggaaaactagcaaacagcagctttaatataagtcaatagaacattaagtagagaaaagctcggagttacatactgtgctattatcttgtgataatttcaatttaggtttctttttaagtatgcgttcaggattttactgttagactaaatgtaaaatggagtcaatgtc

SEQ ID NO: 7267 - DNA, 1028 bp, Homo sapiens
attaataataattacttaattccttttaacacagttcatgttcacattttattggttatctctttcaattgcaaattgcaaagtcttttgttttgttttgttttagtagttgctcaagttaagagccaaattaagtacatttattcaattggcagctttgtctcttaaatatttttaaatttataatagtccccttccactcctttcccccttttaattccctttatttgttgcagaaatcaggtttttgccttatagcatgtcccacattctggattgggctgattgcttccttccagtatcatttaatttgtgcctctatccccatgtttcatataaactcatagatcaacaggcctgataatattctggctcaaattttcttttttttttttctaggcaagattgctgtatagttggtgctatgtactttccagtatatctcattgggagagacatagtatctgtctgtcccaacttcagtgagttaagattggtcagaagatttagctgtatacctggtccaccatttataaggttcctcatcagccatacattaccttaagtaatggtttttgcaatggacttctctagaagtcacaaactggaaattttttaattccatcattctttctgcatttagtagttggaattctttagtagggatcaatttttcatcattatgtatttgatatcttgaaatatagtttgaaaagaaaaagcaagatccatttgtcattattttctgttattgatccattttctgaataatgaattggggtcctggcagcctccctcggtggggatcaggaaattgttctctacttttttgggaagagggaaaggagtgggaggaacatcttatcaactcattataaaaccatggatgcgtttgagtgtattgaatcagttgcagtaattccttttgatattcatattgtcccatctttggccagtggagtttttttttttttttttttttttgatacagggtctccctctgtcacccaggctggagtgtagtggct

SEQ ID NO: 7268 - DNA, 1032 bp, Homo sapiens
atacaaaattaactcaaaatgggctaaagacttaaatgtgaaagctaaaacactctaagaggaaaacagagtaaatctttgtgactttggattaggcagtggttttatatataatgccaaaaaacacatgcaataaaaggaaatacaaattagacttcatcaacatttaaaaacacctgtccttcaaggacactctcaagaaagtgtaaagactacccgtagaatgtaagaaaatatttgcagatcattcttctgataaagaactagtacccagaatctataaagaatggttacaactcagttattaaaagacaagtaacccaattaaaaataggcaacagatttgaatagacatttctcccaagaagattcacggtcaataaacacatgaaagaaggcctggtatcatcactctttagggaaatacaaatcaaaaccacaatgagacacttcataactcctagaatggacatagtgaaaaaggtggacaataacaaatgttggtgagaatgtggacaaaatggaactctcacacatcgcaggtgggagtgtaaaatggtgcagctactttagaaaatagcctagcatttcctcaaaatttaaacaaagaattaccatatgatccagtaattctacttcttggtatatatccaagggaattgaaaacatacatccatacaaaaccttgtacatgaatgttcacagaagcattatgcataacagctaaaaagtggaaacaacccaaatgtccactaattgacgagtagataaacaaagtatggcacatctatacaatggaacaccattcaccccttaaaaggagtgaagcactgatcatgctgttaatataacatgatgaatcctgaaaacattaagctagataaatcagacactaaaggccacatatgatatgattccatttatatgaaatgtgcaggacaggcaaatccatagaaacagaaagtaggttagcagttaccagaggttcttggagaatagggataatggggagtgattgctaatgagtactga

SEQ ID NO: 7269 - DNA, 1045 bp, Homo sapiens
tccatattttatttatttattttgtaaataatttaaaagtgaggccttcgttatttcatacttcagtcttagtctttcaaaaataattgttgctctgattttgcaatgggagcctttatttagtttagaagtcaataataatatgctaaaaaaggaacataacttaagtagagaacctctctaaggggagagttctgagtggaaaaaacacaaactgtttttcctctgcttttaccccacagcaatcaacacagaagaattctgtgaccagatgtgtgagggattttcccacacataccaagcaagtgatcagttctgcagtggacatcagctgggtgtcctctaattcaattccaaccctatctacctggacatagcaccagatcccacaggttgagggctcagtcctacaagaccgcccccgtcacccacttccaatgccaatcgcaagctccagttggctttatctgtgcttgtgaccaacgggctattaatcagggttcccagaactctgtccttggattctgttaatttgctagagtggctcacagaactcagggagacccttgcttatgtttactggtttattagaaagacttacaggtcgggcgcgatggctcatgcctataatcccagcactttgggaagccaagagaggcggatcacttgaggtctggagtttgagacaagcctggccaacatggtgaaaccccgtatctactaaaaatataaaaattatctgggtgtggtggcaggcacctgtagtcccagctactcaggaggctgaggtgagagaatcgcttgaacccaggaggcggaggttgcagtgagctgagattgcaccactatactccagcttgggtgacagagacagactctgtctcaaaaagaaaaaaaaagaaagactattgcaaaggataccgacgacgaggtgcgtaaggtgaggaagggttacagagcttccctgccctcccctgctgcaccccctccaggaacagctgccccgaagttctcactacagtgttctcttgggcctttttgggac

SEQ ID NO: 7270 - DNA, 1771 bp, Homo sapiens
agtcattggatttctggactacagcttgactcattagtctttcttttctctccaaacagaaagttaaattactgttctgaggttcttaaattcagagtggagtttgtgcttgaaccaagtataatattacttgatgtacaattgggcagaatagttagaagtttggatgaaattttgtcctcttcctgtttctttttggcttttgttgctctggattttttttttttcttttttcttggacagggtcttgctctgtttcctaggctggagtgcagtagcataatcatagctcactgtaaccttgaactcctgggctcaggtgatcctcccacttcagtgtcctgcggatttatgctgaggtttgtcaatgttggatactattgtccttgtagcctgtgatgtgaggaatagcccaggggcattgtataactttgggaaatggaggtggggagatgctcattggatgcctttggaattcttgggactaacggatttaaaatattacactggcgtcactgtccttggggtccaatctatgagattcgttgatgatcattggaagtcaaggggtggccagacagatgagcacgaaagagaatccatcatggattgggctgtgttgggtggaagtaagctcagacttgactccgcctgcattcctcgcaggccctggaagacttgccttctctgtcccatttccggatagcggaaatgcactcactccttcatttattattcagtaatgatggaattcatttgttcatttacttaatattgaaagagcctgtcctatgaaccaggcgctgttctaagtacttggaatgtggcagtgagcaaagtagaggaaaattcctgccctcgtggagcttcttagtggaaagaggcagacaaaacccaaaaccaaacaatcagtaaaatattagaaacggatatgttctatagagaaaaatggagcaggggaagagataagtttcacttggttgggcagggggttggaggagagtttgcaattttgcataagttggtcagggaagtctagttttcacattggagcaaaacctggtataggcaagggaatagcaagggcacggagtgaacctggggcgtgtgggaaaagcaatccaggcaggaagcctgtgtggaaaggaggaaggggcctggggacggtggggaccctacaaggcctgtaaaccattacagggactgcagaatctgggcagctctgactaaggggggcagttgctggggtgttgagcagaggagtgacgtgatgtgtgatttaggttttaagttttttttcactttggctggttgtaaaaataaagcactaatgggctagaaaaggacttttgtgtgtgtgcgcttgtgctaaagggacagtcacatatttactgtaatgatatcccattgggtgtaaacaagagtgcattttgtcattaaaatgaaccaagagttatcatgaagccatggtccttgagggagttggaccccctggaagtttcaccacatgagtggtgacgcaggaggattctgtcatcatcagtgacaaagtcatgactgttgactgaagcagggtgaattacatggtgtgcgttgctatatgtgcaaagacatatcttttgtttcctgaatataattttggcctagattgctttaaatggaacttggaaaaatcctgcagaagaatcgagtcttgtttatttctccaaaaatgacttcagttcctttctttgctctccctcatttcatccttcccgtctctgcctttcag

SEQ ID NO: 7271 - DNA, 1018 bp, Homo sapiens
ttttttttttctttatacagtgatgagtatataacagggactgaataaacatgtgttgattgactgtaaaagaacctttactctgaatgggagacagcagtcgctgatctgatagcaagcttcccaagtctggcttctttctctgggtctatactggtgggtcaggaacaattgttaccgaggatttaaaaattaattccctagcaggagaaaacaggtggtaacataaaagaagtccctgaatggaggaaggatcaagtaattctcagaagagaccagcaggggaatatttatgacctcacctgtctgtaccaatgcatagccacattatgagatacgtaagatccaggagttttgccaacgtgggatggggacaggctgatgattaaattgtgacagtggagaggcttggtatgctaaaagagaaacatgtctaggaggtgaatccatgaatagaaagaatcttgaaggtgaaaagatgatggagaacatttgagtgagaaggaaaagaagggaaacaggtggccccgctgcatggcagaccatgtgcctcttgtccagattggaaatgtcatggaggctttttcaatgagttatctgctgaaggtttaagagagaataccagttggtttcttgctttgcttttgtggacaacgtcactgctttcaagctgctttgcgcttaatttggaaaagaattggtcgatggggtagcagttgtgaggactttagaacacgtagtctctgttatgttgaagttcaggagagcaaaagaaggagtcacaccacacctagccttttaagaaaaccttcaaacggtgtaggggaagaaggaaaggctgtgcttgttcaagaaatcttaggttctcagaaactctaagataaacgatgtgtgccatacccctgtgactggtctagtcattagctcacagttagcttttaataaagatttgctgaacaaacagaagaaggaataagaaaaaaaggtggctcaagtgagatagaagactttgaaaaat

SEQ ID NO: 7272 - DNA, 1063 bp, Homo sapiens
gaggctgaagcaggagaatcacttgaggtcaggagttcaagaccagcctgggcaacatagcaagaccctgtctctaataaaaaataacaaaaaataaaaataaaaataaaaaagaagcaatagacatatctttctataaggatctgtgtggcgatcctagatgttgctggccatgcttggactgataatgcacatgaacagtagcaaacacttcctctgtgtaggtgaaatattgaaatttgcagctggattacgggtcactgacatgcaatggaacaaatgatgacaagaataatgtctacaaaggtagtttataaaaatcactttgttatgactctgtttttcaaagtcctaggagtgaaccatgtgtttgagacatcagaccatatacacatttacttgcatatcatgttttttttttttttccccctggaaataagtttgatggcttcatttcctgaaactaaatttaatcagggattaatggtcaattcctgatgaataaaaggtcttaacaggctcttgtggaagaatcttcttttctcaagtgatttttcttcaatgttctgccttttctcccacatttccagaactttaaaaataactctgtaggatcagtgcttctcccccaacccaccctccccaaccccactatctctccgtttctctttctctctatttgaagtcttttctgttgccagtgacgtagttctctgattctcttaacattaaggggaattctatttaaaaatttctagatgcttaaggcacgtgataattaagggttattcctatcaggaatagaaacaccatattagaacagttcttcctcagaggctactaaagaaagaaaattctgtttagagggtttgcctctgtggtctttttttaaaacagcagttatgtaatgtcaggtttaattggctgggagtcaggaagctggcttatttgtgcgcctcttgtgtcatatatacctgcagggctgagtggcccgtaaaaagcactcaagatttgcacacgggggctgctgcccaggaagtgtcctgcagaatggcagtttggc

SEQ ID NO: 7273 - DNA, 1032 bp, Homo sapiens
tgatcaaaaataaaaggacagaaaaaggttctactgaagtagagtcattgactgcattgggatacttgaaaattatttagtgcttattgcttagttcgagttcaatctgatttaaaaagtttatgagattctggatgagttgggaagagctattttgcactttgacttgatagtgatgagtgcccagaaacgttgagatgtgggccccaaaaggaaatgattctacttatgaaaaagaaacatcccgttgttttgtttcataggtcttaaccttatttttaatactctcaacatacctgtatagaatgtttatagatttttctctctaaaatttctcatatgattccagtacattatttttagttttaagttgaattctgagggtagcaccctaggatttttgcctcattttgaacctggaagtctacttgattgagcagataaatagggggaaataggaattcatccttagtgaatgaatgtgtagacagctgatatttaaaatttagctttaggttcatgtcatatgctaactctagaaaatggagcctggcaaagttttggattctgtctgctaagagggttctgggctcaaaggtccctgctgtcagtctgtagtctgaaaaggatacgtgttgccatgtaaactggctgggcagtatggattgccctctggggatcctgactcattggctctaattcacgtggtgcatgtcaatcagctgctccctgtggttgtggccagagggccgccataatttctccgggtcaatggtagaaaattgattttcttatgtatactgctaccagaaaatgaaacatttgctttccatgtaatgcaatattttatctgtacctggtttggttcaggagtcaatgtatatacatgcttaaatgaaaacaactcttcgtcttcccctgtcactttttattgtgaaaattttcatacatgaaaaaaaagtaaaagaataatacaaggaacatctctatcccctccaccgacattcagctattattaacattttgccatgt

SEQ ID NO: 7274 - DNA, 1062 bp, Homo sapiens
atgtgagattatcttaattagttaaatatatctagggaaaaaaaacagtctaggtgaaggaggacataaggtaatacactctaagtttgagctgcttgatagaaatgtgttcccacctgatagaatttccagagaacatgcaggaccgttttcaggaaatgatgaaattgggaccgttttttcatacctaagttaaaaatcactattttatactattactttctgtcgaagtctttcatgctatgtttgaactgtcactgtcagctgagcgctccttttaaatcttctgtcatttgctcagggcgtggaaatagtgtgatgaacacagcttgcctaaacttgaaaatcatgaagataaccagaacacagttaagggacgtgatttgataaaatatcttaaagacgtcatattccctaaggagtaaagtgagggtacagtttcctggaggaaagtttgggtggcagagatccccactctgcagtgcaagcttctttctatacagaggacgtggaaccaggtaagtccccagccctttccctgacaggaggtgacagaggctgcctcaggtctcaggccgagcagacgtagggaacttacacctcatacccaactccctcatcccaaaaagagcagcggaaaagtgaaaaaacagcacattgcaagccctcttccaaaatttttgagacaagtttcagatttcgcatattttttttctgattttggaatatttacatatacataataagttggctcagggatgggacccaaatctaaacaccacgttctttgttgtttgtttgtttgtttttggagacagagtctcgctctgtcatccaggctggagtgcagtggtacgatctcggtagactgcaacctccgcctcccaggttcaagcgattctcctgcctcggtctcctgagtagctggaattacaggcacgtgccaccacacccagctaatttttgtatttttagtagagatggggttttgtcatgttacccaggctggtctcgaactcctgatctcaagtgatcctcccgccttggcctcccaaagtgctg

SEQ ID NO: 7275 - DNA, 1054 bp, Homo sapiens
agtgtgtgtttaaaaaaaaaaagagagagccctttaatagtaactttatgtgaggcatttatgagcagcactgcattttatagcaaggatgcatttcataagctttgagaatggtttctcattttaattcaaagctgaatggtcttttttaaaaaatgtctgcaaaacctggttttgcaatatttatgctttcttagttagtatacgtaggaaatgaaataggcttctagagctttgcattccagtgttaaatatgcagctcaaatctttattgaaactattagatacaatttagtattgttttttacagaaagcatattgccaataatttgcttcacagcaattatctctcaattatctttttttattcttccaattatctttttattttctcccaattatctttttttattttctttaatgttttgcaggcacctgaatggacagaagaggacctcagccaactgacaagaagtatggttaagttcccaggagggactccaggtcgatgggaaaagattgcccacgaattgggtcgatctgtgacagatgtgagttcactgagatttgcattgtatagagagagaaaccagaacaagtcagctatgtagaaggcagacatagatgggttccacagtatctttggggaggggatacaacaatccttttaggacctgaaagtgaaccattaatgcaataagtgagaagcagatgtgagccagtcccctggtccacagttaacagctgtgtgaggaattctagtgtttagagacttaagctactgtaacctaatcaaaggaaaacaatgccagtttttatgtttatagtgacccctttaactgtggaaaaaatagttctcaaactgatcagaattaggagggttgtatttcagctggatctttttaacattgaagtacagattgcgattgctatttagacaggtggttctgattaattaaatgagcaatatacccataatgcaaatggtgttggcctttttgtttcaaggatgatagcaacagttcgtttgataagtagtttaaccagaagaaac

SEQ ID NO: 7276 - DNA, 1072 bp, Homo sapiens
tctatgaatatagtatgtttcttcattaattatttatatcttcattgatttatttcttcagtcttttgtagttgttagcaaattaaatcctgtgtgtgttttgttaggtttatacctgcttctctttattttgagtggttataaatggtgttggattttaatttcagtttccgcatgttcactgtgtgtaagaaattcaattgatttttgaatgcagatatttgttttgctaacttgctgaatttacttattagtgctaagattttttaatgtagattccttggattttctgtgtagacagttatgtcatctgaccgtggggacagatttacttcttcctttacaatctatgcattttatttccttttcctgccttatagtactagctagaattttggtactatgtacaacaaagtgtggtgggagtgggcatccttgccttattccaaaccttaaggggaaagcatttagtattacaccgttaagtatgatgtaagctgtaggtgttttgtagatgctttacatcagtggtccccaacctttttgtcaccagggaacgatttcgtggaagacagtttttccatgcacctggtggcagtgggggatggttttgtaatgaaactgtagttagattcttataaagattgtgcaacttagatccttgagaatctaatgccactgctgatctgacaggaagcagggcgcaggcagtaatgcttgtcctcctgccgctcacctcctgctaggcggtctggttcctaagtccatggcccagggtgttgaggacccctgctgtacatgaagttaataaagtttccctctattcctagttttctgagcattttttaaaatcatgacggggtgttgaattttgtgaagtgttttttttcctctatcaataattgtgattatgtgatatttcatttttggtgtattaatacgatatattacattattggactttgaatattgaaccagctatgcatacttggagtaaacaccacgaggacatggtatataattcttattgctgaattctatttgctactattttgttaaagaattttacatc

SEQ ID NO: 7277 - DNA, 1051 bp, Homo sapiens
ttataggcttttacctcattaaaaagctttgataaaatcatgtgtataaatacttcagccttgagccaccgtagtttaggggtagacataaaagcactgactagaaaatttattctgaatttgattcaattaatatgtaattcacggtaacaaacagctcttatcttgatctttctcctattgagatcctcctttttgttgctgacttcaatggtagagtctttactatagactagtagacaggtagactacacgtagctcctttagtttagatgtcactccaggagtcacatctttgggtgctgtaaaaacatgagatctggtatccacagtatattactggacacttttttgaagggtgtcagtgactagagctatctacagtgctttgaatttactcgatattataatgctgggaacgtacataaacattatctattttggataatttgttttctttttcctttttgtaatataggcacaaatagttttttttgtttttattttaaactccccgtgaaaaactgttatatttgtactgtaggtatgatgatattctgatcaatggacttccagattggcgacagcctgtattctactacaggcgggtgagaaaaatgagcaatgctgagctggcattactcttgttcattattctcacagtgggtcattatgctgtggtttggtcaatctacctggaaaaacaactggtaagtgttagtaataaatcaaatgaactagcctccttaattttatatggaattttggacatttatttttcaactgatgaaaatttctgtttctctctgtatacttctcattctaatagttttatactcaatgtttgacatatttctaagtcaagaagaacccatgaaataagaaaatattcttcttttaaaaaatgtggcacttaagtttgttataaaactttgtgaaagcccaaatatctagctgggaattagaaggtagagccatgttttcattatcaccttccaaatagaaatattttttatttaagactgattttagatttttttgtgtcacaggc

SEQ ID NO: 7278 - DNA, 1029 bp, Homo sapiens
tttcctctcgtctgtagtatgtgttatacttcttaatttttcttttgttggcttagtaaaatttctattaatttggaaatttttatatgcttttctgttacatagtggttaccttctcatccttaaagatgataataaaacctatacttttctattaataaatctaaatcaaataacagcttttactttaccacttacttacccttcttggtctgcttcctcttctttttttcttttttgaaaattctaggccactattaggttgtctcttatggcatatttcttctgttttaagaatacctacagacacatatattacaaatcacaaatcataatacttttgtatttattgttcactatttatacttttttattatgaaaaacttaaaacaaacagtagtagagagaatagtttaatgaattcctatattaatcatcactcatttaataattatcattttcctatattatcctttttttgaaggattttaaaatgaatatcagacattatgacattttattcctgagtgcttcactgtgcatctctttagataaagagatattaaatacccaggatactattatcccatccaatataatgaataattccttaacagcgtctagtagcagtctttattcagatgtccctagttgtcacaaatctgcctttttactctggtttaatttgaatcaggggccatacaagttccatacatgacatttggttgttctatctgttttttttttttttttttttttttgagacagtgtcttgctctgtcgcccaggctggagtgtagtggcgcgatctcggctcactgcaagctctgcctaccgggttcccgccattctcctgcctcagcctcccgagtagctgggactacaggcacctgccaccacgcctggctaattttttttttttttttttttttttgtatttttagtagagacggagtttcaccgtgttagccaggatggtctcgatctcctgaccttgtgatccgcccgccttggcctcccaaagtgctg

SEQ ID NO: 7279 - DNA, 1034 bp, Homo sapiens
tattcccactgtaaaaccatatatggcttcatattctgcaaagtcacaccctaaaaataacagtacctatgggaaaaatagggttgaggtacagcgttcaaaatctgtggaaccttataagcactcatgaaaataataatactttaaaaaatcaattaaatctcctctagcattttaacctggcatcatagttcttaaaatcctttaaacccttgttctcatgcttccttatttgggatatagattctttagatcagttgaataaaaatacatatgattcagataagagcccttttgaaaatgaaggaaatgtctttgcagcttcttgagctgcactcagagattgatcagatagctttacatagtagaaaccatagaagttcttgaagccacaaaaccagctactacttatattaatagaaggcacgtctaatagatttctagctggttttttttaaaagatcttcatattttactaaggttttgtctttaattgcaagaaaacttatcttggatcattaaaaaaaaatgaatgtgccaggggaaaaaaaaatcaagtcgaacttacatacctaactctgcattataagaatatcattccgctgtttactaattgtatataagatcattcaaattaaaaaagtcatagaggtaattaatctgtaataatctgagtaaccgattacacctcagtgacagtgtgtttagccagagtcggtatttcctatatatgtattttttatagccttagatgtttctgataacattgtataaacatatcacttactgaatttacagactctgaataaatggtggcttcatgatacagtttttaaaagtatttttaccttaggattcttgggtcttgtatcagctcttgtgggaagtttgtgtatgtttccagtcttttccctctttttcctgtgactcattctacttcttcatctactttagtagtcactagcactgccaggttttgtggaatctttgacagaaatgtaggattcctgccttttacatacaggaaataattt

SEQ ID NO: 7280 - DNA, 1078 bp, Homo sapiens
ttcttttttttgcctgtacctctgtcatatcaaaaaatcatcaccaaatctaatatcatgaagttttttcccatatattttcttctaagagttgtatagttttaactcctatgttagtccttgatctatttttaagtcaatttatatatatgatgtgaggcgtcaaagaaaagtagagcctgacagtagttaaagcagtaaaagcaaattttaatcaggaacagttgcagtaggagaaaagagacttcgttacagaatgaagcttaattctgaatacaacatggaaagtggagatttatagccaaggaacagggtcagtggatggaagattagaggaaacatcagagttaagggggtctctggtgaaaccaatttgacaaggtttttgccaaaggcaggccaaggtaatcaggtatcgcctgggggttggtggggaatgaggaatttggtcagatatattgagggtgatcggatatcaatggtagggtttctggcttaactctcttagcagaattcttgctaaaattggacgatgcaaaggaggagatagaagttcaaaggttgaggcctagctgtgaagatggtttagaggagcctgactagagtttagtcaaggagacagtctttgttaaaggtaagggttcaattttattcttttgcatgcagatatccagttttcctggcaccgtctgctgaaaaggctgtttttgaatacacatattatctcatgtaatctttaaaacagccctacttagtaaggcattttttccccattttacaaatgaggaaattgaatttcagagacttgcccagtctcagaaaactaacaacttgtggagcttatctgttaggctcaaagatcataactgttattttgtaattgtttcttactatttaaatgttacctattcttaaaggcccagcccaaatttaatcccattattaaagattttctccattgcttgctcttccaatcagatatgactgctctcaattccatggcaaatttttaatagattcttaatttatagtacaccgcaaatggtatgtgctgaatacatgccaagtgagtaaatga

SEQ ID NO: 7281 - DNA, 1050 bp, Homo sapiens
attgtactgtatttagtacaaaacaaatagggatttcatctatgcatttagtaatacctgaatataaaaataaagcagccaaataaaattcagatgaccttgggaatactacacaagtaaatcacgagagatgagcgaacgaagcactgggcaaattgttcgaaacaaagggaaagtttctcagctcacaagatgaaagctttgattttctcataaaagaaaactaataagaaatagttattttcctgaaatacaacgttccaaatgggagttggcgggggggagcaacagtattttaatacattttgcaatctgcaatgctgcttgattttgttgtataattttgcgatatgcttaaaaggtggaaaatagaattaagagggttggaaacgtgaagtaaaatattttggttctgatagtaccaatcagaaagcagaaacagccacacactgcctttattattcttcataaaggctgaggcagaaggggaaaatgacaccgaagtctctgtggcgcaatcggttagcgcgttcggctgttaaccgaaaggttggtggttcgagcccacccagggacgcgctctccttttatgagctggtcgcgggaagttttgcagaaatcgagttcaggcctccgggataagaaggggtggatttccagggaccaagcaaagaaaccaccgacccttacactacgcggccagccggcgagcccttcgctttcggccggtgcagagcggcctcctctcccccgctgtcctctcccggctgcaggtgagcgcggccactccttccccggggtcttcacggcggtctaggcctcgccagggtgctggagcggggacgcgcagaggccgcgcgggcccgtttgccgcgcgcgcccgccgctccagctctgcgcgtccccggaggcccgcgcgtacacggggaaggcggcccgggctggtcttgctcggcttcgtgacgcgtgaaatgtaacggggccaccgaaatgcatgtatttcaacagtgtcaagttcaagctgcaaactgaaaactcctacattttgtt

SEQ ID NO: 7282 - DNA, 1044 bp, Homo sapiens
cctcacaaccctatgtttgcaaatccccctttaaagatgggaaaccaagtcacagagaggtaacttaacttgccagagtcacatagctaataattggagttgcggagctacaacccaggcagcctggatctagtgtgttcacataaccatgggcttcagtttgtctcctacgtggaaagctgagccatgcctagtcgacctggggtcgggcatcactccgtatgacagtgaagggctcattttatccgaacgggaagcaggacagccaggctgcggggggaacggcgtccctctgctgatgcctgtggctgtgtttgtgcatttacacgtcacattagcggagatgaatgccacttggaatccaacccaccgcagcagattacctcatgcaagagagaaaacagccctgcctgtgctagcctggctctgcgttgggctgtatttactcacggggcctcagctggccagggccttggagcagctctggggcccccgacccgggcaggaatcccagctcaggactagacgcacagaggaggacggggtggggaagagcagttccctcccataccctcgtcccctcccagcaagtacagagggtcgtacagcaatcgtcccgccttacttagaggctctgatctgcacaaaactggccagagctgaattcagcgcaaataaagactcggcccgccgccacttcagaaaggttgctgaccgctggctggaagccggcctcggagagtccacagctgagaagcatttctgagctgtctttagttagccctgggggtttcttccaccctctggctgtttctgcactgaactagaaaagatatcaaagacactcattaaagaaccagacccagtgactacaagcttggaaaactctaagcgcaaataatccagtgtttaaaagcaaagtgtagaatctgttgctacattaagctgtcgctgcccacagttaattttctgctgctctgcagacgtcatctttgtaggcagttttacaccaagagtttattaagttcattaaatcatagtata

SEQ ID NO: 7283 - DNA, 1048 bp, Homo sapiens
aattaaaatcttccacaagccacgggaagtttctctgcttggactctacccctaaagcctccccgtcggcctccgaggtagactcaggtcatgctagacaacccagagctctaaggcagagttttgaacaccactgcagtaagagcacaaactgctgagatcaagggccatgttttcctccactttgtacctctgcactcagcatagggcctggcacaaaagaggtacaaataactgtgtgtctttgaaggaatctccaaagtaaatggggtcagagagtggctgtgggggactgatgtatagcaagcaaggaaagagtgttcatcagtaactcttaagacgggagaaaacaatgagcattgcagaaaaaagtcagcaggtgaggatgtgcccacagaaggacgtaatgtggggaaagaggcacttaacgctcctgtggtcccactgcagccagctagtgggactctttaagataacaggactgactatttctggcagttgatacaaggagtaaagtgtggggctgatccagtgttgagtaagttactgctcaagtaagtgatggtcaggttttctaacttccagcaggtggacaagaaccacagaaacacaggtgagcaagacagagtcagggctagagaagcggccagtggccaggaatacctgcagagaggggacacaggccggacagagagccatggtcagggagggatgagaagcccattccgcatgggctgcgaagcagagtgggtgctgagctggctctctgctccgcctggagccattttcatattttctgcgtgtgaaacccaatgcctcccatgcgcatgtttttattattgccttgtgtttcagggctctacagtggctagagaagctagtgacaaagaaaaggtaagtaccttgctgtatgtctccccatgtcctgggggcatgatcacatactcccaatcacctttactctttatttctagtctcccacccctgctattgtggttcttcctgttccccattctgctgccaccagcgagaaacactgtattgaccc

SEQ ID NO: 7284 - DNA, 1048 bp, Homo sapiens
aagaagccagtcaggagagagaccagagatggagaaagacatggagtcaaagaagggtttgtgtttctttttactttttattgtaaaaatgttcaagcagacagaaaattggtagcatatacccatcacttagattgaacaattattaacattttaccacatttgcatcattttatttttgcagaaatgtttcaaaagtaaatcacagacacatttcctctgtaaatactttgatatgcttctctgaaacataaggacttctcaggttaagaaaattgccaataaattccttcctatcaccaaatatctagtgagtggcataatcaggtgtccccagttgccctcaaagtgtacgttcaagccaggatccaggcggtgccagaccgtgcatctctgcaattgagagggcgttttgtgttttgtttttgttgctttaatgagagaaacttcagcacatttaagcactgttgagaagctgctagtggagggagagaggttgaggatcctggactgagagggaggatgctcaagaacccgacaagatgcgtcgcagtgtgactggagagaccactctcagaaggggatccaccgtgcaagcactgagtgtctttgcctatttgtgttgctgtgaggaatacctgaggctgggtgattcataaggaaaagaggtttatttggcttgcaattctgcagactgtacaagaagcatggtgtcagcatctgtcgctggtgagaccctcaggaagcttctactcatgttggaaggcagtagggagctggcatggcttggcgagaggcaaggaaggagaggggaaggctcttttccataagcagttctccctatggcaccaagccatttatgagggacccacccccatgacccagtcacctcccaccgagcaccacctccaacattggggatcacattgcaacatgaggtttagaggggacaaatattcaaactgtatcactgggagatggggctaccggaagtcaagccattcccctcccatggcacccttttccacctgaagtaggataacttgca

SEQ ID NO: 7285 - DNA, 1049 bp, Homo sapiens
tgtgcgtgcgcgcgtgtgtgctcgcgcatgtgtgtaaccagtgcttctagattcagaactttttccaattcattagggcatttttaaattgcatgataggtttgtaatatgctcagggttgaatcagtgtgtcatcaaggttctgatcattgtttggccagcatgatatccatcgtcatactttaaaggtgtgtttcaggatgaatgctgcctgggaggcctgttctgtgactatagccgcagtcctgtgtctaccattaccactgcccccttaagccctgatcaccctgaggtctgggatttcatgcataattatccagtcaaagtatttgtttgtacctaccacatgtcaggctctgtgctagccgttttagggaatgcagagagaagaaagggtgaagcatcactttctttaaaaactattgcataccagattctgtattagatgctaacgagatttacagaaacccagcatcttgatttgtaatgttcttcatgaaaatctgcacccctctttccagtctcttatactcatttgatcgtctcttatgtttatacccagagagactggaaagaggggtgcagattttcatgaagaacattaaacagccctgggaagtcaaacggaggcttcagttacatttagtagctgccagagagggttgcctcccagaaaccaaaaagttatgcaggagggagctgatgctgttaaacctaaatagaccacacatttgaaagtgaggcctcttgttcactgtggaggataataccaggtttgcttttcccctactgtgactcctgaattagaatccctcattattgacatctgatgccctttcttctttgtgtttgtaacagagaattctaattttaaaataattaattttaagagctaacattttaaacttttgatattcttatttcaagtttagaaataaaattctaaagtgttaagaccttcagtgtatactaaacttgaagtggggcagcaggaattctgcctttatctctagaatatcaagtctatcctctgaaactttcacttgtag

SEQ ID NO: 7286 - DNA, 1025 bp, Homo sapiens
ttggcaactgtatttctattaaaaaaagaaaaaaaagaaagaaaaagtgtgtattcagagtcacttcagtactgcagaggtatactcttcttccctcctcagtcgtatatttctttcccagtgtctgtacctcttaaaattcttcagtagggtcagggaccctgagttccagctgaaaacaggatcgtaaatctggggctgtatcccagtcttttggctacttggtttggaagaaaggagggtcgttgtgacagctctggctccagggtcacctcgcaggcccctgtatactgcagggattcaggcggcaggcgggcaggggccaggacctggggcttcagctgcctggcacattgttactgcccagacagttcaatcctcatgcccagttcaagtaacaggtatcatttggcacatgtggcgccaaatgactaaaagcaaccttgttttcctctcctggagcttgccaatgtgcctttgctgagtagagtctcccaccggccgcctctgtcactcctgggtactggctgctgaagactgcgtatatcggaaaaaaaccaactctctttctgagcttatcaatgtgagctgctttttgaatactctttcccaactgacttggaaagtaggatcagtgacctaggctctcatagtgttttggaggacactggatagctgaaggggaacaggcattgcctgctgtgtttatttttccaaactgcttgcattttggacaagcggctctaaatcaatgtggtggttaggggctccatcgtctggtttatctcgtattcagacctttccattcagccaagtgggtaaatggtcccgacttgtcttgtttgtgtgaccacctttttgctacacctgaaaaaagtaggtattggtctgtggagaccactctgattaaagcagagcatggttaagtagtaacctatgcagttgacccctactggtgaatttaaacttcttaaaaagtttttaagataaatgaaaaggataatgaaatgaaaaatgaaaacatt

SEQ ID NO: 7287 - DNA, 1047 bp, Homo sapiens
agttcgtgtatgtgtgtatgtgtgtgtatatatatatgtgtgtgtgtgtgtgtgtgtgtatatatatatgtatatatatatatgtatatatatatgtatatatatgtatatatatatatgtatatatatatatgtgtatatatatgtatatatatatgtatatatatatatgtatatatatatgtatatatatatatgtatatatatatacgtatatatatatatgtatatatacatatgtatatatatatatatgtatatatatggagagagagagagagccttaagtgggcatacccctgaccctagtaattcttcctctaggaatttattatgatttagctaattaggaatgtctttttagaagaatgtatatacagtgatatttatcatgcaactctgttgataatggccaaaatggggggaaaattgtgaatgcacaacagtgagattaaatgatggtgtagttacacaattgagtcctatgtcattacaaatcatgtgactgtgtatttatgtggaatattaatgtagaattaatttgcaaaatagtatgtttagtgtgctttccgcttttataaaaatatttatggaacactgtatagaaaaatgtctagaagaatatatatcaaaaacatttatagtgactatccctagatgatagtcagtgatttttattttttctcttcgtattcttttagctttctgatataagccccaaacttttaatgaaatatgctacctacatacatttgtcagtttacaaatataatatataatttgttctttctgcaatgaacatgtgttacttttataattagaaaaaagttgaattggctttgttcatttgagatattaagaaaaagccaaacaaccaaccatatggaaattatacacaaaagatttctccaaagttagaggaagaggagaatcaaggtagtgaacatttattaggctctaattgtatgccagttcttggcatacattatttcaactaagcctcgatttactaccttagcaaatatatatcagatacctcttcctatg

SEQ ID NO: 7288 - DNA, 1018 bp, Homo sapiens
ggtctggtcttctttttttttttttttttttttttgctcccaagtgtcttgtctcttgtctcttctctgatcaccacagcatggttcttaggagtcacagtgtctggtatatacggaaagagtgtttttggagggagaattcaccaaaagaacatgatacaagccaaaaggggttattattagagaagaacagtgttgatatgaaggctagttaatgctttgtgaatacccaccatgcacaagacagtgtctgctggttgctggaagtccaagatgatcagtttgtgtccctgtggctaaatgtttggttgttagtctgcatgaaatagatatgacaccaaattagaaataggagaaagcagcagaagaaaagcaaaggttctgtgtataaccaagacaatggggttaaaaaaacacacacacattgctgaagaaagtaagttaagtaagttgagctttcatttgcaaaatgactttttatttggctgtaatattcctctgggatggctctgtgaattcagtaaaacaaagctaaagaaaaacctattctgtttgagggaccgtataattaaccatagaaatgagtgccatccagtgtattactgaagaaaaaggattaaatagtggtatgaataaaaatagtatccctttttattctctctaggctaaaattataaggactgtcagtcattttgttaagggtctagtttattattggctgtgttgggaatagtgctttctatcttcctattatgtaatagtccacaattacatgaatagtgggatttttattttttttattttttattttttttcctcagaagagcctggtgttgaggggctgcaggagcagaacaggaagttatggttgttttggaattgtgtgtggtgtatgtttaaattgtattagaataatttttattctttttaaactgtctttctggttgtctcatgctactttgagtttaatataccctgggcttgatgcaagaccccgggccagggccagagcacctgg

SEQ ID NO: 7289 - DNA, 1018 bp, Homo sapiens
atggtggcacacacctgtagcctgaactactcaggaggctgaggtgggaggatcatctgagtccaggaggtccaggctgcagggagccatggttgtacagtgtactgtagcttgggtgacagatggaggctcccactaaatgtgaaacaataaaaattaaaatgcagtgtctaattcagcagatctgttgggagtgctgcctgagactgtgcatttatcatactctcgggtggtactgatgctgcaggtccacaggctacatagcagtagaaggaagaactttaccactaaggattcctcccccagccccaactgtatgtgatgagcccttagaagaatggtggccccatgatagattagagaatttgggagaagaaattgtaggttggaaagggacacaagcaatttagatttaagaatgtggaattgcaggtgatggtggtgggtggatcctgcagttacagtaccatgtaggatgctggaaaggtgtgattggagctcgggagccactagggctgggatagaccattgagacctgcccgtacagaatcggtaagtcagatctccaccggaggagcagggacactggggacacttggctttgagggaaggacagaggaagaagaaacaggaggagaaaacagaggtcggcacaattagatgttcccaagtgcttgaaagtcatggctgtgcttgtggttgattgcgggtggctgtgaaagcttaaagacttaaggagtgaatgagtggaagtagaggcaattcctcttttttggaaggtaagtagaaggaaggtgaaagatgccattttgttaggaatccctggggagtttccttgaatccgtctcttcgtttccattctcacttctgtcactcctaaccagatttgtttccctctttcctagactgatattaaacccccctagcttatttccctgtgtctgcctttatcctcatttcttttcttttttgtactaggaactcctatggcagtccagtgaaggccatagactcctca

SEQ ID NO: 7290 - DNA, 1036 bp, Homo sapiens
ctaatatttttatccaactgtctttattttgagggctctgagttgacataagaaaggtctgtttcacagccttttttttcaaaatgtctattttctttactatattatttttgaaaaaagaatggaggtgtaatataaacatgaaatctaaaacccttagatgccatgtatttctggtttgatttcattttaggtgacaatgtctgatattagataaatgttttatatgaccttctgtgcaccaaagtttatagtataatgtgagaataaatatgtcagcagtcttaagaacaaacaagcatggtgttgtatacgagcatcttccacatactgtggtaaaacgctcattgaatctgcgctttaagtttttcttaaattctaactgttgaccttgggcatgttaaggtcaggttttggcatcagtgtttgcatctgtgaactgaggttgtttggatgatttccaagtctaactcaagattctgttttttcagtctactaggtgcacagtgttatactaggatttgtagaatactatataaaagttgtcttactattataaccttccaaatgcagcaacattcagggaattttcaagaccttgactacaggggaaggaaatctatggtgattttaagagactgtgaactaagggtttgttatattgaatgtagctgaactgcattgcagtctattaagccaaagtcgatttgattgaaacataacaacttgcaattaaggtgaaaatgttcaagtccattgaggtggtaatgaaaatcttgatttgggcaatggtcatagtcgggagtaagcctgccattgtgtggttaatttgatatgttactgctttgtaacttaaaatacccatcagtgaatggatcagtgccaatttttaagtattttaagcagagaatataactgaatacataaaggaaaagacttaaggcagttttgtcttgttacatttagaattaaactaaaaatgatcaaacagtaagcgtcttaagatgatattttaatagtgtggggaggatgttga

SEQ ID NO: 7291 - DNA, 1713 bp, Homo sapiens
tacaattggaaaaccatagaatattaaattgaacaaggacaaaatgtcttggtcaaaggaagcaggaggctttatttagttctccctcatatattaaaaacataaaagttatttaggttcagtgaaatatgtattatcttgttcatacatgtttgcagccaaattaatattattgtttccagtcaaatggcttctgacatcataaggtacaatgagtagaaaaatgttttttcagtcaagccaagtatttaagtgccatgtaagacactttactagatgttgttggagggtgggggaggaatggacaggctgtgtaaatataggatggttcctgcagggaacttacattttagaaatttacatttcaaaactattagaactctttcctatgttgtggtttaaaattgatccttaaagggaaactagattacaattcacctaggcaatttaagataaatttgttttattgttcttgtcgtcagataaatatgctgattttattgaagccaatcgtaaagaagatcctctagatcgtctgaaaacattaaaaagactagtaggtattattttatattttgggggatacaactaaaattcagcctctgaatccattgtgaaaataatctgtttcagattcacgatttgcctgaacatcattatgaaacacttaagttcctttcagctcatctgaagacagtggcagaaaattcagaaaaaaataaggtatgtaaaatgcttattgaagaaatgtacttttagtggctttagtttaaaagatatgcttcattacttcatgccaaatagtcaataaaaggtttgtaattcaacatcaaactgggtaagtccttcttaaaattgtttttaaaagcaaaagatcccaaaataccagttgtcaccattttaaaaggatattttaaaagatttcttttatggttattcagtaagaaaaatgaaaaagtcagaaattttacttctctcattttttagctgtatatcaatattttgaagaggtaacatatgcatacgctacaacagtcaaaaggccaaatagaatacagggaaaacagacataaacagataagtcattttcattccttttaacaccaccacattttctttgtcaaacacaacaaaatatattctttatattgtctaatattcagttcacattcagtttttcttttttttaaattatattagagacagggtctcaccatgttgcccaggctagtctcaaacttctgggctcaagcaattcacctgcctcccaaagtgctgggattataggcatgagccaccatgcgcagccccattcagtttttcttgattgtaaaagtgtctttgtagggttatttgcttaagtcaatatccaaacaaggtctacacatggtatttggttgacaggttgtagtcttaacttagttttttgatgattattgcctaaatccattatatcatcagagattttaaaatgatgattttctaactcaagggcattacttcttaaagtactgaagcagtcgttttaatttctggagaagaaaataaaagaataccacaagctcaggaatattgctgacagtcttttctgagtgatttttccttaaggtagagaaagatcagtttaagaaagatagatcagtttagtgactgtgcatgttctggaagttgtaaggattgattatgagaagagtgtcaacctctattacctgc

SEQ ID NO: 7292 - DNA, 1027 bp, Homo sapiens
tatacttctattactaaacagtaatatttcttcccaaatttgaataaaggagtcatctttaaaatattagttctagaatagcattacccaagtagatattctaattatgttaaaacctctgggaaaaaaatggcctccatggtgaataagtttatattttcctttcgaatttcacaatgtacattagtgtcgtcgtggttttgagaaatcaaaaagcttgccaagtggccctacatcattgaccatagggacctcctctcccccatcctccttttcaggtggtatataataaaactacacaaggatgttgtgggaaatgctgtaccagacagtacagtattctctcatccagacacaattttcctattgcagaaaagtattggtatgattctaatcagcatggaaaagatagacttggtgtgtcaatgcacacacccaaaatgcatgttgggattaactgtattcatgccataaaaatactatgtagacatattttattttatatggctagctttaatttgtcactgcattctagtctctgttctataatatttattataggttaacaagaattactctggaagtaatatttttatgtctatccagtagttatttttgcaaactaatacaatagtacaaaaggcacagtgttgaaagatcttaatttttgagtgaaacttacttaaaagaagtcattttcccccctgaatcttagtgtaaaggcagctgcagtctgctgacagcttgtggttatgctctgatttactggggaaggaggaggttgtactattttaaatgcataatagagcattcgtttcgtcatctggaagcagagatggaagaagctggggggaaatgagagacatcactgttgctttcgtggagggaagctttgtagcatgttatcagacagcagtgcatattgaagaaaatatctgttaggaatgcatgtcaccagatgtattttgctttcaagaatggtagacacatcaaacaagaatcagataaaagcctgagaaaaagatgt

SEQ ID NO: 7293 - DNA, 1047 bp, Homo sapiens
aactaccgtgtacctccttcttcccccacaatacttatgctgtttgtcacttagcttaaatgtcctctcatctgcgaatttttccttgacttctatttcactgaaacaactagttgttctcaaaatttaatgtgtattaggatcatctgggaaacttgttgacagagcagatttctggtcagactccaaaacatccatttttagcaaacaccttagatgttaatgccaatgatccatggaaaacagcttgtgaaattctgacttacggggttgatcatgctctcctcattgccatgactgtattttgtatttgtctctgattgttttttatactatactgttatttgtttgtatgtctttctcctcctaccagactccctgaagggaaaggaatatgtcttgttcattgttacattttaatgcttagcacaatgcagtattaagaagcagtagaggctgggcacggtggctcacgcctgtaatcccagcactttgggaggccagggcgggtgaatcacggggtcaggagttcgagaccagcctggccaatatggtgaaaccccgtctctactaaaacatacaaaaattagcaggcggggtggtgtacacctgtagtcccagctactcaggaggctgaggcaggagaatcactcgaacccgggatgtggaggttgcagtgagccaagattgcaccactgcactccagcctgggtgacagagtgagactccatctcaaaaaaacaaaacaaaacaaaacaaaacaaaaaacaaaagccatggagtgagtaccgcctgtgtaatcatctttggcacttgttagctgtttgaccttggagactttatttaatccctctaagcttcagtttcctcttttatgaatggtagtagtagtacttacttgctgtggaaattagctctgagatacagtatttagtgtggcaactgacatacggaatgtagccagtaaatggaaagcattacagtgttgtggttgtcattatgttatggaagaagcaaaataaatgtttgaattaaatgaaaacccct

SEQ ID NO: 7294 - DNA, 1048 bp, Homo sapiens
ccaaggcaggagaacagcttgaggccaggaggttgagaacagcctgggtaacatagcaagatctctatctacaaaacaaaaaaaagaaagttctttactctcacataattcattcttgaaaatacgtaagaaagaggattctgggccgggcgcagtggcttacgcctgtaattccagcactttgggaggccgaggtgggcagatcacctgaggttgggagttcgagaccagcctgaccaacatggagaaaccctatctctactaaaaatccaaaattagccgggtgtggtggcacatgcctgtaatcccagctactcgcaaggctgaggcaggagaatcgcttgaacccgggaggcggagattgcagtgagccgagatccgccatcacactccatcttgggcaacaagagtgaaattccatctcaaaaaaaagaaagaggattctgttcctttgaaaggtagataacaataaaagatccatttgtatatcttctttggacaatagtgctgctgtgaacatgcatgcacaggtgtttgtctgaattcttgttttcaatttttggaggttatacctaggaatagagttgctaggtcacatggtaatcctatgtttcatattttgaggaactgccaaaccgttttccacagtggctataccatttctatgtctccaccagcaatgaatgagggttctaatttctgtacatcctctccaacatgtgttgttttccatttttgtattatagccaacccagtgggtgtgaagtggtatctcactgtggttttcacttgtatttccttaatgcctaatgactttgggcatctttttgtgtgcttgtcgccatttgtgtatgttgtgtggagaaatttctgttcaaatccattgcctgtttttaaattgggttgttttttgttgttgaggtataagtatttttttttaatactttagggtacatgtgcacaatgtgcaggttttttacatatgtatacatgtgccatgttggtgtgctgcacccgttaactcgtcatttacattaggtatatctcc

SEQ ID NO: 7295 - DNA, 1089 bp, Homo sapiens
tgagagtcatagaattaaatgttttttactgtggacttcaaagttttatgaattccattgtctcatcttaatttgaacatgtaatggttttgttgttaattgtatgtgtttttgtggaggaatatatcattataattccaaggagagcacttaagatttttatttcaattagtaatctttctagatgaggtgattattttaggtaagaaatgctgtgtgttttatcaattgggtttattgagtcaaatattgaaaagaagagggtttgggttattcttgtagttaatgttactgttgatttaaacattaatgaacgtaaaaggacaatcaggctggagataaaattatttcttaataactgattttaaatcaacttgaatgagttaaaattcacactcaacaaaatgcacccattaaaaacttttatttctagataattttagacaacaaagttgcaaaaatagtacagagaattttcatgtatcctttattttactttccctagtgttaaaaacttacaataccatggcaggggcgggcgcagtcgctcacgcctgtaatcccagcactttgggaggctgaggcgggtggatcacaaggtcaggagatcgagactatcctggctaacacagcgaaaatcctgtctttactaaaaatacaaaatattagccgggtgtggtggcgggcgcctgtaatcccagctactcaggaggctgaggcaggagaatggcgtgaacctgggaggcagagcttgcagtgagccgagatcgctccactgcactccagcctgggggacagggcgagactccgtctcaaaaaacaaaacaaaacaaaacaaacttacaataccatggtacaatcaacaatactaagcaattagcattggtacaatactactatgtaaactacagactttatttggatgtcaccagtttttccgctagtatccttgttctcttccggaatcccacgttgtattcacttgttgtgtccctttagtctttccttgtattttattactagtactgatcagttattttttagaatgtccttcattttcagtttatctgatgttttctccctagttca

SEQ ID NO: 7296 - DNA, 1032 bp, Homo sapiens
cagacagggccccagtggggaattaatttttctcgtgaatgttacaccaaaacaactttgaatgaaatgatgctattccaggacatgcttacgcttgttaacagcatggtcattggcatcaaaagagcctgggtttgagttccatttctgcctcctgttagatctgtgaccttggataagtcgactaacacaatagtagtaccttcctcacaggctgtgtgatgattaaatgatacaatacttgtaacacacttaacatagaaattgacactgtaattgctcaataaattttagctattaatgctattatttaatacagatgttcttgtaaatagggctctgtcttgtaaattttacatggaaaatatatattggaatcttttccattttaattatgaaattttataaattcacttcaaacgaattaaaaattttaatattgtatagcttttagaaaatgtgtaattaatataacagtgtccttattttgtcacttaactggcaacctcagtctcagactagatcttataatcagaagaagaaaaaaaaaaaacattgggcagccaaaataaaggtcaaaaaattatgtaataaattatcagcccttcaccgaacgtctgtttttctttctaaggtacatggtagctccagtatggtagaggctcagcaaatatttgaaaatgtatttttagactagtttttaaaggtttcttttctaattttccagctagaggtagataacatggcagcaagacagcttggtaacaatgaaagagaccaagtagataaacttcaaaattgaatacaagaacttaaatatgtagcaatttgggaccaatccatttatatagacagctctgggtcctgtaatatcccttaaaggcacatttaagtatagtacagtaagtgatgacctgacctttccatctgtccaactgcctacttgacaacttcacttggatatctccattagaaatctcgcactcaaatgccaaaaactgaactcctgatgtcttacccctaaattggctt

SEQ ID NO: 7297 - DNA, 1073 bp, Homo sapiens
ttgctgttcataatagtttttgatgatcgtttgtatttctgtggtatcagttgtaacgtctcctttttcatatctgatttttttatttgggtcttctctcttttctttgttacaacctctatggaaaactgtgtggagatttcttaaagaagtaaaaatggaactaccatttgacctaggaatctactcaaaggaaaagaaatccacttatcaaaaagatatctgctcttgtatgtttgttgcagcactattcacagtagcaaagatatggaatcaacctaagtgtccatcagtggaggaatagacaaagacaatgtggtatatttggaatggaagactattcatggaatactattcagccataagaaagaatgaaattatatcttttgcagcaatgtggatggaactggaggacattatcttaagtgaaacaaaccaagcacagaaagttgaatattgcatgttctcgctcataagtgggtgctaaaaatttgtacacatgggtgtagagagtggaaggatagacaatggagactcagaagggtgacagagtgggagcaggtgaatgacgataaattagttaatgggtacagtgtgtgttatttgggtgataaatatacgaaaagccaacttgaccactacactatctatgcagataacaaaattgcatatgataccccataaatttgtacaaataataataatagagttgagccatgggatcagccagtattcaagaattagccaggaaatcaagaattttggttggtctagcaagtcagttaggcagagttcaattaagccagcatctatggtaattatagttttgggagttgatgaggtcattgagggagggaagagggtcaaagtccagaatctgaggaacaccaccaattaagggacggacagaggccgacaaaccagccaccaaggcgaactagttagaaacaagcttttcagtagcctcagttttcagattttgaggactttgaatttgatctttatatttagcctttggcaagcttccagcagcagcattgtttaacctagcttctctcaaatttattttgcta

SEQ ID NO: 7298 - DNA, 1048 bp, Homo sapiens
aatcaacaaagaaacaaaaatctgtccacaggagactgaatttttagggaaccaaagctgtttcaagccaaaatcaggggcatgaatgagcagagtgaagagtgatcaaaccattaacgtaatgttactcatatcattactgcagtccaaatgacaaaagtgacatagatttattttagattgttaacatttgtcccgatctgaaccttggaataaggaaactactcctataatccttataaaaagagacattgtctcctaacaccctgcattcattaatttgtagtacttccagatacccttatttttagctcattttgttatttttaaatgattcttgagtagcataaactttaacacaccaagcttttatttctaatcattgcatgttttattatagtgcatgctgtacttaagttagagctttcttaaattctgttaacttataagtttccatctagacttatttttgattcaaatcaatcatatgaatctttttagttgctgatagtccaactccaccgccaccacctccaccagatgacattcccatgtttgatgactctccacctcccccaccaccaccaccagtggattatgaagatgaggaggctgcagtagttcagtataatgatccatatgcagatggggatcctgcttgggcccccaagaattatattgagaaaggtaaggtacagtcattgagttgatgtgaaggaaaataacctaattgtagaaatttagaactataaagaacatctaatccaatgtttctcagccttttaaactgccttaccaaccaagatgatttacttaaaccttacttcctaagttttgtattattcccagtgtacagggggattctttctttgtattttaaataaaagttgcagtgttagatttgctttcaaactacatatgcgttcagctgaagattaacttgctggacggcattttatagatgaaacagctaaggcacaaaaatggagttatatgtaattagtaaagattttaaaagttctgtcaagctctattgattacctttcat

SEQ ID NO: 7299 - DNA, 1050 bp, Homo sapiens
ccagtagtcttaatgctgctttattttcttagttttgtgttctctctaaaggatcattgttggcttaaatatttccagagcattgtagagatgtgtaaaggtagaaattttggtagtagttaatgaacacatgccaggccaaaattattagaaggaaaagtttaagtttattttaaaattagtgttttgaggatagtgagacattgcttacagctttcgaattatttttgtatcttttgcccacttttctatttagaagtttcttttcttactgacttgtaagaatcctttgttttctgtttgaagagagtagaccctcatatattggcaaatatttactcatattgctgtttggcttttgactttgatgttttctggtatttaagaaataaacatacagaattttaaaaattatatctaaatatattaatatttttcttatcgctactaggcttcatgcttacgattgccatactccaagattaatattccattgcattttcttattttgtgatgtaaattttagtgttttggtatttgtatttaaatatatctgggttttatttaaatagtatttactgtgttaatgcattttatgctatgaaataaacggtacatgttagtttaataggaatttaaaaatatgcaaaatatcccaaagtaaatctggttcgatttttgggaataataataagatatgtataagagaatcccagcatagagaaactaccagaacctattcataaaggagaatgaaaagaagatgatctttgtaagtgagcacaaggtttgagaggaagctagaatagagaaggcttgaatacttagcaaagaaatttacatttattttgatgaacactagtaataattaacagcctggatcataatttacaaaggacttttcatatgtagttggccctttgtatctctaagtttgcatctgtggatttagccaaccttggataaaaaaattccagaaagaaaaagtaaaaaatacgaggacaatacaagagtaaaaaataatacaaataaatacaatataactactat

SEQ ID NO: 7300 - DNA, 1042 bp, Homo sapiens
gggaccatgtgggatgctcttttaatagggtttaaacaggtgagatgtacacatttttcattttgttttctcaagtttacttcttttgtaaagatctccatggttacaccatagagagcagactggaaaaaggccagactgggtacaagtggaccaattagaagactgttgcaatagccaaggtgagagatgatagtagattgagtaggattaaagtgttagaaacagatttctggtatttaaaggtagatgtgacaggatttagtaaaattaaacatgaagtaaatgctagatgtctgacttacataaaccaatagagaattgaagtaggagcattgaaataggattgaggagcctgtgtgtttgattttgaacacgttcactttaaggtaccattgaaatatctgagagaatgtcagttttatacacgaacctatagcttagaggagggttcttgaatagataaagaaaagtttgtgtgtatatatggtaatttaagcctgaatgtggatgagtttgccgaggggtcataaagaggaaaatgaactgggagacactgtctgtaacgtgaccttagaaaggagacagagaatgagtgttcgggagagttagaaacaaacctaggtaaatactggtccatcttttccaactcccattgaaatctcaatattttcccttctatggagttagggattcctcaacttaattctgtgctgagcagaactgagctaaaatttgtactagtgctggacctattagaaaagggaggagtttaaaagatgtgtagagaggcggggcatggtggctcatgcctgtaatcccagcactttaggaggccgaggcgggcaaatcacttgaagtcaagtcaggagtttgagaccagcctggccaacatggtgaagccccgtctctacaaaacatacaaaaataagccgggtgtgggggcacatgcctgtagtcccagctactcgggagtcatgagacatgagaatcgcttgaacctgggaggcagagggcgcagtgagccgagatcgcaccactg

SEQ ID NO: 7301 - DNA, 1033 bp, Homo sapiens
tcctctctaaatataattgcttttagaatattttaatgtttcctttagaacatttgtttaccacacaattaattttatttattcaattcccaatctacttatttttataaaagccttgcttgaccatttaaaaagaagttttcaaatttggtctcctaatttccataatcttttcttcaactcttaattagagtagagttcaacttacttttattcatactattttagcttttctctcatctcggagaaggtgttgtgttttcatgcctcttttccctggcttatgctgtcccctgtgcttggattttgacctttttccccactctccttttttctctttcacctgccagttatggctggcaaaaatgaggtttctttcatggagtcttttgatgttgcttcaggaatattaatcattcttttctgtatgctatttgtgtgtaattaaagacaaaaattacacttattcaaaagaataaatgtaatatatgttatgcatatataataaatcagacatctctgaatccatcgttaaaactaaaaactagaaaatgaccaattctgtttcttttctctgtatacttctcaccaaccacaaaagggatgtttatcattcccttgcactaaacatttttttaaatcgcatgtatgtgtatcactaaacaattattgtttaattttgcttgtgtttgggcttataacaatggattcatcctgtatgtagtctagcatggcttgctttttttattcagcattataatttctaagatttatccgtattacatatacatagttcattcattagtagtttgttcattctcattatatagtgtataatatttcaagtataaatatgccatttatttgcatttaaatgtaaaggatctggaattagttttttcctatggtttgaggtagggatccattttcagtgtttttttctatatggcaaaatagttgctctactcaaataaaacattcttcttactgtgctatcactgtaagataccaagtttccttataagcatgattt

SEQ ID NO: 7302 - DNA, 1035 bp, Homo sapiens
catgtgccattgtgcccagcttattttcatgtttggtggtatcctgttgcctttttagattttaggacaaaattgatatagattggaactttgctaaaataattttttttgtagaacagaatctagtgtagagtgattcatgctggttcttgaggacttgcacaatgtctggcaaatgactggtttgcagtgtttactgaattaaaataaatctcttggccggacatggtggcctgtaatcccagcactttgggaggctgaggtgagtggatcatttgaggtcaggagtttgagaccagcctggccaacatggtgaaaccccgtctctactaaaaatacaaaaattaggcgggcgtgctagcaggcacctgtaatcccacctactcaggaggctaaggcaggagaatcgcctcaactcgggaggcagaagttgcagtgagctgagatcccaccagtgtacctcagcctgggcgacagagtaagactccgtcacacacacacacacacacacacacacacacacaaagtctttgcaaaattacttaggaaaaatataatagaacctagtttttagttgattcttatacatggattataaccagaggatcactgtacattttatgtataggcagtgattattttgcatggttattggagattataaaaaatggtgatgcatgctcaaggtatacaaaacaatcttactagtcaatgggtaaaattatggttgttctgtgatctgtaaaattttttgtcaaaacattaaaatctctctttttgttataaatgaatagagaaatgaaaaaaaagttatgctaatgtttagtataccataatgtaaaacattcgaggtattgagaattaaagggttttatttcttaagaaagtagtttgaatagtgcttgctaccttctcactgtgtaagttgttatgaagcacacatttttttctgtgccttggcaaattgtcattctcctttctctgggtggatcagctcctctcaacattttatcctttggattttaaatgttgtga

SEQ ID NO: 7303 - DNA, 1024 bp, Homo sapiens
gtccatttcattgtaagtggattgggagcttgaggctgacagtaaagtccttatgatgtaatgcagtgaattggtgatggaaagggtctaggcaaggagaaccagttggtgcagtgtgtctctgatactgtgactacagttagtggcccctttagtggatgagctactcaggagagagtggttcccagctggcacatagggatttctgccatggcttaattcagtagtatcctgagactatcatattggtacagtgagtttttttttattgaatttctctagtaaaataatataactttgcctttctatagaatatatatttaatgaatgttaatctaaataagtatttgttgtttttgttcttatttcaggctacagacaagagaaaagctttagaggagaccaaagcctatacaacccaatctctagctagtgttgcttatcaaataaatgcattggccaacaatgtactccagttgctggatatccaagcctctcagcttcggagaatggagtcttccatcaatcatatctcacaggtaacagcttataaaatgctttaaattcaatttaaaaaaaactacagcatatgccaaagaagtaaatagcctgcatgtatggatttctgactcatcttactggtgataatcattaacactgttttagtttggtaaacctgctgtttttcttttagtcctttttttatcatgataaggtaaacataacataaaattgaccattttaaccatttttaagtgtataattcagtagcattaagtacattcacattgtacaactgtcaccactgtcctactgttaagagcttttctgacgtaaagttatttgtacataaagaacagaatttttataagttttgacacacatgtatacccatgtgaccatcaacacattcaagataatgaaccatcccctttccccctgccaaatttcttcattctcctacgtaatccctccctcttgtcccttgtccttagggtttctgtccctagagattagtttacat

SEQ ID NO: 7304 - DNA, 1052 bp, Homo sapiens
tcgataaggtaagtgtgcaaaaatctggacacaatgcctataattttgttagtgttcaatatatagagaaggattatttttctatcatttaatttttagagcaagtttataaaatggtgttactcatctttttgagaaaatcagaccaaggatcacaaagattaaatgagtcgccatagtcacaaaggagtttacaatacatttcctgggtaattgccagttaaaagtagcaatgatgatcacatttcaaatcttgaattatgtggtgcttttctcttacgtaagcctctttgtgtgttgaagccatagattctaagttgctgtatcaaaatgatcactagaaaactgtgatatacttagtgtatatattttagaaaatgtcttctattactcttgttaatttgattgaatacatgtgttattttcaaaaatgtaaatggaatatgtgtggattgaatatatatgtacatatatatgaaatatgatttgtcattatagtgtaggcatagctcatggcaatgtgtttttctgaaagcagctgcagaaatttgtctttttttagtttgcaaaaatttcagaggttatgggggaaagtggggttctatgaatcccagatagtacatgaagcagatttggtttcagtaattttagcataattcattgtaaggtgatgatccctaggaacttcatcacagtgagcaacctgaaagctcccagcagccagcaataaatgaggtgggacgagtccactggcagggcggggccttaagagcctgatgcttgagctctgaattccaagttggggggacacatgcaaaggattctgggcctgattgtttcctgtaaccaggatacagtctggttggcagggcaactggctttcacttggtggccttcagtgggtgtcctcattggttgcctttggttagtgccctcagttggtaccctcagttgtttctcttcagttggtggtcctcagttggtggttttcagttgttgggcagcggtggaaggaggatgaatctgtgctctctcctccccaggccacagct

SEQ ID NO: 7305 - DNA, 1075 bp, Homo sapiens
aaaagaaagctttgaacatgctttagattctcagaacatatctactcttattttataaacaatacctaaactcgtaatctgtttttccaatccaaagcaattaaaacaaaaacaaatagaagagagtaggtgtattaatacaactataagactaagggacaagaaaacctgtttctggatacagatttattgtcaaagtgtatcaccaaattatttaataaacataatagaaatccaattaatacgctagcaggattttttttttaagaaatagacaatcttagtgtacaaatctgaaaaaataaacaggtaagtttttttaagcaagagaaacaagtttgcttatgttaaaagaatacaataactaaaaatattactgtcttaaaaatagatgcaaagatcaatggatctcaataaaaagcacagaaacaacccaaagctataaaagaatttcctgtatagtgaaaatgacatttcaaatcactggagaaaggtagcattaggacaatttgctccctgtctggagtaatgccaatttattccacccaggcttaagtgaattaaatatcagttacaacagcaattttctaacttcctgaaatgaataataaaaattggctaatatgggccacatttcaccctttatatgtccacttaagaccatgatgtattacaaggtagcatcctgggggaataactgtgtagtcaatcaaaaagtggcagattttaacattcacgccagaaaaccagacaatataagtgaaagaaccaacagtgtattttcttgttttgtaggagagcctctgtgtggaattaactagattatatgattgactcaatctcccttatgatgctctcacattggtagggcaggagcagcatatcacgttccattagtagttataattttgtactgcttgatgcacgtcccagcaagatagctgctgggcaatacatgtgatcaccagccatggaacaaaaaaggctatttcaggcatattaaaccctcacccatgtgatgctttaacaagctaataagtcatagactaaaaaccccagagaaaattccaaaagc

SEQ ID NO: 7306 - DNA, 1030 bp, Homo sapiens
aagtctagtagtttaaaacaatgactatttcatcatatgtcaggatttagtgagccagaaatttgggcagagcctggctgggtgagtcttctgttctgtggtcatatggactgggtgtcgggtggtgttcagctggcagctaggctggtctggaggagccaagatgcttcttatgagcctggtgccttcacagaacacctggaaggctgcgctcagctggggccgtctatttttcatggagtctcagagcctctccacgtggcccttcggcagggtaagctaatgcttcgctcagggccccaagaagccaaggcaaaagctgccggttctcttaaaagctaggctcccagagctggcacagggtcatttctgccaccttcttttgcttcaggcaatcacgggctagcctagattcaatggaagggaaaatagacactaccccccctttttttttttggagacaaggtcttgctctgtcccccaggctagagtgcaatggtgctgtcgcctccaactcatgggctcaagtgattctcgtgtctcagcttcttgagtagctgaaaccacaggcgtgtgcttccacttccagctaactcttttttttcattttgtagagacgaggtctcactatgctgcataggctgacaccacctcttgatgggagaggtgtcaaataatttgtggtcatctttaatcagccataaaacatatacgcatcaattaagtctttactaagttataagttaactattaaattggaagcataggactgcagcttcctttgtccacaaacgtttgtcaggaggaacctcaacagtgcattcaaagtcaggcccagtggctcatgcctgtaatcctagcactttgggaagctgaggaggacagatctcttgaggtcaggagttcgagactagcctggccagcctggtgaaaccccgtctctactaaaaaaaaaaaaaaaaagtgcattcgaattatgtggttactactgttccataaaacggaagctttcctaaacaaataatttata

SEQ ID NO: 7307 - DNA, 1067 bp, Homo sapiens
ttttttttccttttagtaagagactcactgaaaatctttttgattttttataggtattatgaatcaagactatgaatttatgtcccgtagaactccaagaatgcaaaccaccgtaatgccactggatctgcaatgagcatagctgctaacaggatttcttatgtgtttaacctaactggcccctcttttgctatagattctgcatgctcatcatcttttgttgcactgtactacgccttccttgcaattaaacaaggtatgctgaagttaggtaaccaagacatgaggcatgattaccaaaaaattgaacaatttttttctttatttcttcttaaaaaaattgggatacatgtgcagaacgtgcaagtttgttacataggtatacgtgtgccatggtggtttgctgcacctattgacccatcctctaagttccctcccctcaccccctacctgtcaacaggccctggtgtgtgttgtttccctccctgtatccatgtgttctcaatgttcaactcccacttataagtgagaacatgcagtgtttggctttctgttcctgtgttagtttgctgaaaataatggcttcccgcttcatccatgtccctgcaaaggacatgatctcattcctttttatggctgcatagtattccatggtgtatatgtaccacattttctttatcctttgtagcattgagggcatttgggttggttccatgtctttgctattgtaaatagtgctgcagtaaacatacgtgtgcatgtgtctttatagtagaatgacttatagccctttggatatatacccagaaaggggattgctgggtcaaatggtatttctggttctatgtccttgaggaatcgccatactgttttccacaatggttgaactaatttacattcccaccaacagtgtaaaagttttcctgtttctccacagcctcaccagcatctattgtttcctgacttttaataatcaccattctgactggcatgagatggtatctcattgtgatttggatttggatttctctgatggtcagtgatgttgagtttttttttcatatgtt

SEQ ID NO: 7308 - DNA, 1049 bp, Homo sapiens
cacaccaccaagctcggctaattttgtatttttagtagagacagggtttggccatgatggccaggttggtctcaaactcctgagctcaagtgatatccaccttggcctcccaaagtgctgggattacaggtgtgagccactgcacccagccagtgaaattctttagtgatttattggtagggcactttaactttttaatttcttctcaacatgctatttctttacattttccacccaagtctgttccccactcctgtatctatcctgggtagacctaaaattgccctattacaaagtctctcttgccttcatttgtcttatattttttgtagtcatccaaactagaaacctaaataatcatgtccccttacttcctctttcctcaacctgcaactcctgtttttactgtctttcttatatttcttagtaagcaaatgtgctggctccgtatttgattgaaactgatataaacgggcgagagtgtatacggaaattccttgaaccttttaatctaatacttgatccagtaattccatttgaactatacccagtattgttggtaagacagaagagagcaggagtgggcctatattatttcattcttgcattgctataaggaaatacctgagactgggtaattcctaaaagaggtttaatcggctcatggttctgcaggctgtatgggaagtatagtagcattggcttctgggggacctcacgaagcttccaatcatagtggaaggcaaagggggagcaggcacctcacatggggaaagcagtattgagagacagcatgaggtgccacatattttcaaacagctagatctcacaagaagtcactcactagctagatctcacaagaagacactcactatctagatctcacgagaaaacactcactatggtgaagacagcatcaagagggtgatgctaaaccactcatgagaattccacccccatgatccaatcacctttcgccaggccccacctccaatactgaagattataattcaagatgtgatttgggtgggacacatatccaaactcta

SEQ ID NO: 7309 - DNA, 1056 bp, Homo sapiens
cacccacctcggcctcccaaagtgctgggattacagacatgagccactgcaccctgcctccaaacactttagatgctcgtttacctttgcaaaattattctaggtttaattgctcagaatggtttgcgatcatgacaaggcagcagtgtagagaaaggatggttgctaaaataattacaggtcttattcaggcatgcatagaactgtagagacagctttgcaaagtcaaaagaagcattcaaagctttattcctggggaatttgggagcctgttttttttgttgttgttgtttgttttgttttgtttttggtctcctctcaagtagccataatatctgattatgcaacatgggattagtgttagggcgttcagaagtagggcagggcacattctgcagggcagtagcgggctttctcctttgccctgaaggtatagtttgtcagggccttctgcaggcagctggaaaaagtaatgcacctgccttggctgaagtgaatcctgtattaaatcaggtgcttaatgagaggaccaaaatggacttgtgtctctgtctcaatttagcctaccattgtatacaaggcaatcaatccttagtttacatccctgagttgtaagagatgcattataaacgtgcattagtacagtgccttttgcctgtgcaaaatgcatatttttatctgtattttatccctttgtgtgtgtatgctacaaaatgtaacaaaatatcattatgctctgaagaaaagagaaaatattatatcttctgagtctgtggcccacaaatccctgagaagccgatataaaaaggtttatccctggctccatgacttgaactcatttcgattcaaatagatgaaagttataatccaccagttggctccaaacacttttttgagactttaatacaattttagacatgtagataaagatgtacattcacctgaccttttctccatttgacccactttactcctagggaatacacgggtagtaaagaaatgggatctgttttctttgggatgcacaaaaagttccggtcctgggtaagcaagcaa

SEQ ID NO: 7310 - DNA, 1050 bp, Homo sapiens
tttcttctttccttctcctgttttttttttttaaatctccatgagacaagaccacctaagaatgagcctttctagcaccatggaaccttaacttctaggaataaaacatcctaggtacaagggaccagctcataaaagaaaaatcctgagactagagactcatttctttttaaaatgctttctccaaatgattttaagtatgaaaaggaagctgggggaatatgaaaggaaaataaatttggaaccccaaactcatcaagcaaaaaggaaaagtcaagcagagaactgggtcacaccaacccgcctcctatttggtttgtaaataagatggctgcaaagataaaaggctacttagctccctcacagtttgcccagaagaaaattacctttggggcccaagatctttaccctaaaacagttctcttgaattcactctggcaatgtaaattgatcacttatattcacaggtgcagaacagaggacagaaatcaaagtcatctctctgctcacctgagacaaacacatatctgactgcttcttctgccatattgtctatgttgtcttatgttaaaataaagattcactgagccagacaaaaacatgggtgactatttcctgagaattaacatgaggatgtctgggaggactgattcctaagagatccagtggctctgattaggttttttcttcagaggaacataattagggtctaatctcacccaacaggtcagcccctcctgcgccttgagcccctgccacacagattcaggtagccacgacatgagtggaccaaactagttcagggagtaattgccctggaaagctaggtccacaagcagaacccattgggtctgacacactccttgaattggttaaattcaaaggaaaactctgaattctggggaacaaggcctctaagttggcttaagcctctgcagctgcagaacatgaagttctacccttagaaactcccgctgggtatatgcaaaatacttatggtaaatcattcaaatatttagtcaagtggatgttgagttctaattagggata

SEQ ID NO: 7311 - DNA, 1051 bp, Homo sapiens
atatatttcatatttactcaaactataagccagtaagagacaaagtgtcccaagataaacttcagctgtgctcaccccaagttaagaatttgggggcatattatctccatcaaagaactgagtattaaccctagtagagtgagagaaattttagctttcccaatgtccatcactaagaaacaacatagagggtttgtggggctggctggctattgtaggaactgcacaccagatttcacccttatggctcaacctctgtatgcatacctaaaagatgaacagtctgatcccatcatgtttactccagagggacaatcagctgtgcaacaaataaaggaaagtttcaaaatgccccaggcttagggcaccctaactacaaattgcctttctccctattcatacacaaaagtggagaaacggcacctgggctactgaccagaaacctagtgatcaccagataactatagggtattacagccaacagctagaccttgtggccttacctcactgtgtgagagctgtatcaggcacttccattctgtagaagtctgttgaagatattattacgtgttcttcccttaccatttatgtaccgcattctcttgagacccttctaaactctcatcatacttaatatgtgtctgtcaatagattaactttctatgaagatttgcttttatcatctccaaatattacctcatcccactgtaatagtctaaatcctgctactctgttcctgggcccttctgacaaaacccctcatgactgttctgatgactgactaacttctcacccccaggacaggcctacaggagatgccactggataatgctgagatagactggtatacagatcggtctgatttaagaggagagggtggaaatgttagaacaggctatgccgtggtttccttattagaggtaattgaagctggtcctcttccccaagccagatcacctcaagtggctgaatactttaagttttagggtacatgtgcataacgtgcaggtttgttacatatgtatacatgtgccatgttggtgtgctgcac

SEQ ID NO: 7312 - DNA, 1050 bp, Homo sapiens
ttttctaacaaggagcagcctgaaaaatcgagctgctgacatagataagcaagctgaaaccttgcatgggtgaatgccggaaattgtgccaatagaaaagggctacctcagggctggggatgttcaacatggaggcttcatcttccctattctttgtacagtaaaggaacaggcaacatggcactggccaggcagagaacccatctgcataataaaagattagggtgggggcggccagattttctgcactatgcaaatggcacacctagccctaaccagttttttgcaccttatacaaatagcatacctggtctaaccaatcttttgtgccctatgtaaatcagacaccaccacctcaagttcatctataaaaccctgtgcatttcaccacggactggaagacccgcccaggaccctctctctgcaggggagagcttttctttctctcacctattaaacctctgctcttagcctcaccccttgtgtgtccgcatccttgatttctttggcatgagacaatgaacctcagatattactccatcagtgatgctgcttcactcccacgcttaggcccttctcattttatccagactccagcccctaactctgggccaccacaactctaattttgtttccaggcttagtccccatacttttgaaccgaaatgttcaggaagagaaaggagaataggactccatataccatttataatcaacatgccgagctctacaaagcaagcattttttattggaattgcattgaatctataatttggggagaaaagacatttagaatattgagttattctgtcttttgtttgtttgtttgtttgtttttgagacagagtctcgctctgttgcccaggctgtagtgcagtggcgtgatcttggctcactgcaagctccgcctcctgggttcacgccatcctcctgcctcagcctccccagtagctgggattacaggtgccgccaccatgcctggctaattttgattttgcatttttagtagaaacgaggtttcatcacattagccaggatggtctcgatctc

SEQ ID NO: 7313 - DNA, 1033 bp, Homo sapiens
taggaagaaatcttagtgataagccagtgtagtttcccattttacagatgaagagacctagggaaaggttaaacagcagggcccaagccatagagctagtcaggctcaggatcacactccacattcctttacttgtagtccaggtgattccataaccttatgctccagcaggtagaattactgtaagagatccaacaccttgggcttttttctcagcatgtattgatgcgcacagcatttatccctaagaagctctaagttcctgtatcttacatacagatgattgctttaatttactttgccaggtgtattcataaaatggaatatcacatcaaaatttttaagcatattcaagtcttccccatgaatatattttaacacaaaaataatttttataagatttttcattcgaaaatatctccacatttgtagtcattttctttcttaggttttccttatgttaccaattataattttttattttctatatgacatttccccccatcgttagacatctgggttgccagtcagcctttattgttttgattacttcatcaaggatgaaaatgcttctctagtagaaactcactttcatttctttggaagtatttggattcccttttcaattagaaccctgggatgtcctcttatctctttgaccaatgcctgctggcacagagatctttctctttttggagtttgggttaaaaacaaaacagcccttagacaccgagtaggtgaccatggtcttactcaggttatatatttttaaaacatatgcttttaatttgttttaggcacaagcagcatctcaagaaaacttagagcagtttagagagaataattttgcttcaatgaaaagtcagatggaactcagaattaaagatctggaatctgaactctccaaaataaaaacttctcaagaagactttaataaaaccgaactggaaaaatataagcaactctatctagaagaattaaaagttagaaaatctttgtcaagtaaactaaccaagtaagtcaaaatatagaa

SEQ ID NO: 7314 - DNA, 1026 bp, Homo sapiens
ggtttttatgctttatttttacagctctgaattcacaagtgttagttataactacatgtaatgtaacaaaaaagcaccattcaaatcaaatattatttcttataatttctatggctttagatattatagagtggactgccccgtattagtgggaatcattgagaatttgctctatagtgtatccccagctgtgtacacatagtctgtcaccttgttttaatgaatagttgttcactaggaatatttgttttaaggagtgctctatcatttaaaaaagatatatgaaattcaattttattaataattcttttaggacacccagtctgttgattaactgcatctaatgtgttttactttatgtaccagtttaactcggtgcccttaatcatgtgatctggtctacagtaataaatcatataatttttttatcccaatagttttgttttctttttcccccttacttgtagaattaatgttgtattttacagaagatgatcagttatcccctagagtagtgactgcaagctataaatctaaagttactcacctatacatatatatgcttgtttgctctcatttcttcatgagcttagtagatccaagaagcaggacttttaaaacaaaatacctaaatgaaatcccttaacacaggaagacatgaaacagaaaaagtatgaagtaaacaacttaaacagtgcctgtagattgtttcacttctcatttaataccttttataaggtaatgaatagagtctagctctccagggacccagatatatacatctattcatttaataaaaattcactctgtattgggtactgatattctatatcctaaatatttttggaaacattccctcagtttaggcctgcattatccttgttctgcaatattgtcttctaattaatctccctttatttattcatatgcccctgaaattcattctctccacagtatttagggtgatctgtctccaatgcaaataggaccttgagtccctcttgaaagcataaatgttcaaacatc

SEQ ID NO: 7315 - DNA, 2055 bp, Homo sapiens
aagaattggaaagaagagagtagggttggttatggagagatcaaggaagccatactatgattaaaagcccactagcaactttatgacttgcaatacaatttcagtttgggggacatagtagggaggagcttgacaccagattccaagagggcaatctaacataaaagaatgtggaagcaaactaagtatggaccagagcttcttaaaatttaataaatcagctggggatcttgtttaaaatgtacattttgattgagcaggcctggggttctgcatttctagtaagttcccacataatgctgatgcttctggtccttggaccacactctgagtaacaagggtatagacttcctttttgagaaatctgaaagaagcgtcattggacaataattcaaggcataacaggatcagaataaagcattatttttcttttatttctgagcatgtttcttccagaggagaagaaacaaagagatggagaaatagaaattgtagatataagataactattgttaaatgaagaggaaagaagtgctgagaatgttccataaaaagaatatagaatgggaagaatcaagaccacagatctggagattacttttgcaaaagaagagagatcgtgagtggggaaagagaagaaagaaagaagttagctaagtcatcttggagttaacgatgaggaaacttgagagaactcatttcagatggattcattgcatttacactcaaacagacgattagatcatttctgctccagagattattgcaagcaggagggcatgctagaattggggtaaactacagtgattcatatctcctttctataactatcagacatcaaagatatatgttgctttggactgatcttggtggtttgcctgtcactcagcactttgggaggccaaggtgggtgggttgctggagcccaggagtttgagaccagcctgggcaacatggcaagactgcatctctacaaaaacatacaaaaattaggcgtggtggtgcatgggcctgtagttcggctgttcaggaggctaaggcaggaggattgcttgagcctgggaggttgaggctgcagggagcaatgagccatgattttgccactgcactacagtccgggtgacagagtgagactctgtatcaaaaaaaaaaaaaaaaaatagatgttgcattgatattaatcaaatgagtttaatttgaatatagaagcattggcttttttcttaaagttgctttttgataacgatagctgtttcataaaatcctttagaggataacattttagaaatgaaaaaattacagttaataattccttgaatactaaaattgttattttaaataaacactgcattgattttaaaaaactgcactaattttgaaatataaaatgttattaatatctaattctgtggcaattaaattttttccttttgataaatattacaatattgaaagcttattatgtattatttcttagatgtgttttatataccttcttgcatgagtggatcaagaaactttaagatggctaaactagaggatacaagaaatgtaggcatgccagtagcccacatgggtatggaaaaaaaatgcgtatttttgttaactgttattctacaagtgtatatccaagctgatcaattcagaacactttctctgatgagaaataagttatatatccaagtaaagtggcatcataactgtgtgcttcctaaattacaggacaagttgaagaacatgataaatacttgtagtataatggtataaatgattctgatgtgttgcattaaagatatgctgtcgcattttaccatcagccttgacatttctcctctcagggtcatgatttgctcctctaattaaagattacttttctccacatcgaccagcatgctcacattggtatatgtgcacttttctattttagttatagtcacttggaacataatcttacattcaaatcataactgcatgttttattaaacctatattcctgtttttttctccagtatacttctgtcatgttgctgtcctaaccaaaataaaaaacatccc

SEQ ID NO: 7316 - DNA, 1039 bp, Homo sapiens
aatccttacatgataggtgtgtctcctgaaaacagcagagaatttggcttgtgatttttaaaaatccattctgccaacctgcatcttttaagtggagcatttagaccatttacttcaatggtaatattgagatctgaggtactgttccagtcattgtgttgattgttacctagtgactttgtttcctccattatgttattgttttataaactttgtgaattgtatgctttcagaagtttctattctgttatgtatcaaccttttatttcaacattgagaacttttataaatatttcttgtagggctggtctagtattgacagattccctcagcatttgcttgttcaagaaagactttatttttccttcatttatgaaacttagttttgcttgatacagaattcttggctgatgatttttttcctatttaaggagactatagataggactccagtccctcctggcttgttaaggtttctgctgagaagtctgctgttagtctgataggttttcctttacaggttatttttaaaaattctttttatttaatcttatttatttattttattttattctttttatttttgtctgattggattaatttgaaagccttgtcttcaaaccctaaagttcttacttctatttggcatagcctactgttaaaacttcccactactttttttcttttcccccctcgagacagagtctctctgtcacccaggctggagtagtgtgatctcagctcactgcaacctccaccccctgggttcaagcacttctcctgcttcagcccccctagtagctaggattacaggtatacgctaccatgtccagctaatttttgtatttttagtagagacagggtttcgccatgttggccagggtggtctcaaactcctgacctcaagcgatccacccaccttggcctcccaaagtgctgggattgcagccgtgagccaccatgcccagccccccactacattttgtagttccctaaatgtgtctttcatttccagaagttctgattggtttttctttaa

SEQ ID NO: 7317 - DNA, 1020 bp, Homo sapiens
gtgcatgggttttttttccttgtgaaagctatcagttaagagtgcatgtttaactaggaaatataaacatattaagtaaatattatattaagtaaataacacattaagtaaatatgtttatatttccaggagtagtggaaatgtaaggcaaaggcagaagagaggtacagttaataggatttagtgattattgagtgtaaaaagttagggggcagagagaaatctcagctgattcctaggtttccaggttgtgcacaagcatttaaactggacatgaggagtaggaaattgtcaggtgagtagagaagagtggcaggtctgcagggaagattaacttttttctatacatgtgagtataatggaatatttatagaggatattaattctattatagtctccagatatggtcccagagggatactttgtaacaaactatcagtcttatgctttaaattttatatatttttctattgttgatttaaagtgtgttttacttttctctttaatagtggatgaaagctctgaagactccttaagcaggtagtattttacagatttttaaaaatatatttaaaggaatacagagaaaagaaactgttgagtgccctactctgggtagacaccatattatgtgcttctccatatagtcgtcccaacagctttgcaaagtatctgtgctatattacaacccaactgtgtggttcagagaggttgattaattggcccatgacctcacagtgagcaagcagctgacccatgatttgaccatcagcctgcttggctcccaaatcccttctcttgcccctcagcatagattgatagagacctgtgcggtgctggatcaaggtacaggtccaaatcagatcaattcagagacctacatttagttctatgttaactctcagagtttttcttaggagcctggttagtccaacaatttgtcctaatatgcttgataattgcagtggtaattagtactttgactttatcatcaaaggttttaggccagatctcacttag

SEQ ID NO: 7318 - DNA, 1084 bp, Homo sapiens
tattagtctgttctcatgctgctaataaagacataccctttattatatgggtaatttataaaggaaagaggtttaattaactcacagttcagcctggttggggaggcctcaggaaacttaacaataagggcagaaggagaagcaaacatgtccttgacatggtgtcagcaaggagaagtgccaagcaaaagagggaaaagccccttaagaaaccatcagatattgtgagaactcactatcacaagagcagcagcacgggggaaccatcctcgtgattcagttacctcccactgagtccccctcaccacacgtagggatcatgggaactacaatttgggatttggttggggacacagccaagatgagatttgggtggggacacagccaaaccatatcaacatgctatttaatgtttataattttatgaaccattgtatgttttgagacagtgcactacagtttataaaaagtcctgtcactctcataggacggctctacatttggcctgtgccaatggtcatccagaagtagtaactctcctggtggacagaaaatgccagctcaatgtctgtgacaacgaaaacaggacagctctgatgaaggtatatagtagccagctctttcagcatcagatggatttgacttaaatacatagaatgaaaatgaatttatctcattaaaatataactaattggtgaaacctgtggagtgtttattttgcattcctagaatttatgatctgtttcttggtctaatactcccaggctgtacaatgccaggaagagaaatgtgcaactattctgctagaacatggtgctgatccaaatcttgcggatgtccatggcaacactgctcttcactatgctgtctataatgaggacatatcagtagcaacaaagctgcttttgtatgatgcaaatattgaagcaaaaaacaaggtatagatcaaccaactttatttttacagtatttgaaatgcgtttgtttcaacagtgacatatgtaagggttagttttctgtatttggaagcgcaagcattccctgactgaaagtattttaaaataacttaattgtctaagatttt

SEQ ID NO: 7319 - DNA, 1112 bp, Homo sapiens
taatggagtatttactcaattaaatttatcttagggcctgaaagaagaagtgtggaaattgataacaaaaacaaaaccatcacagcatatcatgaatctggtcatgccattattgcatattacacaaaagatgcaatgcctatcaacaaagctacaatcatgccacgggggccaacacttggacatgtaagttttttgtagtgtctcgccctgtcacccaggctggagtgcaatggcgcgatctcagctcactgcaacctctgccttccggattcaaacgattctttcacctcagcctcccaagtaactgggattacaggtgcccaccaccacgcccagctaatttttgtaattttagtagagatggggtttcaccatgttggccaggctgctctagaactcctgacctcaggtgatccacctgcctcagtctcccaaagtgctgggattacaggcgtgagccaccatgccctgcctaattcttaaatatctaattactccgctgccccaaaagggaaaacattatgttttgtagtaactgattcagtagtttctctaagatttttatcatttagtacaagtttatcagatctttcaacattgtagacatttaaaaaatttctatgcacctggggagaaaacagtcctattgcagcattatccacctattgttgttgctttataaaggatgtttttattctctaattgctggtttttcatcagtcccctgatgaccagctttcagcaacatggtataaagtactttagtgagagctaaatgataattctggtttgtatttttttattttgcccagtcttacggtgctgaaattctggtttttaatgtaactatatcagaactgtatctgaattttttttaaatttttattttattttatattgatggagtctcgcgatgttgcccagtctactctcaaactcctgggctcaagtgatcctcacacctcagcctcccaaagtgctgagactacaggtatgagccactgcacccagcctgtatctgaatttctttcattacattttattttattttaatttaatttggttttattttatttattgtattttatttttgagatggagtttcactc

SEQ ID NO: 7320 - DNA, 1024 bp, Homo sapiens
tataccactttggaggtatgggagaggtctgagctagaattaaaaataggagattatatttatatgtatgttaagtccacatgtttggatgagatcacccagggagtgagtgtaaccagaagagagatttaaataccgagttacagagcacttacttgaaggttcacaagacagagaagagaagccaggaaccaagatgagaaggagctgccagtgagttaggtgacaatggtatcctggaagaaaatatttctatgatgaggggagtgatcagcaatgtgaaatgctattgatgggccaagtgagaactaaccatttgatttagcagtaggtcattggtgtacctgataaagagcaatgttagtggagtagcaggggttaaattccaattgcagtgggtttacaagaggtggaaagaaatgagatggaatagaggattgcaaacaattcttggattttgtctgacagaagagcacagataatgtatctcataatacaaaataaagttggaatgttggtaaactgttaggtggggggttgtggaaattgatagaatcaaggtcaccagcagagagaatatggctgggagaggaggaatgagtggttaatggaggaagtaaattgtgtagcaataggagaatgaatggaaacaggaaataaaactgttgtgctcacttgaaattttggatcatgaatttatattaagtcaaaatgagtggtttttctactgattttttttttttattttatcttttccaaatgtgaattctgcaactttagtaccacactgtgctcttctctgtgctttgccattatatctgctctattacatttgatttctcagaactgtagtggctgggtaattatctttcaggagtgttttagaagaaattcttccgcaggagggatttgaagtacgtgatctgaggactcttccaactctgaagagattggttatgttattatttctgcttttcttctttacttattcgtgtctctgtttatacataaccatgttttttca

SEQ ID NO: 7321 - DNA, 1120 bp, Homo sapiens
gcaaggtgaagagtgaacaggtatcacaggcatacagaaaaatacctggaggtcctgagttaggaaagggtttagcaggttgaaggaacaaaaataaggctagtgtggctagaacatagtagttaaagggggtagtgacagaagaggttggagaaaagacttgaggcagatcatacagggagtaaaggatatattatggctgatttcattttaagtgtattgggaaccattgaaagttttaaaacatgattagattttcatttttaagagatgactggcttttgctatatggagaataggagagggcaagagtggaagatgttatcagctaaaaatacccacccaccccccaattaaagctgttgcagtggttatggaaagaagagaatgagatatattttgaagaaagtggaattgcatgagagatcagagagatgatggggagaggtgtttctgggtttgatcagatgaatgcattgaaggtgctatttaccaagatgacagtgtctggagaagtcctagtaattgtttgaaaaagaagtctgacatggcctattgaatatggtattgaagtttttgaaactcaactctttgccttagttcacatcaagaggcctgattttaggagaatttaccatcaactgaatggacagttagtagtatgtgatgttggtagagatgataaagggatttttatgtaccctaggcagtcttaacagggctcaaatatagtgaggactctcaggcatttcttgctttgaaggatggtaacacatttggaattccttgttgcttaattggttgaatacacttgaaattaaatggtaaaaaggaagacacagaaaatgaactttttcattgagaagagctcaactctaaatccttttgtgaaagaaaagagatataactaattcaaataaaagagatataactaattcaaataaatcttttcaaagaggtagaaaatatgtatcttgaaatgatttgattatttttaaagtttcaaaagaagttactgtttatttttttttctttttactgcccccaggctgtaaggaacttactgtttctttctgactctaaaaatgatacattgcttcacttgactagccttaaaaca

SEQ ID NO: 7322 - DNA, 1049 bp, Homo sapiens
ctacttcacaggagtactggagggatttgcaagctaacgggccaaatgcttccataggaataaggcatgcccagctaacagaaatttaagtccctcttccccacctctctcatctagaccaaaaagaagactacaatttagatccttggagacttttcctgtatgccttccaaaacttcctgctcacttagatgtaccttgtgctttgaagatttctttgatgcagtctttgtaacaaataatttttttttttaaatggagtttctctcttgttgcccaggctggagggcaatggcgtgatcttggctcactgcaacttccacctcctgggttcaagtgattctcctgcctcactcccaagtagctgggattacaggcatgcaccaccatgcctggctaattttgtatttttagtagagacggggtttctccatgttggtaaggctgatctcaaactcccaacctcaggtgatctgcctgcctcggcctcccaaagtgctgggattagaggcgtgagccactgcacctggcctgtagcaaataatttttaagcattctcaagatgtatgatgttgggtttaacatcatatgttcacagtgttttaaataagaaataatctgtctttagtatacagaatggttctttgtttgcctgaaaagtataagaatacaatttacttttcccaaactctttttccttatttttttctttcaaataactttaattatttaatcccatactgattaaaatatgtctgtctaaagggatctactactatttgcttttaaaaaagtgttccctatttatttaggaaaaagtgaagcaagcaactgaatttatatgtaaaaataacatttagacctgtggatcaaagattattttcaaaaatgagatatcaatttggtatcagtaaaaagtgtcttttctcttagtatataaataaataaaatgcaaattaagagtgtaagcagttgtgaatcattacaagcagtctgggataactaactcctagggataaccatttctatcctgttccaaagtcttattt

SEQ ID NO: 7323 - DNA, 1042 bp, Homo sapiens
gtgagccgagattgcgccgctgcactccagcctgggtaacggcaataatctgtctcaaaaaaaaaaaaaaaaaaaaaaatatatatatatatatatatatataaacataataggattatgttttatagaaaattgcttttcataattgatagtgtcccataaaatgtcactgaaaaacttaatggaataaaacattattttaatataatgtaataggattttagctttgagggaaagtaatgtggtttgaggagtgggagaaatgcatgtttcattcaataaggtttatttatagaagtataaaattcttttttttttgagacggagtctcgcactgtcgcctgggctagagtgtaacggcgccatcttggctcactgcaacgtccgcctcctcggttcacaccattctcctgcctcagcctcccgagtagctgggattacaggcgcaaaccaccacatctggctaattttttgtatttttagtagagacggggtttcaaactatgttggccagactgatctcaaactcctgacctcgtgatcttcccacttcggcctcccaaagtgctgggattataggcatgagccaccacgcccggccaaaattctatttttttttttttgtacaaatttaggctctcttctggggatttccagaatattcagctaacatttgaataatgtgccttatgtctgttgaatttaaaaagagatgggtgtactaaaccctggctacacattaaaatcactaggggatcttgtgaaaaaatagaaatgccccaggatgaccccagactaattatttcaggatttctaagagattgggataatcactgtaatagagggaggattagaggatggtctcattaaagatggaatctcggccgggcgcggtggctcatgcctgtaatcccagcactttgggaggctgagacaggcggatcacctgaggtaaggagttggagaccagcctggacaacatggtgaaactccatctctactaaaatacaaaaatttagctgggcgtggtggcgggcgcttg

SEQ ID NO: 7324 - DNA, 1080 bp, Homo sapiens
gctcaggagatcctctctgcttaggctcctgagtagctgggactacagggtgtgccatcacacccagctaatttttgtttttatttgtagagacagggttttgctatgttgcccaggctggccttgaactcctggggtcaggtgatccacccacctcagcctcacaaagtgctgggattacagacatgagccaccacaactggccaatttaaaaattttaaacatgagaaaaactatagatatgctagaaacatatatgaagaattatcctcaaattgatgtctccaaaattacagaggtaggaagtgagaaatctattttatcttagattaattctttttctaccatagtgtatactctttggctttagccccaaattccttatctactgagaatttgaaatttggcagagtatacatataactttttcacttacactagtcagttttgatttgtcataagctttgaataaaagtaccttattacgattgcttaataatagttattctatattttagtatgtttttaaagagacatttgcaggttattttggttatatctacagcatgtctattcatgtattcttttatttattgaaccatcttaggcattgctattaaagtttaaaatctcagagtgttttgaaatcaaagaagcaagcaactaacagaaccataacttttgtttctataagctagaaataaatcattatctaaagtattaatgcaatataaaatcactattagtatagctaagctaatttataacctgattatcagttgtattccccaggtgatttgtatttaatgtgtgtttccaacaggttcattccagccaacaaatgaaatgatgcttaaattttatagcttctataagcaggcaactgaaggaccctgtaaactttcaaggcctggattttgggatcctattggaagatataaatggtaattttttgtgtagagctatgcaagaatttaaattttaatgacataattatcatatggctattacttaagtggttatatattattctgtgcagaaagtgtcctaggtattgggtacaatttttatcctccaggt

SEQ ID NO: 7325 - DNA, 1062 bp, Homo sapiens
tgaaaagcatggcaataatgtgagccaattcaaagatacactacagttcatgtatcaaaggaaaaatactttttgatggtttttcagagatactgaggagtttgaaaatagatggaggagacagactttccagccaacttctagatcatgaatgcacatttttttccatttaaaaagtctttttttgctgaagtcacattagtcctttgtagcctaacaccattcagctgtatatttattaaacaagtcaacccttctaaaactgcagtgtggtaactataaagtgaatcttgggagaaataacccttgggctatatagaactgaaaggatgaatatcaatattaagatgtggggacaaaattaagatttagctaagaagcactataaatgcatttaggtttcagaactagtagctcaacctgcatgtaaaaaggagtgcttttataaacaatgctctttgcaacatacaagcacacacagaagttattcatgcatagttaggaagtcattttctgagactttggctggaaatctaggtttcatggatgaaacactttgggtaacatctccaatattccccttgagaaaatgaagtaacaaaatccattagacacttaaagctaatagatattctttaatgtggctccaggtctctttgtcttggcatgttgtggtgttttggcacaaaggaccatcagaaaagccatttttgtctttgaagatgatagattctgcacacttaatccattaatctgagctgatgggcttttgcccagagttaaaatattttctccttacataatggttttcatattaaatcatcgaataacactaatttttctggtgactgcatttaattccattttctagatgtagaaaattaaagtgagagaggaggttaactttttctttctttttttttttttaacaaggacttccatagtgcttggtatatgtgctcaagctctcttctaagtgttttataaaatatgaactcgtgtggtccacataactaccctatgactctggtactattatcttcatttaataggtgataaaga

SEQ ID NO: 7326 - DNA, 1059 bp, Homo sapiens
cccctttttcattccttctatttctgttgctcttttctgtcccataaggagtcctctgcccttgccagtgtaaattcccccgacctgtgctcctccactcttccctcccacacactgcagacttgggtttgcagaaggctgggggaatcatcagacaaaataggaaggggaaagatcaaaggacgtaaagaaaggaagagactgtgaatacaggtgttcaaacatctattaaagatgtatgtttaattcatctttgcagtgacccccagaggtatgtgatccctttacacatatgagaaggttgggttaagaggttcagtgatgtgcccagtgactgggagagtcagagtacagatccaagatgctgtgacctcaaaacccatacccttgactatggtttgatagtgatttttctaggaaggagtgaacagtataaggcatctagattccttctcaggtagttgagctatggactaggactttatttcacttctttccagatttaaaaagcaacaatgaccagaactatgagcggggaggccaaggactggagcagaagcgaggcgggtggccatgagaggtagatattaggtggagttgctgtagctagcaatctattctcctcctattacctaaacaacaaatatagggcaattggagactagatttttttctaaatctcatttgcgtatggaaatcaagctcttagtataggattaggtcctctaatccagggcccagaaacacctacaggtaactggcattattcattgtgatgacctggctgtaataacaaaattcataaagtaataattattgtctattaaagtgattgactgttgggagagtttttctgctatattttgtataacaatggagtcaagacagggactcatgaacccttatgaatcatctacttgggagaaggagtgagaaaataactcaggtaaaagggaaattaataactttaaaatcctataatcgaggggttatacaattatgtaatcaaaggatcaagtcaatcccttgattatataatttaccaagaaattagttgga

SEQ ID NO: 7327 - DNA, 1034 bp, Homo sapiens
tctttatagttggaaagaaagtctatagataaaaaaatagataccaaaaaagtgtataccaatttcataatcacttgtaccaaatttgtagttcactttcctgagaaaactattccttttatgtaattatgacaaagagattagaaactgccctcaccttgctccgtgtgttagtgatttgaaaacacgaactgcactttcatttatattagctccacatcaaattcaggattttgtaccaactttctgttgtgcgagtatttgctagttttaaagaaactagtgccttagtttaaagaaattagtgccttagtttgcttgtgaggctcgtaggaaaatgaaaacatattcctgagcccaattcaaaaccaagacacatatatgctacatatttttcagatggtggtttgggacagtaacataaccttattcaatttgtaaaacacctttagatgcctagcccctctgggtgtataacaaagcaatgagtaacagttattgaaaataaagtaaaactcgggaaaaacaatacagttagttagcggcaaaactcaaagagggtcttgggggtacttctcaaatattcatacccggagcacacagaaaattctagacttccaattctacacccttgattgagactgtacttagctaagtaaaatggacagagcaggctaaattcagcagtaaagaataaatcatagttcttcaaaatagtggaatgctggctgggcacggtggctcacgcctataatcccagcaatttgggaggctgaggtgggcagatcacttaagatcaggaatttgaaaccagcctgaccaacatggtaaaaccctgtctctactaaaaatgcaaaattagccggtgtggtggcgcatgcctgtaatcttagctactcagaggctgaggcaggagaatggcttgaatccgggagtcagaggttgcagtgagctgagatcacaccattacactctagcctgggcaacaggaggaaaactccatcaaaaaaaaaaaaaaaaaaaaaaaagttgct

SEQ ID NO: 7328 - DNA, 1175 bp, Homo sapiens
gcttatatgttacctacaaagcctacaatatttactatctggacctttactgaaaaagtttgtcaacctttctttagtggtttaccatttttattcaccttttaaaagaacctacttttgactttattttctctatttttgtctattccctgtttcattaatatctgcctttatttttaattactttatttattgtacttatttgtgtttaacttttgcttctttttctagcttcttaaggtaaaagctgtgttcattggtattataggccaattcttgtcttatataattttttaaaggtatacatttttctttaagcacagttttagcctcatcccacaaacataagttgtgatttcatttttatttaattcaaaatagtttctattttttgtgtgatttaccttggacccagggattatttacaagtgctgcttaatttctaaaactggttattttccagatcccatgttgttattgatttctagtttaaaaccacaaggtcagggatgatattatatgtgatttcagttctttcatattaggctttatgactcagctgtctggtctgtatttgtcaatattccatttgcactgagagaaaactgtgtattctgcagtagttttatgcaatgcttttaaaatgttgattaagtgaaattggttaagtgtgttttttcagtcttttctatctttatcattttttaaattttattttatcaactcctgagaaaggggtgtgaaaattttcaatcatgattgtagatttgtttatttgtagttttttcttcctagagctgtcccttgaacaacacaggggttagagacgctaaccctccatgcagtcgaaaatctgtgtataacttttggcttccccaaaacttagctactaatagcctactgttgaccagaagccttaccaatagcataaacaattagcacatattttgttgttatatactgatttcttacaataatgtaagctagagaaaagaaaatgttattaagaaaattctaaggaagagaaaatataattactattcattaagtggaagtgaatcttcataaagatcttcatcttggtcatcttcacgttgaacaggctgaggaggaggaggaagaagaggcgttggccttgctgtctcaggggtggcagagatggaaggaaacccaca

SEQ ID NO: 7329 - DNA, 1033 bp, Homo sapiens
ttattagtaatgcacaaaactagtttgtggagttttatgagtggcttgacttctggttaatggcatgaaacctacaaaaagagagcaaaagtagagaaaaaattatattcacccaaacaggggaatggccacaactccaaattttaaaatgtaaaacgcacctgcaaaatgctatgaattattgacccatatgtaatatgctgacttttaacacatgcctcttcagatctcaagatttccccccaaataagtgtcatggtcattcgaagcatagtcaacctttctttctttctttctttctttttttttaagagagcagagattaggggaattgaatgggtcttggaagaagtgaagactttgccatcagagacccagttttgcattatgaggcatcagaagtagagccttgggaaaagtcatacggacatgtcattttgttttgtctatagcggccttccagccatttcgtagacatttcggagtgaaaagggtattagagacaatgattgccagattgtaacacaaaaagaaactataaacttttagagatttagagtaaaccagattgactgtttgaatgctcaaaactaaatgacaacgtgttctcagtgtgaaagggattgcaggttgttgtgtgattgtatttgaggtgattccatcacaaaagcaaacagataaattcaagtaacttccttaaagtcacaaggctgttaaaacagtatattgtttcttaataagagaatcaaaaaattatataaagtttttgtttgcctttttctttttcttttttttttttttgagacagagtctggctctgtcgcctaggctggagtgcagtggcatgatctcggctcactgcaaactccgcctcccgggttcacgccattctctcagcctgtttttgtttttcagagacaaggtctcactctatcacccaggctggagtgcagtggtgccatcattgttcactgcagccttgaatgcttgggctcaagcaatcctcctccctcatcctcccaagtagctagga

SEQ ID NO: 7330 - DNA, 1047 bp, Homo sapiens
atgcaatcatagcttgctgcaacttcaaactcatgggctcaagcaatcctcccatcttagcttccttagtagctgggactatatcaccatgccctctaattctttaaatttttttgtggagttgggggtcttgccatgttgcccaagttagtcttgaactccttgtctcaagcaaaccttctgcctcagcctcccaaagtactgagattacaggtgtgagccaccacacccagctccttatttattcctttacattaaacacatatttattgagcatcttttgtgctagccactggatttataatggtaaccaaacaaagctcctgctgtcgtggggattacattctattatatgtgtggaacattgactatacattcaatcagttagcaaataaaatgatttccattgtgttaaaagctatgaagacaagaaaacagtgtgattgaaagagtgactgggtgggagttggttactttagctcaagcagtcaggaatgtagactcggggaggataatatttaaagcaagacctaaaaactgagaaggaggcagcttgcatgaacatatcagacaggagtagccaacatggagaacctgagatggaactgggcttcgcctgagaaaccaccttaaaattttcaaatattttccatatagaatttatcattgtctcccttgttagtaataatatttttgtatcactcgatagactatatcacaaatcatcttttaatctttctgtgactattaatttcttaataaatatacagatggtcccaacttatgatcgttcaacttagaaatttttaatatttgatggtgcaaaaatacgcagtcagtagaaactatacttcaagtacctctacaaccattcttttcttcaatttcagtacagtattcaataactttcatgagatttcaacactttagtataagataggctttgtgttagatgattttgcccaactataggctaatgacgtggtggcttacatctgtaatcccagtactttgggaggcagaggcagaaggattgctggaggccag

SEQ ID NO: 7331 - DNA, 1059 bp, Homo sapiens
aaatactgaaggaaatcagtcataatcctcaaatcagacagaatattgttgaccttgggggcttaccaattatggtgaatatacttgattctccacacaagagtctaaaatgtttggcagccgagactatcgcgaatgttgccaagtttaaaagagcacggcgggtggtgaggcagcacgggggtatcaccaaactggtgagtagccgtgatgttgtcatcgtcatctagtgccagccgccactgcacacagctccttgctgtcctttctggccacgctggaaattccatagccatgagagcgtgttccaggagccttctgtctgtatcgcttgcccttaagaattatttttgcatatttatattagtgagtgtccaaaacaaaaacatcttcaaactcattttttgaagaaataggacagttttaaagcagatgtaactgtcaccacctattgtacgttgttaggaatgcatccaagtatacatgcatgggaggtaagagatagtgagacctgctgctcggtggaatgctgaaaactttaaaacgtcaaaagctttacaacttaaaagctgttgacatctatgatgccttttttttttttttttttttttttttttttttttgagacagagcctcacttctgtggctcaggctggagtgcagtggcgcgatcttggctcactgcaacctccgcctacggggttcaagcgttcaagcaattttcctgtctcagcctcccaagtagctgagactacaggtgcccgccatcaagcccggccaatttttatatttttagtagagacagagtttcactatattggtcaggctggtcttgaactcctgagctcaggtaatccgcccaccttggcctccgaaagtgctgggattacaggtgtgagccaacgcacccagcctgaaaagtatatttaatagcaaggaataaaatgtataatatttaatattgtataaaatcatgacaggattaaaaactgttatctatgatcccagtttttaaagatgtacctaccatctttaaaaaaaaccactagaaataaacac

SEQ ID NO: 7332 - DNA, 1060 bp, Homo sapiens
gaagccagaatgaatacactactccagggggtggcaggctggattcctgggttcctcttacccatggacactactctaaatgcaaacttgaatgagtcctgtctcctcctggactctcctccgtatcttgctctgcaatagcccaaatgaatcattcttccactttgctctctcttctacatttttttccttgcccccacctcatactacaaggaaatgaattttcttatatcctcaccctatgcaccaaagcttccattctctcctttcttgcagttattgaaacttttcagtgacagcagctgttctccttcagatcttcttttccctaggctctgtgtaaccacagggcatggggaccgtaggcagaaatctcctctttattgcttcaaactaccttactcttcagattagacctcctttcctatgaggctagtgtaaccctctgtctttcctggttgctgttttctatggatccattatcactgacaattttgacattgactgactatcactttcatcctatgtcccatcatcatcttgaaaaacctgaaaccccaagaggaaaaccagtaccaaatcttggcctacacactccctggtttcagtcttactgactgttgcctcctgtccatcaagctgctgctactgccacttcctggaattatcaccagaagtacccttcttccaaaatcttaacctagactgaagtcatttgttcattcacttattcatacttgctttaatttattaattcttctagcaaatatttattgagtgccttccttgtgctaggggagacagtataaaagacagaaatggtccttacctttatggaacttactaagacactacaagaaaacgcagaaataaaaattttctgatggtgaccaaagtggacaaggtactgagctacaaaataatgggaacttaggtaattactcatagaccacagatttgattctgttcttgctgaacatcgaggtaaagacaaaaacctaaccagttacttaatttatgtggtccctaaaatgaaaacagatcaaatcttcaaaaacaa

SEQ ID NO: 7333 - DNA, 1104 bp, Homo sapiens
gcatacggtgcaacgggtccgcgggaatcttggatgcgcggaggtcccgagaccagggtaacggactgggctgcggtcgcggccgggtgaggctgggagcggaaggcggcggcggcggcgcccgggggagggcacgggccctgtaggcctcccacaagggcgccggcgtgcgcggccgcagggcgcgcagtgttgacccgcgtcctagcaacaggcgggcgccgactgcggggggcagggtgctgcaggtgagtgcggctgggggtctccacgctcacccccgcaggggttctgcagccgcccgcgtggatcgggaaacagaggcggctctctggccccgccgctgccgctctcgcctgctcccctttccctcccggggaccaagacccgcccccttcccttctctctcccagccccatctcactccttcctccccgcgagaccctgcctcggccctaggttggggaccgtctgctcctcagtccctgcgcccctctctgcactacctcggccccatcacctcccggatccgctctccacttctcccgccgcttccctgcctctccttcccccagcccgtctttctcctccgccctttgcagctctgcctcccgctcccagcgtggttttcgccgtcccttccctcctcgtccccttaccgaatccattcctggaaacttagggtctcagctctgacgcccccttcttgtaacgagtctggtgggggccgtcatcccacactaggcttagctttggttttacttagggccctgttcatgtcatgtctaaaagttcgattttctgtcggtcttactgagtaacttctgcattctcagaaagcagtgtatgcgcggactccccgtggatgttaccaaccacatttcatagatctcagagctgatggctgcctttccgtagccccctaaagaattcggttgtgcttctgtttaagtgttaacgatgtgattaccgaatgggtttcatttcactaatgatgctggaagcttgaaattgacctttagaaagaaaaacaatctgtggtatctattggataaagagaaaaatgagtgctaagtgattcccagtttatgtaaacatcccagt

SEQ ID NO: 7334 - DNA, 1050 bp, Homo sapiens
ctcatcctctcttgcttaccacgatgtaagatgtgcctttcgcctctgccatgagtgtgatgcttccccagccgcatggaactgtgagtccattaaatctctttttctttataaattacccagtctcaggtatgtgaaaactgacaaatacacatatctgtgggatggaaatacattgtttatgagggtggaaatagaaggatatcagaattcacatgaactagggaatggcatagaccatcagcaagggtagagctgcatccaggacccatctcttgcaaatatccaggaccatatattttgtatcccaacctcatttctagatgtagtttctattcttgtggattcttttttcctattgagatctctttacttattttacattttattttttttagttatgtttctgtgtgtttttgtaatctggtttaagttcattttagaacaagatatggcacaaaaacttgcttaaatactatatttctttctttcttttttttttttttaaattctctgagacagagttttgctctgttgcccaggctggagtgtaatggtgcaatcttggcccactgcaacctctgcctcctaggttcaagtgattctcatgcctcagcctcctaagtagctgggactgcagccgtctgtcaccagtcccggctaatttttgtatttttggtagagacagggtttcaccatgttggccaggctggtcttgaatcctgacctaagggatccacctgcctcggactctcaaagtgttaggactacaggtgtgagccactgcgcctggcctatatttcttttaaataaggctgtagttctgttttctccagaaatctttgtttttaactcacaactatgttagatttctaggataagaatatggaattgttagtaccttttaaatggttgtgttatgtttacccctaccctttaaagtaattgtgtgtatatttgggaacaggaggaaaaaatgtagcaatctgaattttattctttttggtattttgaagtatttcaacaaacccaaattgatattttccagat

SEQ ID NO: 7335 - DNA, 1027 bp, Homo sapiens
gattggggccgggcgtggtggctcatgcctgtaatcccagcactttgggaggctgaggtgggtggatcacctgaggtcaggcgttcgagaccagtctgaccaatgtgatgaaaccccatctgtactaaaaatacaaaagttaactggttgtggtggcatgcgcctgtaatcccagctactcgggaggccgagacaggagaatcgcttgaacctgggaggcagaggtttcagtgagtcgagattgtgccattgcactccagcctgcgcaacaaaagcgaatctcttatctcaacaaaacaaaacaaaatctgattaaaaatgactttataataagctgggatggggaggtggggcagttgcagataaagtaagactggccataaattgaaggtaggtaagaagttcaagaagtttccttgtagtattatactctttcctccagtttagtatatgctggaaatactctctatgttaaaaaaaaaaaaaaaaaaaggaaagtaaaaagactgtaattcgtgagtggggccacttagtaaaggatatagggcatcaatacaaggcatacttttattttgttattgctccaagagaaactaatagaagatctttatgtactgtatgtatcaatagtagcgtaatagcattagaaatcaatggtttggctgggctcagtggcacacgcctgtaatcccaacaccttgggaggtcgaggcagatggatggcctgaactcaggagtttgagaccaacctgggcaacatagtgaaaccccatctctacaaaaaatacaaaaattagctggacgtggtggcacatgcctatggtcccagctacttgggtggctaagatgggagcattgcttgagccagggaggcggaggttgcagtgagccgagattataccactgtactccagcctgggtgacagcatgagactctgtctcaaagaggaaaaaaataaaatcaatgtttcggcctttttgggaagaagtaaatcattatctgtcatgtggcttactgtagtgactt

SEQ ID NO: 7336 - DNA, 1046 bp, Homo sapiens
aaagatttgaaggtgatgaggtagcaagctatacaggtgtctggaaaggaatgtttctggcaaaggggacagcaagagcaaaggtcctgaggaaagactgcctaatgtgttcagaaataataaggaaagctctgtgattgaagggcagtgactgagagggaaaatattaggaaatgaggtgaggttaaagaagtgggtggaggaacagactgtgaagaatcttataggccattataagaagattggcttttattctgagttaattgggaagccattgaaaagttatgagcagaaaatgacatggctactgtgttgaaaatatctgtattgcaaggcaaggagcagggaaaccagttaggatcctacagcattgcctaagtgcttcaggttactgtttcaaagcggaaagtaagcttctcatctaaggccattttctctatctgtcctttcttgccacccccccttcagttcaccttatattatcaattatcccttcctttgtatattcaaactctctttcatctggattatttccactgatctttaaacataataaatcctaccaccagaaaaccctttcttgaccgtatactcttaactgctcacttcagccaaacatctgctaagtcttatttgtggtacctcacttgtttcattctttactctcgtattgacattttaggtcactattgtttgacatctgcccccgtaatattagcaaaatagatttccctgaggcagtagttcttaaagaggcagtgctgagtctccagggggcatttggaaatgtgtggcagtattttttttttttatcactgctatattttcagtatgacttaagggtgaagggtgctacagatatttagttaccagaagtcaaagatgctaaacatgtagcaatgcgtaggacagttctttatatttaagacttgtcctgctcaaaataccaatgttgtctcatttagaaatagtgttaaggtcacaggtcacaaacaacttctttgcacctatgtttaatgaacatttttttcactctttcttaatct

SEQ ID NO: 7337 - DNA, 1051 bp, Homo sapiens
tgactgcaccactgcactccaggctgggcgacagagccacaccctttctcaacaacaacaacaaaaaaagtgtatttaaaaagcacaacaccataatgaattgacaagtggtattatatgtcttcaaacctaatcccagtgaaataaatttctgaatttctctctagcatatacatttttaaaacaataagttggagaaataaatgttggcacagattttacatatgtttcctctgcctccacttttgggggctcaggggttggattagtgatgactgaccggtctatagatgtttgctgttttgcagtgaaaacccatcttataactacagtcttaactctaagagcagaagatctcaagatatcatctggctgatcactttgccttcagataaagattagaacctaatcatcccttacagagtgtctacttttttgttttctttatgtataaaggcttttggtgaaagcggtctaacagtcatctggcatctatacatttggacatgtaaaagttgttaggatttagaacagctttcagtggaattgcaacaagtgcatccagctcctggttttgtactaaagtagctggtccacgtcatcactcagttcttgtccctctgcacagcatggagtgacacttgtcaacaagcagtttatattttcaatgctgtacttaattcttaacacagtggttaagcattgaattgcacatttaatcaaacttgagtatgttttccctctcgggattaacttgaaaagacaaaggtgttgagtcagttatgaataatttctgactgtaaatattgtcactgtaactgaacctcctgcgttgtgtttccttattcaacgtgcccagtgtcttccaactccaacttctcagaagtcaccctggcgggtttagccagtaaagaaaacttcagcaacgtcagcctgcggagcgtcaacctgacggaacagaactctaacaacagcgccgtgccctacaagaggctgatgctgttgcagattaaaggtatttcagagcagcctggcacggtgactcagggcc

SEQ ID NO: 7338 - DNA, 1042 bp, Homo sapiens
tgtcatttccaacagcaggcgtctgctggcccctcttgccctctgcacactggactgagttgcactgccttcgttcctggctgcaggcgatgcgccaaactcttcccatcaaataaaagttgatgaattggaccctttatatttggaaatgaaatgactttacatacatcttaactttttatttgctgtgggcaaaattgatgtgatgcagaggatggggaggtggggtgatagttttaggagtagcaaggctgaaggatcttactggagaaacagatcagtccaagcctagaccgagatagaggtcagtggttacagcaagacgtacaatagcggtgccaggtacctgcctgtcccctccaaccaaaactcaaaccaaaatgattttagaaaattaagttgattataacttttattttcttttagaaatttctttttgagctgcaatgtgtttccagcctggtgttgaaaaattcttgcagataggctcataaagttttgagctggtaaacattgtaactagcctgtagaatttcctttttttctttctacattgtaagaggagacagggcagtaatctgagtgttcctcctttgacttgctttatgttgttaaaacaaggttgtccttacccatgatgtttctctaaaataccttcagcctggtataattactcgttcatattctgcttggcatcatactcagtcgtgtgttgaggaatgaatgtgtggactatatattacctagcctacctgcggtttaaggtttttaatggctatgttgatttatgattcattttcgtcgttccttagctcattacttgcacttactaggagctcaataaatatcagcagaatggacctgaattagtacttgtaactcttgtgttggtcacattattcagtgataattttaaaaggaaaatgtgtaatagcaactaaaaatgtgatcccattgacttattttattttatttttatttattttaattatcttctttatttgaaatgtgttgttttacatagatgctatttttatattag

SEQ ID NO: 7339 - DNA, 1690 bp, Homo sapiens
cagggactcatgcctgtaatcctggcactttgggaggccaaagcagaggattgtttgagtccaggagtttgagaccagcttggtcaacatagcgagaacgactcagaaaaaaaaaaaaaaggaaaaggaaaaaggcgattcacagaatgggagaaaatagttgcaaattatatatgtcataaaggacagtatctagaatacataaagaactgttaagactcaataataaaaagataatttgattaaaaaagggcaaaggattggaatggatagtcctccaaagaagatatgctaataactattaagcacatgagaaggtttttactatcattagccattagggaaatgcaaattataaccacaataaaaaacacttcatacccacaaagacggataatgacagttgtttgtgaggatgtgaagaaattggaatgcccgtgtttccaaagcaactgttttggaaaacagtccagcagttcttcaaacaattaaacacagatttaccttttataacccaatatatccactcctaggcatatccccaagagaaataggatacatacctatacatatacctatacctgtagtcccagctgtacaaaaataataatatttctagcagcattattcataatacctaaagaatggaaacaacccaaatgtttgtcaactgaagaagagacaaataaaatgtggtatatccatacagtaaaacactattcagctttaaaaaggattgtagtgctgacatatgctaaaacatggatgaaccctgaaaacatgctaagtgaaagaagccagacaccaaagaacacaaactgtataattccttttatgtgaaatttctagaacaggcaaatccatagacacaaagtagattaatggttgcctacgacagggggtgtatggtggcaaattacgagtgactgctatgggtctgtggtttcttccgggaatgatgaaagtgactagaattgagtttctaatggtcgtacaattccgtgaatatattaaaaaccattgaatgatacattttacattagtgaattgtatggtatgtgaattttatatcagtaagcctggtgtgtgtgtgtgtgtgtgtttgtgtgtgtgtcttacatatattggacggttaactgtcagcacttcatgatagatgagacttagggagtgaggacaagtgaggaattaagaatgacctctaaattttggtcttgagcaatttctcagaaggagatgaaagactgagattaggagggtttctttttgctttgttttgtttttgttttatggagagggccagctttgagaatcaagagttctattgtggacatattaagtttgaggtgtctattaaatatccaaacaaatcttaggcagacagttgaacgtgtgtctagaactccgaggagtaatctagactggagataacatttagatgataggtgaatctgcaggaaaggatgaaaacagagagagagagagagagagagagagagagaatgcatgtggcacaggatgaggtagaataggagaggggagttacaaagcaaactgagaaggaatggccagccagggaggaaggagaagtaagagagtgagcacaaggtcactgaactcaggcacaaagtaagtcctaccgagaggtagtcataggaggacagaaggatctattggaattgccaagatg

SEQ ID NO: 7340 - DNA, 1053 bp, Homo sapiens
aataatttgttttctaatagcatgaaaaagataaaaaacttaggaataagtttaacaaaagaagtgtaaaacatataccttaaaactataaaacatcattgaaagaaactaaagaagacctaaataactggaaaaacattccatgtgcatggatcagaaaacaatattttaaaaatgacagtactcttcaaattgatctacagatttaatgcaatctctgtcaaaaatctcaaatgaatttttttaattgacaagtagatactaaaactaatatggaaattcaagggacccagaatagccatgacaatcctgaaacagaagcacaaaataggagactcagcttcaaaacgtattacaaaactacagtaattaagatagtgtggtactggtattctattctattctatagaatagaattgagtctagaaataaactcatacattatttgtggtcaattaattttcagtaaatcagtggaaacaatacaaaacaatgccaaaacaattcaatggggaaaaataatctcttcaacaaattgtactggggaaactgtatatccatctgccaaagaaaagctggactcctacctcatatcataaacaaaaattaactcaaaattaataagaggcttaaaggtaagccttaaaactctcagaaaaagcatagatacaaatttaatggccttggattggatttttttaagatatgataccaaaaggacaagtgacaaaataaaaatagataaatgtatcaaaattagaaaactttgtgcagcaaaggacaatatcaagaaagtgaaaagggctatgcattagtccattctcgcattgctataaagaactacctgagactgggtaattcataaagaaaataggcttaattggctgatggatcttcaggtcatataggaagcatggttgcagaggcctcaggaaacttacaatcatggcagaaggtgaatgggaagcagacacagcctgcatggctgaagcaggaggaagagagagaagggggaggtgctacacacttttaaacaaccagatctcatgagaa

SEQ ID NO: 7341 - DNA, 1084 bp, Homo sapiens
cagcagattaatcacagcagagtatccagtttcattcgtacgtgtggttgtcttgtattgtttgctattttctttctcagatttttcagtagagactttgtcctttttcagagagagttcaagtggatggccttgaggacttgaaaagctgagatatgatgattttgaagtcatttcacatcgaagccatgatttaaatatcggcgttaaggtaagtattgaggaaagaaatatgacacttttgtggttaacacattattggctttgcttgcactgttagaagagattaaagcacattgtgaagggtgattttgtttgaatcatgttcaacaaaccagagctcgaagaagattaaagcggcctctgtgatgcggtgtggaaccatagacatacaggagagctgagccactgtgatggttggaaatgtcttcatttttcctcgatggtcatgtgtcccagtgtgccctttatgaacttcaggaaagaacaggaaagcttacagctgtggttttctttctgagctgagccgtggctattagggagctttcggggagtgtgaattagataggacctttacataggagcagagccagccaaaggagtgagaacaggagcacccttctggaaactgtgctatttgacctgcctctctggagcaggagttctcaaagtgtgttccctggaacacagctccctacaccactaatacagtggggacctgggtcagaggatgggtctatgcctaagtgcgtttggaaagcattggattaaagttaaatgaccttcttcaaaactaatgagctttgtgaatcttgatgggtgtgagtagtgggcagtgctcaccagagttccatggaactattttcttgtgaggcatcttaagaccagtgttccatttgttcattaaatattgattgcgcaccagccatggatggtgttagatgctagggatgcagcaaaaactgaggttgacagtgctcatgtttagataataaatacattaacaattaaggaaaggtaatcattgagagacacaatagcaaatgtttaagagcctggtatctgcagctcagtggcttgggtt

SEQ ID NO: 7342 - DNA, 1025 bp, Homo sapiens
taagatgaacacagaccttaagactgatagaacagactctttaagtctaataagaaacctttacaatcagttttctgaagcctgaagcctgctacctggaggcttcatttgcatactaacaccctggtctccacaatcccttatcttaaccagacatcccttcttattgattctaagtcttcagacagtaatttaactctttcagccaatttccaataagaaaatctttgactccatctatgacctggaagccctcacccccactcccagcttccagttgtcccacttttctggaccaaaccattgtacatcttacaagtactgattgaagtcttatgtctttctcaaatctataaagccaagttgtagcccagtcaccttaagcacatgttctcaggatcccctgagcctttgtcatgggcccttggccactcatatttggctcagaataaatctcttcaaatgttacagagtctgactctttttatcaacacctgacttagaatctcagcaccatctttggacccacctgctctgctacctttgagcccttagtttctgcctcccttggccaactctccccattaaccattctatgaggacaggtgaatagtcattaaacatgaggtgaagcacagtgttttttgagaacatctgaatgtcctgtgaccattcctgtagctaacatacacttgaacctagaaaagcatatctgaattgtaacagaatttgtatactcctctttcttcaccaagcctgtctaattccaggcagaaatgtttctccttcttccttctaaatgcaacatcattttgtcctttgcatgtttcattggtttggttccttttattaattatgtaataattatggtttggttccttttattaattgtgtgtaaagggtatctcctcactgatcactagacgataagctccaggaggaaaaggatttctttctgttttggttgctactttatgccaggaacctagagcagtgtctggaacttagtaggtgcttcataaaca

SEQ ID NO: 7343 - DNA, 1051 bp, Homo sapiens
caggcatctattctctcccatttttccaggcatctctaggaacttactgccctttcaacgcaaagtttaaattttttatttgaagaaccagccaatgagaatgtatttggtgatgtcttcatagctgcaaccttttctatgtatgcgtgcctgtgaaggggtaggagggagaaaccttctagattgttttcttttttccttcctcttctctccttgcctttgctcctctcccccaccccccatccccaaataaatacacaaaacagaggtcctatagtgtcatgcttgagaattatggattcgggccaccctgcctggtttgaatcctgacttgtctctaacacctgggcaagttggttagctgttctgagtctcagtttcctgatctgtaaaatgaggatgaagacagttcttacctcacaggattatgatgagggttaggtgagttaacatatggaaaacactcggagtgcctgccattaacccatttatgcctgaggttgcagtctttttgtgtgaaaaatcggaccttggcgatgaccttgaggggtgggatataaataactcccacaagcttagcgttccaataatggaacactaggcatatatggttaaggactatgtcagcgtcagtgaccatgagacaaaaaccatatgggtcatagctatttgggagtagttgttaggaaaaagaattttagaatggagcattctgaaatactagtgtttctatatttttacagtaataggaaaaaagtcccgcctgggcacagcagctcacgcctgtaattccaacaccttgggaggctgaggcaggaggattccttgagcccaggagtttgaaaccaatctgggcaacatagggagaccttgcccttatattaaaaaaatatatttttatatatatatcatatatacatataaataagcatttatatgtattgttatatatatataaggttcagagaaagtagaatgttattgtattccgtgtgtagcaggaaaaataatcatcacagatctctcctgaacatttggtgtatgccaagca

SEQ ID NO: 7344 - DNA, 1036 bp, Homo sapiens
taaacatttcaaaattatttgtaagacaacatattttgtggcacagtttggtgcatgctcagttcctcggtgaacacacatacacacacacacgacactgcaagtttagggagtggcgtgagctctacaacttggaaaacttatgagaaagcacagacgtggctgagggaggagtggttacgattttgagcatggtaggctgaggcgcccagcccactggagcaggaagtaccagtgaactaggatattaatgaacagttcaagaacccacctgaggctaggcacagtggctcatgcctgtaatcctagcactttgagaggccgaggcgggagaattatttgatgcccggaattcgagatcagcctggccaacatagggagagaccccatctctacaaaaaattaaaaaattagctggggtggtgtcatgtggctgtggtcctagctactcaggaggctggggttggaggatcacttgagcccaggagtttgaggctgaagtgagctgtgatcacaccagtgcaccccagcctgggcgactgatctagaccctgggctccttcccccaaaaaaacaagagcccacctgacagggactttggaggagagacttggcctttactgttaactttccccaactgtttgtcagggccactgaggaatcccatttgggatgagaaacaccccacattgcagggcacggctacctgaaggcaatcctgagaatccccctggacgttggtgtctggatccttctgatgcctgcctgctggttccacgagtctgctggccccaggccaggccctttgtcggagcccccgccacaggggctgctggcgtgcatctggagaaccagctgacagaaggcctgtgttctattcccctccccttctctgcttcacttgccatgaatgagcagaacatgagtggaaaagagtgatgcatttggggtggaagatgcgattgtcaagagcagggtttctggcaccaggtggtggagaaggagaaaggcctgacatctctggagcagtgggggg

SEQ ID NO: 7345 - DNA, 1096 bp, Homo sapiens
ttcattttctcatttatgaaatggggatgataatagtgacctaggttataaatcataagagtataaatgaaataatacacgaaaagtccttagcacagtgcctggcatatactcactgttttaaagatagcttcagctattattatttgtaaacataccacattattttaaactgattataatccatttaatcattattttaaaagcacttctagtctgtaaaatataatttctttggtcttattaattaccactgctactgctgtcactattaccactgctaccacagatatcttcaagcaagcagatgtaggaattaatagaaatttggtttaagggcaaattaatggcatacaatttggagacatttacttaggatacaaaatcaatatgcaaaaatcacaagcattcgaataaaccaacaatagacaagcagagagccaaatcatgaatgaactcccaatcacaattgctacaaagacaataaaatacctaggaatacagctaacaaggaatgtgaaggacctcttcaaggagaactacaaaccactgctcaaggaaataagagagtacacaaacaaatggaaaaactttccatcctcatggataagaagaatcaatatcgtgaaaatggccatactgcccaaagtaatttgtagattcaatgctattcccatcaaactaccactgacattcttcacagaattagatagaaactactttaatttttacatggaaccaaaaaagagcccgtataggcaagataatcctaagcaaaaagaacaaagctggagtcatcacctacctgacttcaagctatattacaatgcaacagtaaccaaaacagcatggtactggtaccaaagcagacatataaaccaatggaacagaacagagacctcagaaataataccacacatctacaaccatctgatcttcgacaaaccaaacaacaaaaaagcagtggggaaggattccctatttgttaaacagtgctgggaaaactggctagccatatgcagaaaacagaagctagaccccttccttacaccttatacaaagattaattcatgatggattgaagacttaaatataa

SEQ ID NO: 7346 - DNA, 1014 bp, Homo sapiens
aatagggattagcttgggacaaggccaaggcagagtttataggtcaactgcagctactcttcctcttcccatgggttactaaccaatgactcaagagcaatctggcttgatcttagttggatgggaatgttgtcggcagaggtagcattctcattgttctggaaggagcaggtttcattttcacaccaatcacgagagtgttaggggaaagctgtcccttagctaagttggctaggaaggttttcaaaaatccatctcaattaatcatcataggctatgaaatgacacctgaaaaatatgaagaaaatggaatgggtggtttgtgtgttgaatacaaaataatgatataaagcattctagaattcagaaaccaacttatgaaccaagatgttattttcagagtggatatactcaccttgcctggaccctgattaaactcctcctctttttttgtttaaagttcaatttatattctgaccgttttctttgtttagagttatattgctttggttcatatttttgtactgccttcacaaaatattaggggtgtttacttagatcttaggtttctcaagtctttttcttccttccttccttctcttttttcttttctttttcttctttttttttttttttttttaatttcagacaaggtctttctttgttacccaggcaggagtgcagtggtgcagtctcaacctcctaggctcaagtgaccctcccacctcagcctcctgagtagctgggaccacagctgtgtgccaccatgcccagctaatttttaattattttgtagagatgggctctcaccatgttcccaaggctggtcttgaactcctgagctcaagcgatcctcccacctcagcatcccaaagagctgggattacaggcatgagtcaccacgcccggccaagcctttttcttttgtctctgatcctcctaaactttcttttatctccaaaactcttgctctgtgctttgtacactgctgcatgttcagatagagcttaatct

SEQ ID NO: 7347 - DNA, 1142 bp, Homo sapiens
gctcagccaatccttctgcctcagcctttcaaagtgttgagattataggcatgagccaccacgcctacatttataaatatttatggaggacttttatgtacagggcagtctgccgggattttcacttatctaatgtcatttaatcacaagtaccacgtgaagtaggtagtattactcccatttcacagatgagcaacatcaaggcttgagaggaaaaatgattggccagagtcatgtatctaggagtgacaggattgagatttaaatcaagatcttctgattccagggtcacattcacttcccagccaataagtaaacggcagtgatgtcaccatggaggtcctatgtgtgtgtaacagtggattctggaactcagcttgaaagctcatgcagtagaattttaagaacaaaactgtccaattagggttggagtttttagtgcccctacattggatttagaggctagaattcaagcatctgcctgctttttgctaaaaatgtttattgtacaaataaatctgtacccaactcctgaaaacaccaggtttttatttttaaatgtgcacaacttccaaaggccggtttggtgctgaattggaaaggattctagttcgcaaaacctggaaaatgaccattactcttgttttctttctttcgttctttttctttaaacagttgtattgaggtataatattgccatgttttcttaacctagctttttggaagaaagtttgggtcaatgttaagccaaaatttcttaacttctagggctttttgatatggtcttgcataagtttctcaaactctcacttttttattactcccagataaatcttttcagtagaaatttgggaaatttttgcattttaaaaactcgtacttgctgatgcagttttttttctttcttttctttctttctttttttttttttttttaagacagagtctcactctgtcacccaggctggagtgcagtcactgcaacctccacctcctgggttcaaacgattctctggcctcagcctccccagtagctggaattacagatgcgcaccaccacgtctggctaatttttgtatttttagcagagacagggttctgctatgttggccaagctggtctcgaactcctgaccaaaggtca

SEQ ID NO: 7348 - DNA, 1047 bp, Homo sapiens
ttattgtttctatttctcatacatacataacttcgttttttgtggctggaagaaaaagtttctatattttgtatttgtctttgttcttctcatgcacacaatttactgttggtgtttaataatttggagctcataaaattaaaagttgtaattttgaccatttgggctaaaaattatatgagggattacatatgcaatggattagtatttcttgatttgcaaaagaagggaaaatgatggtaatttagctcaaattgcctttctttgaagaaaatttctgaatgactgaaaaccaaatatctatattatcactttcaacctcatgtttctgcaaagtacagaaaaactcctcactgacagtgcacccagcccctgactgggttttcaggattatgtccatgtgcataactgcttggatttcttcttttaaagtccctaaaacatgaatctgttctttgagatcctggtttccttagcagagttgtaggttgcgggtttcattcacgtggaaattctaagtagaacttttgctgccccattttactgttggtgaagggccgttgttaatggaagtttacgttttaaaactcagatgactcagaaaccagactgtgatcattttttgcagcagcaaaatgacttattctgacagcatctcggtttggggcttctgaagaaaaaggatgaagctgatctgttgaaacaactactttcccaactcggaggcaaaaggggctgatagaagataacattcacctaccatttcatcttgtgacccccagagatcacgtttgcgtgttctggctgagttttttattattgtttgttttaaatgattaaataatacacaattaaatgtcaggatagcatctcttgcaaagtgaccagtgcagcagaattgtctttctatccatatttgagcttagagaaacatttcccatgtcctaagttcttagaagcaattactttagcgttggggagcattgttctaccagacccatttatgcaggggagatgaagcttaaaagacgggatgtggggtgggag

SEQ ID NO: 7349 - DNA, 1002 bp, Homo sapiens
tttaaacagattaagtgaaaaaaaagtcacattgggagaaacaatttgccgtatgatgaaagtcttgcttctgacttgctttttttttttttgagatggagcttgctcttgttgtccaggctggagtgcaatggtgcgatctcagctcactgcaacctctgcctcctggcaggttctagtgattctcctgtctcagcctcccaagtagctgggattataggcgcatgccaccacaccgggctaatttttgtatttttagtagagacagggtttcatcatattggtcaggctcgtctggaactcctgacctcaggtgatccacccaccttagcctcccaaagtgctgggattacaagcgtgagccaccacggcccttacttggttttttgatccactccatcattgtctccccttccttgtttgacatcactggtgtcacttcggtcatcctctttgtcacacagccataaggaggcatggatagttcagtggtagaattctcacctgatgcgtagccattgggaataagtgagaacatggaggtcaaataagtagcctatgacctgaaacacagcaagtgcttaggaaatcatcttcctctctcctggcccctcatccttcctcactccatttccatcctcctttcctttcactttctgcctcattctctcccttttctcctacccactttctccttccctccctccgagtttcctgccttcccttttctctggtatcatgccttttcttgcaccatgccaaggatggagccagaaataacaccaaaagcagaaactcaagccttggaattacaaggtatgtgcaaaggaattttttgtgatacgcctgcctttcccaaaggactcatctgttttttttttcttttttctttttttttttttagacagagtcttgctctttcgcccaggctggagtgcagtggcgtgatctcagttcactgcaacctccgcctccctggttcaagcgattctcctgcttcag

SEQ ID NO: 7350 - DNA, 1042 bp, Homo sapiens
agttaatgctggtgttttatgtgttttgacattttattgagttaactgtttttatatttaagcccttcatgtacttactcattttttcttctgtgtaataatctatagggaagggagcaaaacaaacctgattcttctcctctgtacattcagaatccatttgaaacttctctcaacataagcaaaaatgtaagtcaaagccagctgcaaaaatttgtagatttggcccgagaaagtgcctggattttacaacaggaagatacagatcgaccttccatatcaagtaatcggccctgggggctggtatccctattgctaccatctgctccaaacagaaagtcctttaccaagaagaaaagcaataagtttgcaattgaaacagtcaaaaacttgctagaatctttaaaaggtaacagaacagaaaatttcacaaaaaccagtgggaagagaacaattagtactcagacatgatggctgctacattgtgtaaagaactgggcttagcctatcaaatggtctgtggacttacttggaaaaactgatttgaaactttcacagatctcagctttcatctgatgtcacttttcatgatcttctcattggcccccttaacctggtctgaagttctgggatgttttcagtttgatcagtctgatactcagtggcactttattaaaacatcagctgtggagtgtggcggtgcacacctgtagtcccagctgctcaggaggctgaggcaggaggatctcttgagcccaggattttgaatccatcgtggacaacatagcaagattccatctctaaaaaaaatgaaaataaacataagccacaaggaatgggtgaaagattattgtaatgtgctttaactaaataggtaaatatactaaacaaatgctaaaactcagttttaggatgaaaccattgttgatatccacatcagtccctgtttagaaaacatttaaaatgacttttagttatgtacagtacgttggcaatgaatacattaagcttcaaaatttggtagtgctctcgaatatgtata

SEQ ID NO: 7351 - DNA, 1340 bp, Homo sapiens
tatggatctaactgtctgtgaacagtttttctagtttttatttatttaatagaggacagtcatttttgagaatatctttcctttgctcataataagtataattttcatctaaattttccctaaaggcagtgttttatttctgtactgagtccattgtgattcttcgtggcttgcatttttggtcagtcaggttaggctagttgatgctttggtaacaaacaactcccatatctcaaagatctcagtggcttaacacatcacctatttatctgttgctgaggttatatgtcacagcaggtcagcatgggcactctagacattgtagtagctcaagcacccaggctgaccagtgtttcatctccacctgcgctaccatcactgaatagtggaaaggcaaagtgaagaattgagcatcggctcttgaagtttctgcctggaagtgacacttaaaacctctgctcacatttcactggccaaagcaaatcacatgagtttgcttaaccttagaggggcaagaacatgagatcttccaaatgccagaaaggtgatacagaacatatggtgagcagcttcaataactaccacactcctgctcatggttcacagttcaccactttcctgcgcccagttccattaatcagagctattttttcttgtcattttcacttctgttacctcaaggattttattctctcatttatagtacttaatttaaaaaatctctgtcacctttcttctgagtgattctaatccttctgttgcttctgagattgagtccaccatgactcctccctgatgtactctagtactgctttctcacttgacctctttttgccatcctgagatagacccccaatctgtctttgcttttgtttggattcctattcctaacataaattgtgtgtgtttgtattttaaaagagaatggacagggaactaggttatgaaggtaaattataacaaaatggctaaggaagaatcttgaaattttaattttttaaaggaagtttatttttagtccttttaatataaaaatatctaaatgacagatcagtagagaaaatgccacatgtttatttgtagggattgtatacagtgatttatttaatctatttttttctgattataaaatgatagacatagaaatacataagtatctctgttggtcacactgcctccagagataacccggtgaataatttaatatattctggattttttttcctgtgcgtatagaaaagcttttttttttaaaagaaaaaacccagaacataatctttaccgataataactttaacttcattttttttcccccattagtagtgtcttggcagttcaat

SEQ ID NO: 7352 - DNA, 1676 bp, Homo sapiens
ccttctgcctctggagtagctgggactacagtcctgcaccaccacacccagcttgaatactttagatagtctctttaacttgcggatgaaggccagtgggaggggatctttgttttgcctttggatttttctgcttcatcattcttttcagtcttttcagcttctcttaactaacattgttttaaggttccgtttctttttttttgacatggagtctcactctgttgcccaggctggagtgcagtggcatgatcttgggtcattgcaacctccgtctcttgggttcaagcgattctcctgcctcagccttccaagtagctggacttacagacacctgccaccacgcctggctaatttttgtatttttagtagaggcgaggtttcaccatgttggccaggctggtcttgaactcttgacctcaggtgatctgcccacctccatgtcccaaagtgctgggattacaagcgtgagccactgcgcccggcccagtgttccttttcttcatctacttaaattgaataaaattaatgctatgttagaatcatatcatttgtaaattttaaagacttgatattttgtagcattatgataattgttttaatatatgagctaaaatagtatgttagatatatcgtgaaatgtgttctgttttttcttatgtttttggtatagggtctctatgctgtcgtagaattttgccaaaaggaaagcataggttcactgcagaatgggactcatactccaagcacggccatggagactgcaattccattcagatcacgtttcttcaatctgaagttgaaaaaccagacttctgaacggtcacgcgtacggtcaagtaatcagttgccacgttcaaacaagcagctttttgaattactttgttatgcagaaagtgtaagtttttaggtgtacctcaacttttagaactatgtatttttttatgaacaataaagattcctgtaaaatgttcaagctacattattgtttaatgggtatagatcttcagttttacaaggtgaaaagagttacggagatgaatcgtggtggtggatgcataatgagatgaaggaaagtttttttctatttctagctttctaagaatgtcgtcatgctcaacacattgagtagatgttgagttttgacatttgagatggtattgatgactggcatatggtcttgagattgtatatggttcctaatgtctttttctttcccctcctaatgtcttaacgtagtgaattgtagattcactgtagatttcctcatgtcaagtcattcttgcattcacagaataaaccctacttagtcaaggtgtatttacaaaaatgcattattacatttgtcgtgctaatatttttattacaattttaatatctctataaataaatgggattgcttttaaaaattcaaactacaggatatgttgaatgaaaagtgatagtaatccttgtctgctccttccccgccatgccccatttgtacttacaggtaaccacattcttctgaagttttcggccttttgaacagtttaggttttctttctctttccagcataatgacataaaattgtacatggttttctgtcaattttaaaatgtcttctttctgattctctctctctttttttttttttttttttgagatggagtctcgctcttgcccaggctggagt

SEQ ID NO: 7353 - DNA, 1068 bp, Homo sapiens
tattgatatcagacttggtggtttatgatctctagagtctaccattccagactttttaaagaaacaccttaaactacttaactggaagttaaaatcttgggggaaaaaaattagttgttaacattcaggtttgtgctttaatactctcttagaacttgaataatttttttctctctatacttagttcatttgttgaccttcccattgtggctagtgggttattaatatttaattcttcactgtcacaattcttgtcttgattccctgtgattgtaaaactcctagcctctttctttccttagtaaaattatcagggagctcttcatgggcagtaacgaggttttaaattctttgatttccctgatacagagcgcatgatagttggtaactcactgttaattgtttgagccagatcaagacccttgagaaagaaaaatgccttaatagcttatgtcaaaacaccgaatttccaaactcattgtctcattacactcaggcttgtaataatttcttttaggctttggaatgttacaatttgcacaattttgtgtgtgcatatttgtacaagtattaaataagtgattttagtttcctggtttttttttttttttttgtggaactccgttttcagcactttgcatcaagcatagtaaatcaaaacagagaaagtgggcagttttaatagtagtcatgggagagtagtcaaacgaacactgaaagtgcagtaattccacctcatccatgttttcactgtccacagtttcggttcctcacagtcaactgtggtccacaaataggtgagcacagtacaatatgatattttgagagagagagagaccacattcatataacttttattacagtatattagaattgttctatttcattattagttgttgttaatctctgtctcttttttttgagacagagtctcgctctgttgcccaggatggagtgcagtggtgcaatctcagctcactgcaacgtctgccacctggtttcaagtgattctcctgtttcagcctcccaagtagctgggactacaggcgcgcgccaccatgcctggct

SEQ ID NO: 7354 - DNA, 1030 bp, Homo sapiens
attttcattttccttagctgttttttggtggccttataatcttgggctcttctacatgggatgttgatgatgggggtgatggtcaccagcagctccacgttcacatgcttgcggcttccgattgatcacatgcccaccctttggatgaagaggaggtgtccaaaatagtctgataatccctatctcatggggtgggggataagtgtgacagttccaccacaaccacatagagtggttttttactagcaggggtgtgctgttaccagaactgttacctgaacaggtttagctgttgtttggatgccagcagccaaaccaacaacagctaaactgcaggaggctacccagcttattaggtatttgactttgggcagtttttttcacctgcagtgatacctaccctgtctatcttaaaaggttattgtgaatttcagaagagtgtgtatgtgacagtgcttggaaaactattaagagaaggtgctatattatgtttaaagccagtgctcagctctcagattcttacagttttttttttccaggctgtaaatcctctctttatctgtagtaattgtatattagagtttctagactttttgttattcctctctggatgctctctggcttatctattatgtccagagtagaacatgtactccatatgtggcctgattagtaagtaccaaagaagtgttattaccccttaaatttggatttttaaaaacgtttgtctcaataaggcctgaagttctttatatgaattcattctcttcctatcctcaatccagaagttaagacattcctatgatgcatcagactttcaggcctcttttataaaactgctaggttaatttttcccccattacgtgcatgcatctttattttgtttttaattctaaatacaggatagtattctgtctttttttttttttttttcttttgagaaggagtctctcagtcacccaggctggagttcagtggcgctatctcggctcagtgcaacctctgccttctagcgattctcctgcctcag

SEQ ID NO: 7355 - DNA, 1049 bp, Homo sapiens
tttttttgagacgatgtcttgctcctcccctaggctggagtgcgatggcgcaatctcagctcattgtaacctccgcctcccaggttcaagcgattctcctgcctcagcctcttgagtagctgggattacaggcacctgccaccatgcctggctaatttttgtatttttagtagagacggggtttcaccatcttggccaggctggtcttgaactcctgacctcaggtgatctgcctgccttggcctcccaaagtgctgggattacaggcattagccaccatgcctggctgagttacatttctaatagctatttagatttctgctaatcacccaaatgcttaaccagaaagtggatggtttgtttagatttgagggattctgtagtagagagggaagagaaagggggtaacatttatcaagtgcccactttgtgccatgttctttacatgtatttttccactttaactccattttgcaaatgagcaaatcgggctttagaggtttaaaaaaaccgaagtcataagtcgagttggcaatagaaactggatttgattacaggtctggctgtctgactgtctcatcatcctggtcttagaaatcttcatggcttttatttgtgaggtaagatcagtgaactcagaattaggaggtttgagtaccggcttcacctcttctatagtttggatgtttgtcccctctgatatggtttggctgtgtccccacccaaatctcatcttgaattgtaatactcgtaatttccacatgtctaaggagagacctggtgggaggtgattggatcatggggcagttcccccatgctgttctcatgatagtgagtgagttctcacaagatctgatggttttataaggggctctcccctcctcactcctcatgctttctcttgcctgccaccatgtaagacgtgcctgcttccttttgccatgattgtaagtttcctgaggcctctccagctacatggaactgtgaatcaattcaaccttttttctttataaattaaccagtctctggtatttctttatagcaatgtg

SEQ ID NO: 7356 - DNA, 1029 bp, Homo sapiens
gcctcttaaacttagctcctgagtcctagattcagctatttctcttagaagccctactgtttaaggggtgatcatgttttctctcagccctttctgtagacagagatcagaagtatgtgcacatattgaagataaaataaaaatatttcataagtttatattggtgtttccaattcaaacttgagactatggtggagatgatagtgtgtttaaatcttctttctgtatctctttcctctgttttcaaggatatgagtgcttatagaactggaaagtcctacaattatgtattttcatcctatagtgcacacacaacagtctcagaatgacaacaccacaatactactcaaaacattaaaatccatatttttgcatacattctcgcccccttaatcacatttaggactggagatgtcttctgagactttagtttattcagcaaccatttagagcatcttctctgtctcacactcactgctagaaaggggatacaaagagatgtaagatatgtccctgttctctgaaagctaagggtcagggttattgggttatgtatcattctggtataggaagatgtggccatagaatctgggattctgttcttctttaaaagaagttaatgctaatgttaattcttctttacttgcatgtttcttaaaataaaaccctttctctctactcttatcagggagcagcttccttttggtggagctccttaaatactttctaatctcccttacgtagtatattattagtcagggttctccagagaaacagagagagaacaagagaaagatatagagtttattttaaggaattggctcacaggattttgggagttggcaaatcaaacatgtagaatacagcagcaggctatatacttaagtaagagttggtaatggtcttgagtgtaaaaattgcaaaataggctagtaggctggaaactcagcatttctatgttaccatcttgatgtagacttgcctctttttcaggtaacttttatcttagctgttgaggccttcatctga

SEQ ID NO: 7357 - DNA, 1064 bp, Homo sapiens
tgcagaaggtaaacaataaaggataaaatacctagctttaaaaatactttaataaccatgagcttatgatcataatcgtcttcattactagctattgttatcattagtaatacttgatttttttttttttttttttttttttttttttttttttttttttttttgagacagtctctctctgtcacccaggctggagtgcaggggcgtgatctcggctcactgcaagctccgcctctcgggttcacgccattctcctgcctcagcctcctgagtagctgggactacaggggcccgccaccatgcccggctaattttttgtatttttcttagtagagacggggtttcactgtgttagccaggatggtctcaaactcctgacctcatgatccacccgcctcggcctcccaaagtgctaggattacaggcatgagccactgcgcccagccaatacttgatattttaaagcaagaaacagcagctgttaaggtcactccctttgtaaaatggatctatatgagtttcattttctttaataaatgaaactttaggctgaaactctcaaattcccttatctccaacatgcaaagttaatttcatccacatctgtcttgtgaaagtatctttctttctatatcagttagaatgctttcagctggtaagtgacagagacccaactgaaagtatcgtatgtaataactgcattttattgtctcatataactagaaatctggaagaaagatagtttttttgttggcttatatagcagctaactcttatcatcagactctctggctctgtcttttcattctaccatcctgataagttggcttttgtcttcagacttttcccctcctcatctcaagatggcagctttaactccaagaatgacatactcatatcaaagcacccatgactgtaagaaaagaaggtgtctctcttatgtctttttttaaaatgaagaaaactttcttagaagcctcctagaaaacatgacctcattagctaaaattgcatcctatacccgtttctaagccagtcagtggtgaggggtacggaagtcctgt

SEQ ID NO: 7358 - DNA, 1015 bp, Homo sapiens
taggaagttagtcaaaaggctatacattccaggcccttaaagaaaacctgcattacttgtttggggacttagaaggtatctactagtactttaaattagcatctatgtttattgctgatacatcccataaatgttttctgtccatgttatgtaccttaatatactactttgtaattcttttgtaggggtcatagccatttcagggccatctctaaagacactgcaaaggacacatgctctagctgctctcttctccgtattgttatataagggaacctgaattaaaatgaattaagagtttggatgaaagggcattccctagccatcttagcaaagggagtgggagtaggattggaagagggaggataatggcctgtatgtgaatgtttatgcacatcatgttttttaaatcaggtctagctagtatcaagagctaaatattttttaatcgtatttttgaaaagtagtagaaaatagaacaatattcagatttgtgaaggattgatgactcagtattagagggaaaactcaccaaggaaaagatctaatagttttgaacatataaaatgtaaggtttatttacaatgaaaaaaatcacacaacacactggaggaaatgcttgtatcaaatgtgactaagggtgaatatctataatatctgaagaggaagttctctcgaacttaatgaagaagttttaatacataagtaaacaaagtattttagcagttaatgattaataaaaaggtgggattatgtttaccgtcactggtaatcaaagaaatgccttttaagttaaccttgagttatctcttctattctttcgaaaatactgaaaattaaaataactgacaattctggagaggctttaaggaaatggacccattcagtcttatgtgtttcttgtgctactcccagccactgcctttccctgaacatgctgtgccattttaaattcttacgtctcatctttatgagtccttcccctcttctttctgttgactttccatctcttgag

SEQ ID NO: 7359 - DNA, 1050 bp, Homo sapiens
tggcattgagtaaattctagaactgagtcagtgttctttctgctgactatttggtttcagtgctattaagtgtgttctactattaatagaactaacactcttaatagctatttaaatgcttcctatatactaggcactctctgttaggtactttatatatgttatcttggttaatctacacaaagcttatgaagacagttcattttacctgtgtattagttttgtattgctgctgtaaaataaaatgaaacaaacaaacaaaaaacaaaagatctggccgggcgcggtggctaacgcctgtaatcccagcactttgggaggccaaggcgggcagatcacgaggtcaggagatggagaccagcctgaccaacatgatgaaaccctgtctcaactaaaaatacaaaaattagcagggcatggtggcgtgcacctgtaatcccagctactcaggaggctgagacaggagaatcgcttgaacctggaaggtggaggttgcagtgagctgagatcacgccactgcacttcagccagggcaacagtgtgagactctgtctccaaaaaaaaaaaaaaaaaaaaaacaccaaaaaaacctttgtgacttaaaacaacacaaatttcttatcttacattctggaagtcaggagcccaaaatggacctgacatcctgttagcagggcttcccttctccctgaaggcttaggggaggtcaattttcttgtcttttccagcttctggaggctgcctgcattccttcacttttagtctctttgcatcttcagagacagcagtggctgggcaaatctttctcacagtgccatttttctggttttaattcttttgtccctgctttcccctttaagaacccttgtgattactttgggcccatctggataatgcagatactctccttattttaaggcccactgattaccagccttaattctgtgtgcaaccttcattccgccttaccaaatgagtggaaaaaacacactcaaaatggtttttttttttctattagccaacagcaatcaacacagaagacttttgtaa

SEQ ID NO: 7360 - DNA, 1034 bp, Homo sapiens
gaatcttagtctctggatgaccttatagagcaaagctacttacctttccttgaccacttgtctgcctcttgactgtaacgtgagagagaaataaattctttttttatctgagccactatattggtctcattacaggagtttagcttatatcctagttaatagagatggtaatgatataagcaggaatcaaatatagaatgttagattggaaattattcttgatttttttcagttgaagcttttcatttatgtattctttctatgaaaatttatttttcagattgtctaattgtaccaacactttagaaataaagctcttactttaacatcacccctgttataattatgctatgtttctttttattttcataagcatgtgctttacatatttatattaaaattttatatcctgatattttcatgtgatatctattttctttcttgctttagagttcttatatttgcatggttattattgtataacactcagttttactgtacttaaaattttattattattggtcactgtggactagttatgtccccccaaaattcatatgttgaggccctaaccttccacatgacagtattggagatgtggcctttaaggaggtgattaaggttaagtaaggtcataagaatggacccctgatcagatagaactggtgcccctataaggagaggaagagataccagagctctcttttcacctgtgtgaagacacagtaagagtacagccatctgctagcaaggaagagggtcctcatcagaacttgacaatgccagcgccatgatcttagactgcagcctccagaactgtgaggaagtcccagtcatggtatgtcattattgcagctgaagttgatagtatattggcatttagattgctttcaagttttccttctataaataatgctgttttttgtttttgtttttgagacagagtctcactctgccacccaggctggagtgcagtggcatgatctcagctcactgcaacctcagcctcccaggttcaagcaattctcctgtct

SEQ ID NO: 7361 - DNA, 1041 bp, Homo sapiens
acattatagacaacacagactcactgagttttaaggattgctgtatcgatttggaatatccaatcatcgtatctgactgcttgaatattttggtcaaggggtactacattatcgattagttattactagactataatgcctctcaaactccgggactagtagtcttcaggaactttgaagggaagaatactgtgcacacttcagggtgtatttatacaggagctcgagagttcacatttctgtaaattcatttcaggagtgtgatatcttttcatccaggtaggaagagcctttgaatcagaaagcagggcttctaatttttgttctattcgttaactagcttcgtgtccaaggacaagtcacgcaaacttggaactttgtttttcttatctaaaatgagagccgatggtttatctgtttgttggtttttccaggatcaaatgagatcacgagagtgcaaatgaaaggctaagtgtgctattgttattaggagattcgcattggtcccctagcctggatgagatgtgagtcagaaatctctggaaatagagcagcaaagaagacagcctccaacctagcagggctcatattgcagtgggaaatagacaacgaacaatacgtgcataatgtaatttcaggtagtcataagtgcagtgaagggaaggaagaaaggaggacagtgggggaacagggaaggttgtttttggtgggatctgtcaggaaaagccattcaaaggcagggacacttgaagtgtgagggaaagagcctgaggtaagaacatttcagagaggaataattaatagcaatgaacacttaaaaaaagtagagcttaccatatgtaaggcactattctgaacactaaattaaatttttacaagtcttttgatgtaacctagtatctccctttcatagatgaggcaactgacacacagaaaggttaagaatttgccaaagttgcacagctaaaacgtggtagagactatttgaacgtgggcagtctgacttcagagtccaggctccaggtgactgtattttcggcc

SEQ ID NO: 7362 - DNA, 1052 bp, Homo sapiens
gattatacttacacaaacctagatgtataccagatgctacacctaggctatatggtataaactattgcccctaggctgcaaacctgtacagcaggtgactactgggtactgtagatgattggaacacattggtaagtatttgtgtatctaaacatatctaaacagaaaagttacagtaaaaatacagtactataatcttatgggatgaccattgtataaagcagtttgtcattgactagaacatcattatgcagtacatgactgtatttagacaagaaaaatgggaatcttggatgccagagtaatactcttaatgattcataaagcaggaaaggacctgtagggaccctcacattcactgtttgttttatagatgaaataactgaggcccagattgatgtgaatgcctaaagtcatatgcttagtgacagtatgataagcctaaggctgaagagaagtaatattttgattagctatgttatttctatttaaagtttgtgatcaatttaaagcatattctggcatgttcaataatacttgaggaacaagtaacttgctttctgtttcacgctaagctagttgttatttatgtggcatattgaaacatattttccttctattatgtacatctgttatgaatatagaagtggcagggggtaggtactgcttttactggtctcttctggttctggttgcataggaagtaaactagcatccctctctgtcccctggcaaataatcagaattcagcgattctttttctacccactgatattcctggataggccattgtgtgtattaatctctttaatatggatttctgttttcacttatgttctagaatggtgctatccaattactgtagccaccagccatatgtggcattttaaaaaattgtggcaaagtatgcataacctaaaatttaccttagaaaccatttttaagtgtacagttcagttgtatgaagtacatttatattgttatgcgaccatcatcaccatccatctctagaacttttttcgtcttgcaaaactgaaactctatatccacta

SEQ ID NO: 7363 - DNA, 1035 bp, Homo sapiens
tgtttttttctaactaatttatttgcctgttatttcatttataagcactataatggactaacaatcttttttttataggaaaatattctttaaaaaaatcacattacttgtgtatgtagttcttacgagcgtgtttaattccaaaggtaaaattttctaatacctgacttaaaacaatggcatttatttgtaaataaaaataaaagtaaagataatatagtctataatgtatatctctgtctctgattattatgaaatttctaacaaagaccatctatttgtgaagcatctgcattaaaacacgcaagccagttttattaagaaggtatttaaggccaggtgcagtggctcacatctgtaaaccccccactttgggaggcaggaggattgcttgagtccagaaactcaagaccagattgggtaacatagagagaccctctctctacaaagaattagttgggtgtggtggcacacacctgtagtcctagctacttaggaggctgagtgggaggatcgattgaacacaggaattagaggctgcagtgcagctatgattgcaccactgtcctccagcctgggtgacagagaaagactgtcttaaaaaaaataaaataaaataaaaaaggtatttaagacttctaggaagagactagctgattaattcaaattaggtactctccaataaagcatttgaatttgtatgatgagttcagagtctttaaaaacttaaaaaaaaaaaaaaaaagcctggcaaataagtgaatagaaactgttgctaatttgttcaccaggccttttccctgagaaatataaactgttgtcactttatgtccttattcatcacttcaaattgtttgttttcctgaacatttaccactaatatggaatttcaaaactgttgggttgaaagatcaatagaagagtatttgaaatgtattttgtgaaatcaaatgttggtacgtgatggacggacatatgcttattttaatagtttttaaaataatcaagtatttactaagtgccaggcacaagcct

SEQ ID NO: 7364 - DNA, 1063 bp, Homo sapiens
tgcctgctctttgtactaagccattatatttacctacaaagtaggaaatattgaaagtctttatgtattctttcttctgtattttttagccagagagacagaaaaaaatttctcaggttgtgtaaaaatgtcatagattttatttctttatcctaatttagaatgcaccactttgatacttgaacagatttttaagtgataaacgtactagtttcagcaggttttatggcatttgtgtgatggtgtttgggatcctaaattattagatttttgtgagaatttattatgagaaacaactttatgtttttttattcaactgatattattgtaaaccaaaaaggtattccatagccgtgtagtcctttaaccttgcatcattgttacataatatatggcagctactcttggtggttttgttaactttgaattaaaggtattcatgtattttgctgaaagcacaaactgaccatactcttttttctccctgcttttctctaaagctgaaaactcgtcaaggaacagaactgctaattcagtctgacaatgacactgttattaatgattggtttaaagttcttagtagtacaatcaataatcaggtatgtcgttgacttaggtaaaatttttacttcagagctgtttttcttttttttttttaattgcttattggatatccggattgcaatctatatgtgaaaaggcactttatatatgtttgacagagatggaaaaaacaatggtcaatttagcagccccccagggctggtgaatgatttaacattctcacttatgtgatgtttgctaccagtggatttgaaataatgttcacatcaggcattggctgaaaagaaatagttcaaaaagaaggggtaaatggtgcttactacatagtatttattcaataactgaatgagttggaaataatactatttggtggaagaagtctgaggcgagcttatgaaatgaaagaagctgtagtctcttcattagcactttttcttttctagtgacagttctctagtttttccgcctctcccctccaagctgttcagtacccttgtgt

SEQ ID NO: 7365 - DNA, 1191 bp, Homo sapiens
cctcaaaacttagtggtttaacaaaagaaccattttgtttgctcagcctggcctgggctgagctgggtgatttttcttctaatctcacttaggactattcatgaggcttcagtcgtctagtggcttgattggaactggatggtctcaagtgacctcatggctagtattggtgccagctgttggctaggcctccttgtccgcaagatctttcattctcaagggagctaccccaggctgcatcaagtgacggcctcaggattccaagagggtgagggtggaacctgcagggcttctcagggcctagatttggaagtcacacattactttcagagtattcattggttaagactgttcaggagactagccaagtattcagagttgtgggaagagaggcagcctattgacagaagagcagcattatctgtcccattccagaagggtgtggttacagagatccaagactgattttgtggacagccttccagatcccaacctctttttgtagtctcatgtctcagggctttcctgttgtgttgtgtagacagattggtttaattgctgttttccaagtggagcccaggttttctggtttgtctgatttttactctttattgttctgcctcgagcaccaacccatgccaatctctccgtgccaaatgctccctttcttccaagactcatgacaagcatcaccataacaatgaggctacttctttatttataataataaatatttatttaaaaataatatttagtgtacttgggttatcatttgtcaattatttctctcattagataattacaatttttttgtttttcccttaagtaaagagactatgtttttcctttaaataagaacctataacagagcagagtatcttatgtgcagtaaacattcaatattggtaaactggcttgaccaacactagaaaagtgcatgaaagaagtcactgtttcctgaattagccttgtagtttcaaaaggtaaatcaagaataaaaatggtttcatggtcaaataaatttgggaagcagtgtatattttattcctatcttagaaaatcacagtgcaccctagaatatcaaaagcctgtgacatcttgaaggagagaatctagttatattttcttcaatccagtattttccaagttaatattatatacctttttcaaaaatttattttttgagggtac

SEQ ID NO: 7366 - DNA, 1026 bp, Homo sapiens
tatacatgcatttgtaaatttgcaaatatagcattaccaatttttcttttctaggagtagttccagtttatatcccacttgcatatgaggcctttttagtctatagcctcaccaacatagttttgaaaaaattttttcccactctggtgggtaaaaaaaatttcagtttggctttatatatatatatatatatatatataatatgatggaagttgagtcattttgttttctgtgaattgtgtattcatatattctagatatttttcaattttaaagtagaaattgttactttataatagagaaaaagaagaatttgagaaaatctatttgatttattgttaatataaaattgttcttaattatttttgaatacacatatatgtgagtatcacatgaaggttttttttctttttcaaaaatgaagtttggcagtaatcagtccaaaccagagttcacagtggacctcaagggggcaacaattgagatggcttcaaaggataaatccagcaaaaagaatgtatttgaggtaatacatttttttctaagtataacacattctaaactgtagtaattggatgttctgttttttgagctattttgggaaatagtctttcattgtgactagttaaggcaaagttggtgattaagttagatggtattgtaatttaagaaaaaactggtgtaaaaactggctttatttgcataagttgtttgaactcagactgtatattacaagcctttgtttcacaaatcctatcttttgccagcaataataaaaaggatgtggttccctttacttaccaaatctaatattaaaaagtaaattaaggggaatgttgataatggggaggctgtgtgtgggggtgggcagggggtgtatgggatatctctatatcttcttctcaattttgctggaaccaaaaactggtctaaaaaataaaggccttttttttttttaaacctttccattttatcttttaaaaccctccccagtaatatatgatctgtattagttacttattgctg

SEQ ID NO: 7367 - DNA, 1024 bp, Homo sapiens
actcagttacattaaaagccgttggtctttgttgcacctgagtgaatctttgcccatgcttaattttataatatcttgtaggtcatttgtaaaatactagttcactaactttgctcatttctcaaatgtttacacattttatttataatatcaaagaatcatacatcagtactgtcagaaaagtattgggacgttgtcaaatccattgtagcagatgccaggtgttccaaagttctactttctgtttgaaagcttcaattttttttatggtggtaaaaaaatacataagtttgctatcttaaccatttttaagtgtacatctcagtggtgttaagtatattcacattgttgtgcaacagatctctaaaaccttttcatctcataacgctgaaactctatacctactaattccctcttcctccatcccccagcccttggtaacctttctgctgtttctgtgattttgactaccttagatattttgtattggtggaatgatatgttatatgtataacttttgtgactggtttattttgcttggcataatgtccttgaggttcattcatgttgaaagttttgttgttgttgttgttgttgttgtttttgagacagagtcttgctctctcgcccaggctggagtgcagtggtgcgatcttgggtcactgcaacctccgcctcccagattcaagcaattctcctgcctcagcctcccaagtagctgggattacaggcatgtgccactacgcgtggctaatttttgtatttttagtagagacggggtttcaccattttgaccaggctggtcttgaactcctgacctcaggtgatccgcccgtcttggcctcccaaagtgctaggattgcaggcgtgagctaccatgcccagcctcatgttgaaagttttaattttttgttgtctataaataatattatttgttttctttgaaaacttcatttatttttaagataatgtttgtgtgccacatatccaggtctgaataactatagtatgtacatcagttgtt

SEQ ID NO: 7368 - DNA, 1062 bp, Homo sapiens
acatgctgaattttttatgctacattaaggcaagttctgtacatgataccagttaactttttagtaatttattaaatacagacacagtatttggtctccctatttttacattttgacaaagtgagttagtatattgaataattttcagattatatagttgtaaaataacagcaaagtaaatcattccttttttgtagaatttatccttatagcattgtattcctttctttgaatagaaagacataaattatttttcagtgctgctttgttcatatggaaatctaatttgatagcaaagtatctaatagctgctgtgacttaaggagaaaaagaagtgtttaattataaaattaagaaaaaactacaaaagtattaggaaagttatattcttaatgtattctagaactacgcatgttacacattgactaatcttttcttttaagctaatttttagagaacgagaccatgttggttcagtcatgtgtaagaacttggacctcattgtctatgtgattgtataaacagtattactctgttccataggatcaagagaaatatggattattaaatgtaacaaaaattgctgaaaatgggaaaaaggttcggtaagtacacaagtctttaatgttcttacatgattcatctgaaataaattaaaaattctcaatataattattttagtataaacaataggtgctgaagaatctctcaccatttgttttctatgtaatcatatatgtaagattgtcatgagatttatgaaaattttcctttgtcttgacatatttcctaagtaatattaagttaagaggtaatgaggcagagggttctgaggatgcatttgctttaatattttttttttcagtaagcagtaaatgcacatggtaaaaaacaaaggtagactaagtattgagtgaaaagtcaatcccccagccggcattacttcccctccccagaggcaatcagtgttaagtctcctgaattctagtgctttcctccagagataggatatatatgtatatgtttgtatgtatagagattaattttctaaacataatcttt

SEQ ID NO: 7369 - DNA, 1025 bp, Homo sapiens
gtcatttggagccaagatgtttagattccactttcatttctattgtttatgaactgttttttgtgttttttgctttgttttgttttagtataatgcttcatcccagcagcaaagagaaataattaaaagtaggagcctggacaggcggctgcaagaaccaatagtattaacaaagtggagacatagcaccattgtattggacactaatgataaggtaggactgttgagatttttggcaagttctttgcattatattgtacagtgaattgtaactattcgtactaatattttatgtatttagtaaatattctttgctaaaacatttgatttcttttgaactaatttaagcttttgatctgcatgtatgttgaaatgttactacattattgtttcttttaccaaattgcatactttagtgactacatttttatgtatttagcatcagtttgtcatgaagtaggttttggttttgagggttttggtttttgcacaatagactgacttatctgtagcttactgatgtgtgtaccttgatacatttgatcccagtaggtgacagatttttcttgcttaccttattttaaagtcacattctgttatcctttgtcttcagtctctaggaggtttcatagggaagacatttaattaattttcctcatcccaggtaatattggaattctattccctttgtttctctaaatgctctctgcagaaagcacttcttttatcagtctgaggagtaatgtcctctgtttcaaaaacgggtaaattttaatgcaaacattagaatggatgttttaaacacttctttagaggttacttattcacagtgtagcttcattttggggataagttgggaacttagtatgaatttgcagaatattaggtatattgattttgaaatgtaaaggttttttaaatcatcaggcttcttgtagcatgactaacagtttttctgtaatttttaggtgtgttcatgaaaacagaattaactatccctatggcatatttcattatgtttggat

SEQ ID NO: 7370 - DNA, 1046 bp, Homo sapiens
gtaatttggatttcatgaagactcttgtggctagaaagtccccttattttccccaattattggggtaaatttctatgatgttcctagtgtggaataaaggagcaaaatttgttaatggttcacccataatttgtgggtataattctttggcgtttccagctctgtattgtgggatagccttttagacttcctgcttttggtaatcctgagttcagttctctaacactcctgcgtggtcttgaaaactaacattttagtttggggtctggcaaatgccttcaagaagaaagctgctcttttttcttctgcttgactgtcttgattcttgtttccacttagcttttgacctctgaggatttcttaattaaccttttgttcatagattattttaaaaaaaattttatgtaacattttcaactgtttctgttaagatgatcaattgggatacctacctgccattcttctataaatggagcatctaccatagccccctcatatttgtactaggatacatttgctgcagaatacatcccaaagttactgaattggttacacctttgaatggagttattaggtatagaatagttaacatctatagaatgcttgccaaaaataatcttaactttaacttttacttaactgccattaaacaactattttccagtggaagatatccagatcttaaagcctggttctgtagtataatataaaacacatgaagatattggaggttacttttcatggtagaacatcatatttactgtgcaaaatttggaaaattatgatgagaattttgttagctagaaagtcatatctttgaaaaagtgattctgtgattttgtttcttaaattaattttactaattcagttgccctttttctgtttctaaaagttttactgcactcttctcgtctatgagcttgcattttaagttgcctcaattaaataaaaataaactcctgatttttgaattaggctttcaatgtttaaaaaatgtttctgttgtaaaacatatataattcactttatgcagtgtttctgtaaag

SEQ ID NO: 7371 - DNA, 1034 bp, Homo sapiens
actgcagtgagccgagattgcaccactgcactccagtctgggcaacagagtgagactctatctcaaaaaaaaaaaaaggaaaattttatttgaattgtacattagaaagatttgaaaataagctatccagtgtatcaataataaagtaaaatttaacaattttagagaattaggaaaaagactaaattatagactaaaagaatttgaagtatacataggaacttttaacatgtttcttagctattttagtaaatagatgggagtgactatgtatacagggtctcaattactggtctctatacaaattatatgaagattaatatttccaaagtggctggagcacatcttccagcgacttcttgagaaaagttgtgtatgggaggtaaaatggaaactatgtgtgtatgaaaatatctgtcttctcctctcatatttaattgatagtattcctgggtatagaattctaggatggaaattattttctctcacaattgtgaggcattttgaactttaatggatatctgggtcagcccctctttggggaatccccagtgttagacccattaggtctttccttttggactaattagaatgtccacagatgtctttaggtctcttgcctatacacggtaagggctgtctgtgtcttggtgttggcattcattttgcatgtggtccctcagtctcccttctttctcttggtacccatgttcctattgtgtctattgtcccccaactcagaatcttagtatttttcccttctcagagggaataactctccatatgtctgctggggtagggatgggctgcacacctagcagccaggtatgtagaaggagattctggcatttttaatccttattttagtaccactgctttcactccccagtttcacagatacctgataccgtcagttgctgagccagttgcagattctgttccgtaagcttgtcgggtttattttcccctactctcctttgtctgcaccatactggtttagattctactttcttccgtgtaggtaattcaggttt

SEQ ID NO: 7372 - DNA, 1025 bp, Homo sapiens
gctaatttttgtatttttttgttaagatggggtttcatcatgttgcccaggctggtcttgaactcctgagctcaagcaatctgcctgcctaggcctccccaactgctgggattacaggtatgagccactgcacttggccttattcttgtctttttaaatagatattaaaccttacatgtaaattaacactgttgaaatacactgttaatgataaagtgacactttgacctatgttctatttttgcatagctgaaatagttgaagatttcattttctgttctttctgatgttatagaaggggactcttaatgttaaagggatggcaatttgtaatgatttgaaggaattactttggaagaatgaagaacaatacatattcatctgatttttgtgtacatggttttaacaaaatctagcttaaaaattgggagggtattttcacagggcttggcaaacattttctgtaaagagcccagtaacaaacattttaggttttgtgagccatgtggtctctgttgcaagtgttcaactctgccattgtagcatgagaacctaagtgcatagccaatatggaaacagaggagcatggctttgtttcaacaaaactttatttacaaaagaaggcagcaggctggatttggaccatagtttgcttatccctatactataaaggaatatagggaactgctgcattttttaaattttttacactttttgcctcattttaataaatgtaaaatacaataagacattcaaatacaaaattgcacaagcactgctatacagataatacctgaggcttctgaaacagaagtgtctattatgtgatttctcaaaaagctgatcagttagtgtaaggaagttctgattttatttattgaagtaggtttaggagttttagtgtgaaattatggaagtccaagatgtttgaaagttgaaaatctgtgtaaacggtcatggcctgtccctattatgattgtattatgattacaacctcattcaggatatcaacaaaagttaaaatt

SEQ ID NO: 7373 - DNA, 1067 bp, Homo sapiens
cgttgagcatcttttcatatgttcatttgctatttatatattttccttggagacatatttattcaaattcttggcacatttttaagttgcgttgccttattattgagttgtaagaattcgttatatagtttaggtagaggtcacttaccaaatgtatgatttgcaaatattttctcccctctcccattctgtagttgttgagacaaggttttgctctcttgcccaggatggagtgcagtggtgcgatcatggctcactgcagccttgacctcctgggttcaagcgattttcccacctcagcctcccaagtagctgggacagcaggctcaaaaacaagcctggctagtttttgtattttttgtagagatgggattttaccttgttgcccacgctggcctcaaactcctgggcgcaagcgatctgcctgccttgacctcccaaagtgctgggattacaggagtgagccattgaacccagcctaatagtagatattttcagtttcccgtctaatagttccatctgtgccacagctgagtttgattctgttgcttgctttgtttcttcatactgtttttttcttgccttttggcatgccttgcaatttttggttgaaagccagacaccatatatcaggtgataggaactgaagtggggtattgggttatctgagtagaaactggattgcttttaatgttcgctgtagttgtaggtaccagaggctttaaattcttcagacatcagtgtttgtctctaagagattttccttagtatctacttagatactaagtatctaagattttccttagatactacttaaggtaggcgcccccaccccacacccaactcccaccctgtgcccctcagttcactgttgatgtactggaggcctgttggagtggtggtaaagtatggggaaggggatagtgttctgttaggattaaatcttagccttttagtgtgtgtgcgtcatgagctgtgaattttacaagtgtctcttagtttaccctttcccttaggcaagaccagggatgtggagtctgggaagtgccctttcctcaggtcagata

SEQ ID NO: 7374 - DNA, 1031 bp, Homo sapiens
cagtttatccgttttcccttttatagatcatgcctttatatcaagtataagaactctagctatattaggcttttccagagaaatagaactgataaggttgtgtatgtgtgtgtgtatacagtcatgcaccgcataatgacatttcagtcaatgatggactgcatgaatgatgacggtaccagaagataataatactgtattcttactgttcatttctatgtttagatgcacaaatacttaccattttgttccagttgcctacagtattcagtacaataatatgttgtacaattttgtaacctaggagcaataggctataccatctaacttaggtgtgtagtaggctataccatctcgttttgtgtaagaacgctctgtgaaagtcaaagatgaaattgactgttacatttctcagaaaatatccccgttgttaagtgatgcatgaagtccagaatttgcagggtggactggcaggctagagactcagggaagagctgatgttgcacttcaaattgataggctgtctggtggcagaatatctttttgcttgaggtaggtcagtctgttgttctattcaggccttcatttgattggatgaggcccactcacattctggagggcaatctgctttactctcagtccacatttaaaagtgttaatttcatccaaaaaaaagcactgtcacagaaactttcagaataatggaaatatctgagtactgtggcccagcccatttgacacatacagttaaccatcacagaagccttagatcctgaatgctttatttttttttaagtttatagtttcacattttatgtttgaatttgtgatccattttgagtaatttttttttttttttgagatggggtctttgtctgtcacctaggctggagtgcagtggcacgattgtagctcattagaaccttgaaccactcagcttaagtgatcttctcagcctcgtgagtagttgtgactacaggcatgtgccaccatgcccagctagtttataatttttttgtagagatagagtt

SEQ ID NO: 7375 - DNA, 1028 bp, Homo sapiens
tgctggcagaattaactttttgcaaaagttttatacacagatatttgtattaaatttggagccatagtcagaagactcagatcataattggcttatttttctatttccgtaactattgtaatttccacttttgtaataattttgatttaaaatataaatttatttatttatttttttaatagtcaaaaatctttgctgttgtagtctgcaacctctaaaatgattgtgttgcttttaggattgatcagaagaaacactccaaaaattgagatgaaatgttggtgcagccagttataagtaatatagttaacaagcaaaaaaagtgctgccaccttttatgatgattttctaaatggagaaacatttggctgcatccacatagacctttatgttttgttttcagttgaaaacttgcctcctttggcaacattcgtaaatgaagcagaatttttttttctcttttttccaaatatgttagttttgttcttgtaagatgtatcatgggtattggtgctgtgtaatgaacaacgaattttaattagcatgtggttcagaatatacaatgttaggtttttaaaaagtatcttgatggttcttttctatttataatttcagactttcataaagtgtaccaagaatttcataaatttgttttcagtgaactgctttttgctatggtaggtcattaaacacagcacttactcttaaaaatgaaaatttctgatcatctaggatattgacacatttcaatttgcagtgtctttttgactggatatattaacgttcctctgaatggcattgatagatggttcagaagagaaactcaatgaaataaagagaatatttattcatggcgattaattaaattatttgcctaacttaagaaaactactgtgcgtaactctcagtttgtgcttaactccatttgacatgaggtgacagaagagagtctgagtctacctgtggaatatgttggtttattttcagtgcttgaagatacattcacaaatacttggtttgggaagaca

SEQ ID NO: 7376 - DNA, 1047 bp, Homo sapiens
tactactagaattatttatttcactgttacttttcctactgtatacacctcttgtttatccctattcctctcccccttttttttttaaagcttctatgtatataactagtagttgctggttagtgttccttggtttaagaaggtcactgaccactgtctgctggttaaaagattagccgtctttttcttttttaaacaaatacaattcataaatcagcttacccatagctttatttgggagaataaaaacaaagggagggctgacctccctttaaacattactgcttctaaacagttctacttaggtagtatataaaaggaaaccaaatcatttaatattgccatccttctaattttggggaaagtagccacagatgttggctaaaatgtttataataaactgttggcatattttattttgttttattcttcatgattatctcaaacaccaattttgtaaaactaaacatatttactctatgctttctcccatttttaggtgttaaaaagtaatcgaagtacgaagaggacatggtatcaagcagtcattcaatgactataacctctactcccttgggattgtagaattataacttttaaaaaaaatgtataaattatacctggcctgtacagctgtttcctacctactcttcttgtaaactctgctgcttcccaacacaactagagtgcaattttggcatcttaggagggaaaaaggacagtttacaactgtggccctatttattacacagtttgtctatcgtgtcttaaatttagtctttactgtgccaagctaactgtaccttataggactgtactttttgtattttttgtgtatgtttattttttaatctcagtttaaattacctagctgctactgcttcttgtttttcttttcctattaaaacgtcttcctttttttttcttaagagaaaatggaacatttaggttaaatgtctttaaattttaccacttaacaacactacatgcccataaaatatatccagtcagtactgtattttaaaatcccttgaaatgatgatatca

SEQ ID NO: 7377 - DNA, 1008 bp, Homo sapiens
attgctatatatggaatgtataacaatagactgttgtttagaaggcatatgaaaattttttgaaattgcaaagctgcagtggctcacacccataatctcagcactttgggaggccagggcaggagaatcagttgagcccagtgtttgagaatcagcctaggcaatatagtgagaccccgtctctacaaaaatttttttagacagggctgattgtacatgcctgtagtcccagctatttgggagacgaggtgaggaggatcacttgagcccaggaggttgaggttgcagtgagcagtgtttgggacagaaactctgtgtcaaaaaaaaaaaaattttttttttgaaagacagcacaggtaaattgtttaaaataggcatcttgtatttatttaaatttaagaatttatcctttcagacacaaaatattttattcaactctcatgctaagtacaatatacagaataaaatttgaaaatatatgtttgttcttctactgttagggttatgcaagatagacgagaacaagcaagacaagacttgaagggtttggaagagacagtggtaagaaaaacatgaaaataaacaggattgggaaatattttgtgggttttttctaccatgattattctaaatttaaagtctgagctccaaaaatatcgctgttcttaatccaaggcaaaagaacttcagactttacacaacctgcgcaaactctttgttcaggacctggctacaagagttaaaaaggtaatgtaactatgccgaggtaggcgtttgcataaatggtgcttacttctaggtaattatttgtattcaaagtgaaataactttacagtcacgtcaatttttgtatagttaagcttagttttttttaatttttttgtaatacttaccttcttttctcagagtgctgagattgattctgatgacaccggaggcagcgctgctcagaagcaaaaaatctcctttcttgaaaataatcttgaacagctcactaaagtgcacaaa

SEQ ID NO: 7378 - DNA, 1026 bp, Homo sapiens
ttaagttgtcatcttagtttatctagaagcaatttccctgcctccataaccatgtgcacatacatagagtttatggaagtcagagtttgcaacaatttgagtaggaaccaagaagagaataacataacaaaataatgatgaggtttggggcgtaggtcttactatgaatacctgatggaagtaggcataaggattcaggaagatgaaagacagaggagaacagaatcatgatttcaaaccaaaatacgaaaaattttgtatgtccacaagtagccaggtccctttcctcttttcctccatagggtataggataacagaaaagtccttgatgagattatagaatttaaaagtttggaaattttaatgatgacattgagaaaactgtgatattgatactgtgttaattatttttttctttcgtcagccaaaaccagaaaatgatgttagagcaggaacgtctaagagtagaacatgagaagttgaaagccacagatcaggaaaagagcagaaaactacatgaacttacgtgagtaattgtttttaattaaagtttaaaaataaaagctaaattagaggattataggcattacctttggatatagccagtggatacatattttactttgtatgggctaaaggattttttcttaaatccactgagttggtttgatttatatctaaatacttggaatatatacttgcatttgagtgaaagcaaggtcttatatttcattgtggttaagattaaggtttctctttattaatctgcttgctgtttctttatctccatattacttcaggatccagcataaaaatgaacctaaaacaatatattaagtaacttcgaagattttaagatctaacacaaaaactgagtttttgttaaattttctcttgcataaaagagcattgtggtgtttagccttgccattttgaacagaggttttcatggtttaccttttctcattttctcaaaactcagttttctagaatcttagcaggtagaaagtgcatgattataatttt

SEQ ID NO: 7379 - DNA, 1027 bp, Homo sapiens
atctggggatttcccacagttacgaagcggggtgtgtgtgtgtgtgtgtcttaacataggggacttaggagttatctcatttctttaccattcccttaactaatctgttctggattaggccaaaaaaaaaaaaaccaaacaaaccataaaggaatacataataccaacacaatggatgtaacttgtatactagtctacatgtcattgaacttggagagcaggtgacatttgggtaatttgaagttgaatattgctaaggaaaatgcttattgtaaaatccatttgctccttggtttatatgaggaaccttaaaggcttatttcactcttctattttctctctattcaaacagagaaagtccatgaaatggaaaaggagcacttaaataaggttcagactgcaaatgaagttaaggcaagtttgatgtcacatttctaacagctttaattaatcagtattaattttgattagtctgactttaacatccttttcccccccaaaattttagcaagctgttgaacagcagatccagagccatagagaaactcatcaaaaacagatcagtagtttgagagatgaagtagaagcaaaagcaaaacttattactgatcttcaagagtaagtattatacttctctagttaggaggaaagaatcggttactgatggtcatggtatatattcttattagaaacctgcagttttcatcaaaattacatttttatcttggaaaataaagaattttctcatttatgagtaaaacttctaaattccaggtgaaatttttgaggcttttttttaggtcttttgatctaaattattcagtaaaagaaaaaaatccccaacctaagtctattattgcataccacagtcttctccaaatcctttatttagtttccttttttaaaaaaattcttggctgggtgcagtggctgatggcctgtgaccccagtgctttgggaggctggggtgggaggatcactagaagtcaggagttcaagaccagctgggcaacatagtgagactcca

SEQ ID NO: 7380 - DNA, 1034 bp, Homo sapiens
ccacaattccttctggttgagcttaaagttcatcctttccctgccacctaaacatcctcttgttaaattttaagctgaacgtgcacatgattaacaatgaatttactgaagaggtcctgtaaagaggaagtgaaaaaattgaaagaggcagaatttattagtttggttgtatttttgtgttttctttaggtttacatttatttatttttcttgttggcatgtattaacattattctcagtttttaaaaaaaggaaggcaaaaagtaagctgtatttatttacctttcgttgaaaacagtaataaaagaaaaaaataagatccagactttgtatgaatattgagtaatactaaaatatattttataaaaagattttatagcctaattgggaaaacacacattgaacatttttggctttaattttttattttactttttccttacagcagcctgagggaactggcatgatagatgaagagttcactgttgcaagactctacattagcaaaatgaagtcagaagtaaaaaccatggtgaaacgttgcaagcagttagaaagcacacaaactgagagcaacaaaaaaatggaagaaaatgaaaaggagttagcagcatgtcagcttcgtatctctcaagtatgttatagaacaaagtttattcatttttttgaaacagccacatagaaattttatttattatacaagttttcagaaaaatgtgtgtctataggtgaaatttagttgtttttttcctagtctagctgcagtaaatttgaatgatttaactgagttatatttgcctaacataaatatgggttatgtatagaaatttaccagaatgatgtgactggtggtaacttgttaaagacttcagaattccagggtgggcaaaactgcagggaaccagtttcctggcttggcaactgaatgaatggggccattcaccactatcagaatttcacaaggagggaagatggtaacgttagatggtggtatctgtaaaattagtatttcatatttgagtcttcagtgcctt

SEQ ID NO: 7381 - DNA, 1047 bp, Homo sapiens
gaagcttttcatgttcttttttcttttttactggttattgatgacatatgaacattttagaaaatgtaaagaaaattataaacttgtaattttgtttcattcttttgaaatcttatgtataggttagtaaaactggagctgaaggtgctgtgctggatgaagctaaaaacatcaacaagtcactttctgctcttggaaatgttatttctgctttggctgagggtagtgtgagtatacatgtcttctatctccctgttaccttatggggcattatttaaatataggtgtatatgtgtgcctgggtgtgtatgagagagagagagagaaagagagattgagattcaatgtgtttgaatcagtatgtgtaagttagttgtcttttgggagtttattttataataacattttattatactggtcttgttttctttctttgtttttgtatgcagacatatgttccatatcgagatagtaaaatgacaagaatccttcaagattcattaggtggcaactgtagaaccactattgtaatttgctgctctccatcatcatacaatgagtctgaaacaaaatctacactcttatttggccaaaggtttgttgttaagaaagtacaaaacctaaatttagatagaccttttgtttataaaatgtaggaaaatgtgagctgttattccaacctgtacatactgttttgtgctagacacactcagtttgaattgatgacagataatacaaggtgggtctgatttttagactgcttggtttaagttttagtacacattaaagtcagatgtaattttagtcaaatttgtgtgacaagctgtaatttggtattaaagaaaataagcatttgaatcaaataatgaggtcaaagcctggcaaacataatcctctgttaagcctgtagacatgcatgacaggttaatataatctgtatgagatgattaggaaaatcagtaatgatgattccgtctttgactttcaacagtaatttcttaattcagccttgcaaacaaattggaaaaatataggcctttgtctttt

SEQ ID NO: 7382 - DNA, 1974 bp, Homo sapiens
taatcagttcctgagtttaaatagtaagggatacctgtatttgagattatatttgagattgttttatcagttagcataaccataaaataaataacattttagacaagaattttttgtcaccctgttatatgggaaattttgaatgcttatgtgttgttgattttatgtagtataaataactttttcctgttctccttggctcctccttcctcaaaataactgtcactcttctctgataagaatgttgccataattatcagtgctgctgttaataatagatgtggacccactatagctttgcttctagaaaacagcctgtgattttctgccactgctaaagagcatctgtttttatcatttatttgagtgtactatattaagtaaatgactgcttcttttagtgtgattcatattactgattttcataaagtcatagagaacaaggacatcctagtatttgcatgaatttgcctcgaagtagaaggaacaatgtagaattatatggaaagaaactaaaacctttttaattatgttcattttacaatgaacattttacaagcatggataatctaaatctagtgattaaatgaagggttaagatctgttggtaacccatgtggttgatgtacagtactgtgtatgtgtaatagttgaattggattttttaggtatttacagagccgtttccacaaaaatatagttcctgtcctttcttgactataagttgtagattgaaactctttgtttttacttcatattttataatttatttaagaagtctagttttgttttttgtttagggtaaacttcatgatccagaaggcatgggaattattccaagaatagtgcaagatatttttaattatatttactccatggatgaaaatttggaatttcatattaaggtaaattccttgaggaaagattatattttattttacagcaagaataatgttctaaaaaaatagtaaatgctggtttctttaattttaaaaattgtttttctggaaaggtacagttgaaagatcattcaggttagtaaacttggatttttgttcatctgccattagatgaacaggaatgttaactaacgtaaatgattaagtctttagcctccttcaaaaaataaaggaggttgctttactgcagaacttgaaggtttctactacataaaactattctaattcattttagatgaagataatgtaatttatgtccaatgggaagactgcttaaataactaagctaatttggctaatttatgtcttcccattagaatgtgagctatggctggtatgttgataactgtctctctagtctaaacaatgcctagcactcagacctcaatatgcgaataagttatataactttagttgatcggtgtttttttaaatttgccctttaggtttcatattttgaaatatatttggataagataagggacctgttagatggtaagttaaattcttgctaatcagttttaaataacatctgttaattcctttttaataatagatgtgagactatttctttgtaacctatatgaaattgtcttaagttattggaaatagacaaaattttttttcttctaaagttttagttgaatacctttaaatagaataactagtttaaagcgatgtttatgggtacttcttagtagtaattagagcattggactgggagttacataatctgagccctgagttctagtcttctgtcaactgtcaattagatacattgtccttaggcaaatcattgaaccattcagggttaatgttcttgtttataaaatgtgggtggtaggttggagtggtcctaaaattctatattgttgcattggtttctatttacatctcctgctgtgtctgtaaggtctgctttagagcaatgttttaatatgtttttagagttcaactattgctgttaggctgctcaggaaagcctatcagttatttcatatccagtgttaagagt

SEQ ID NO: 7383 - DNA, 1023 bp, Homo sapiens
aaatacacatatttaaggagaaagatggcgtaggggtaggtcgtgggtacctagggaggtgtgaggacaggaaagcaattaaatacatggtaggttgtacttgggacaatcattgttaaacagattggatgagaagccatggttagaaattgttggtaggcaaagatcagcagaatgatgggccagctgggatttcttttgagatagggatttgatgagcaagttgccagtaatgacctgaaagcagatagtactctctgggtccccgacaagttcactgagaatgcactggctcataattatctggacaagtttataacttgattttatgtagggctattaacattccctatctgtagatttgttagatacaattgttacttttgaataaggtttatccacttgtattctcttgaattctgaatctgagtgatttgtttcccttgtgttaagtagctatttattcattgcccactatatgataagcatctcatcaggtctttgtagatttcctgttttttccaccatggcttcctgacctgaactctctgccgctgtattcacctttggtttttccagatgtagcctaccttgtatttattttggttcctctgctccttgagtatatagtacagtggttaagagcaggtctctggaaccaagtctatttgcatttgcgtctcagcttcatcttactagctgtggagttacaggcaagttatttaacctctctgtgtctcagttttctcatctataaaatgggactaataatagtacagtgcgggctgggcgcagtggctcacgcctgtaatcctagcattttgggaggccgaagtgggcgaatctcctgaggtcaggagttgaagaccagcctggccaacatggtgaaaccctgtctctactaaaaataaaaaattagccgggcatggtagcacatgcctgtaatcccagctacttgggaggctgaggcacgagaattgcttgaacctgggaggcggaggttgcagtgagccgaggttgcag

SEQ ID NO: 7384 - DNA, 1045 bp, Homo sapiens
aagatatcaactaaacagattttaacacacacagaaaataagaaaaccaatttccaacattttttgcccttatagcccaagaacttagttcaactcaagtataagaacctgtgtagatactaataacttattaggttttcttgaatattatttcacaattttctgatccattcaaaacatggcagaatttgtacctaacctaattttctagttgtaccaggcagaaagtatatcctggaggataaagaaagattcttcatgagttatataagtgaaaagtataaaacttgaagtgatattctaactaaattatcaaactgaagttaaacaacaaattaggtgacagtattttgaaaacattaaactttagattgaggaaatgtgcatgatttatagattccctggtagccagggatgcatgataaatctttttttgttttaaaataattcttactcaaacatcacaggcttcttaaagacgcctttaaaatcagaggtattgtgattgtatgtgctttttttttttttaattggcaaaaaagagaaaaaggtttcctttttaaaaactgcacacacttttttgggggggtaataaatgaacatttttttgtttgttttttttagaactgagctctccatagacaaacataagtagcataacacagtgtctttcctcagacatcattctgtacagtaaatcaacataaacaactccgttcttattgactggattttttccaggtgggttaattgggtggggaaaattaattaaccttaacattagagcctcttttcttcctgttaaacttaaaggatgagttctttaaaaaaaagcaataaaccaaccaacaactgtaatctttcatatagagcaaatttttttaatgactacaattagaaaatatgtagaactattagtatatatacacagagccattagggatcatctgaatgccttgggaagatatggattaaatagaaaccaaatgtaattatcagatattctctcaagctcagtgcaaagctgaattccaaatctatggat

SEQ ID NO: 7385 - DNA, 1095 bp, Homo sapiens
aagaggaccttaatgatcacctaatttaatctcattctcattttatttatttatgtatttatttttaagatgaagtcttgctctgtggcccaggccagagtgcagtggtgcggtctcggctcactgcaacctctgcctcctggattcgagcgattctcgtgcctcagcctcccgagtagctgggattacaggcatgtgccaccacgcctggctaagtttttgtatttttggtagagacggggtttcaccatgttggtcagggtggtctcaaattcctgacctccggtgatcaacctgcctcggcatcacaaagtgctgggattacaggcgtatgccactgcgcccagcctgtctttctcattttagatgaagacagagtcccaaaagatttactttctcaggaatactcagctaattatgatagagctgaggactaagaatgtcaaggtcttttggcccctagaccatagttattattaccaccacttacagcttaagggttgctctgtgcatttctcctagactatttgccaaaagtgtccaggaaaaatttcataactagactctgtagaagacagcaatatctaacaaataggctaacatagtaatctaaaatgttgattgcatttttttttttttatgagacggagtctcactctgtcacccaggttagagtgcaatggtgtgatatcagctaactgcaacctccacctcccgggttcaagcgattctcctgcctcagccccctgagtagctgggactaccacacccagctaatttttgctttttcctttttttttttttagaaggagtcttgctctgtcatccaggctggagtgcagtgacgcgatctcggctcactgcaagcttcgcctcccgggttcacaccattctcctgcctcagcctcccaactagctgggactacaggcacgtgccaccacgcccggctaattttttttttgttttttttttttggtagagatggggtttcactgtgttagccaggatggtctcaatctcctgacctaatgatctgcccacctcggcctcccagagtgctgggattacaggcgtgagccaccgcgcccagccaa

SEQ ID NO: 7386 - DNA, 1390 bp, Homo sapiens
gatcgcaccattgcactccagtctgggtgacagagtaaaactccatctctctcaatcaatcagtcaatcaatcaataacataagaatatatcctctagagtagtggatctcaaatattttgtctataagaaatgttaatggtatactatgttttttgttgcttttcttctctcttctccctttccccccaaaaggaatgaagtttttgcttaaatatagaataaatgtgttcgcaacattttataaagcattcattttggtgctttgtaatggaagtgaaaatctttagttgaaaaacaatttgttaaaagaacttttattagaaattgaggttgtagcctataaaaaccaaacactaaaataatcaactttaaagcttttaaatattcagtatgagttggccttttggcagttgggggtaaaaagaaaaagctttaatatataatctttgaatagctattttaaataactgtttcttgtctgattttttaatagggtcttactggacagagctcattcagactatgacagtgtgtttcaccatctggatttggaaatgctttcctcaccacaacattctccagtcaatcagtttgccaatacctcagaaacaaatacctcggacaaatctttctctaaagacctcagtcagatactagtcaatatcaaatcatgtagatggcggcattttaggcctcggacaccatccctacatgacagtgacaatgatgaactctcctgtagaaaattatataggagtataaaccgaacaggaacagcacaacctgggacccagacatgcagtacctctacgcaaagtaaaagtagcagtggttcagcacactttggtatgttgactgttaatgatgtacgtttctatagaaatgtcaggtccaaccatttcccatttgttcgactatgtggtctgttacatttatggcttaaagtccttttctcttaaacagttaaaaaaaaaatcttggtctaagtatttatttgaatcctgttgctataggagtttgtatgtgtgtgtcttcatttaaacatacctgcatacaaagatggtttatttctatttaatatgtgacatttgtttcctggatatagtccgtgaaccacaagatttatcatatttttcaataatatgagaagaaaatgggccgtaaattgttaaccattttatgttcagatatttctctagtttttacctagtttgctttaacatagagaccagcaagtgaatatatatgcataaccttatatgttgacacaataattcagaataatttgttaaagataaactaatttttcagagaagaacatttaaagggttaatatttttgaaacgttttcagataatatctatttgattattgtggcttctatttga

SEQ ID NO: 7387 - DNA, 1051 bp, Homo sapiens
gcgcatgccaccaggcctggctaattttttgtatttttagtagagatggggtttcaccatgttagctaggacggtctcgatctcctgacctcgtgatccgcccgccttggcctcccaaagtgctgggattacaggcgtgagccaccacctccagccgcgaaatttttctaccatttcttaatgtcttttcatcttttttttttaatagactttcatgggaccaaagttgttaattttgatgagatccagtttctcaattttcctcgtaatggatcctgcttttggtgtcaagtctaagggctctttgcctttcctatgttctcttctaaaagttttgccattttacatttaagtctgtggtccattttaagttaatttttgaatagagcaagaggtttagatcaaagctcatttttttccctcttgatatccagttgttccagcatcatttgtttaaaaagctttccttcctctattgaattgcttttgcttcctggtcaaaaattaactggacattgttgtgtggatctgtttgtagattctcaattctattcaattgatttctgtgtttatcccaagacaatatcgctgtcttgagtattgcaactctatagtaatttttaacatcagggagaatgattcctcctgtattatctttctttttcaagatcgttttgatattttaaggtctttcctttacatataaactttagaataaacttgtctatgtctacagagaaacttgctgatatttttgtgggaattgccttaagtctataggtcaatttagagagaactgacatcttttctatgtgaatcttccaggtcatgaacacaatgtttgacacttgaagtattcaggtctttttttatctctttcattgacactttataattttcattatacagatcctgcacatgttttattagatttatacctggctctccgcttaatactcgaagccttttttaaaagggtagtcaatgtgtatatttttatatgcatttgcgtgtatgagtgggtgggcatgtaggtacgtaggtaggtagg

SEQ ID NO: 7388 - DNA, 1046 bp, Homo sapiens
taaggactaagcagtgggacagatttagtttgtgttattgattatataagcacttttagacagatttaaattagttcattgctgctgctgtagggcattttagaaaaaaacagacacatttgtatctgtattttactgctctcggggctgttttggaggcatagaaatcatcagcataaagattacaacaaaaaataacagtttgggagagccttttaaaatttaattttggggaaatgattcaattagattgcggcttttctaagcgtagaaagagactctaattttattcccttcccgcttacattgtcacacatcacactgggcatgtaggctcttaatatgtacagcataaacgacctaagcctaaacggatgctaggggtacaaataaggacatgagaggacagaatcagaatgaaacttcatgtctgggccacctgttattgtgctactcagtcacttgactttacatcctgttgattttataaggaaagtagtaaattggcaaatgtttcacactgaagagaaataacagaactggactattttatctgtaaaggtcttcctttttgtattctagaaattgattactgagctttaagcaagaggataggtagagagtaataaccttgtatcatttatttcttgtgaaatataatagatattaaattgctcttttccttgccagatactatctgtccttaaactattaccacaagtatttcagatacaaaagtaaaatgtgttcattttaattttttcttttctttttttgagacagagtcttgctctgtcacccaggctggagtgcagtggcacgatcttggctcactacaacctccacctcccaggctcaagcaagtctccttcctcagcctcccaagtagttgggattacagccatgtgccaccacacccggctaatttttttatttttagtagagacagggtttccctatgttggtcaggctgatctcgaactcctgacctcaagtgatccacctgcctcagcatcccaaagtgctgggattacaggtttaatttt

SEQ ID NO: 7389 - DNA, 1023 bp, Homo sapiens
ttattttgtttccatatatggtatagtaaatgtgtcaaagatagaagcaaagtgttagaaatccagaggaagaactaacaaattttaatagttttctatttttgtgtatattaagcaagataaaacagactttttactgcgaactgcgatacatgtaaggctaatgcgtgattaagaatggcatagggaagcatctgtacctggtcttggctttcttgtgacttcatcttcctcagctctgtccttcatatctaggatgcctggacattagcagcagttaagtcttaggagctaaaatcaagtagaagtactctaaggagaatcctgtaagcgaagctaagaaacctgctcttacttccttaggtggactggttgtagcattctaataatccttatacctaggatgctgttgatcatctcttcagccatttaaagtcctttttgcttctctcttagtattctgaatcttcccctgagtaccaaccagaacccagccatagatggggaaggcagaagaagacaagaagggagaattaagctacagtagaaagatcatagggttctggagtcagacctcagtccaaatcctacttccgccacttcggacaagtgacttaatcagtcttcagagtgaacatgaagtatctaataaagggtctgaacatagtgatacggtttttttttttacttaatattacttccctcttctctcagtcattttcactatgtaaatagtagagcattctttagtctctgccactgatctaccttaccacaactagtctgctgaacctcaaaaattaaatggatctaagcggggtgtggtggttgcacctgtagcaccagctacttaggaggcagaggcaggaggatcacttgtccaggattttggggctgtaaagtgccgtttgtgcttgttaatagccactgcactccagcctgggcaatatagcaagaccccatctctgaaaaaaaaacagatctatattaaagatctgcaaacttttcccgtaaagaatcaga

SEQ ID NO: 7390 - DNA, 1089 bp, Homo sapiens
ttgtctgacaaagtagtattctgaggtactgtctttggtatttctgagctcttaacagaagattttatagttactcccatggcttagtttttagatcatgtttttctggcagtgccctggatttgatcttggctcagaatgcatttctcaatgttagcattgtttgcagtctaaagagactgcaaattttctaaaccatcaagtccttgctcttcaagaggtcttgatttaatttatatcttctcattttttgctgtatatagcagaaacagcaaggcagcactttctagttgaaactctcctttgctaaatcactcagttcattacataaaatttccaggtttttgtgggggatttttgttgttgtttgtttgtttttgagacgaagtctcactctgtcgcccaggctgtggcacgatctcggctcactgcaacctccgcctcccaggttcaagcgattctcctgcctcaacctcctgagtagctgggactacaggcgcacgccaccatgcccggctaaatttgtatttttagtagagacggggtttcgccatgttagccaggatggtctagatctcctgaccttgtgatccacccaccttggcctcccaaaagtgctgggattacaggcgtgagccaccgcgcccagccaaaatttctggtttttatatgaccaaaggtcacagtgttactaagcctcctgccccttcctaggaaggatacctcctcttctagtttccaataacatctacctcacttttctattctccttgtagccttatgaaataccatgagactttttaaaaacagcttcttaactaaactatccttaagagccatggtctgtttccaaagccaatccaacattgcagtgttctgttatagcagtgaggactcccagtatcaacatgtattacttatctattactatgtaactaattaccctaaatgtagcagtttaaaacaacaaacatttgtaatcttacagtttatgaggatcaggaatccaggggcaacatctgttgggtggttctgacctgtgtctgcataaaagctgttcaggattgcagtcagctgcagccctgcttc

SEQ ID NO: 7391 - DNA, 1070 bp, Homo sapiens
tacaggcatgagccaccgcgcctgccctcccctaactctagaaacttctgaactgtatgtatttctacttaaatgtcccattcttttccctacaccttgactttgcatagattgctatttaccaaccaataatttttctagtcaatttcacaatgaaaatctccttaatcttcttaaagttaataacttttttcttatactattcccagattatgttcataactctattgtaaacttcatcagagtgccttattttcatgtctctcacccaccaaactataccttccttgagggcagaaattgtgccaccaaaaggcagatccaaatacagtctgcaatgaagtgtgaataaaatttaaaaacaaaaattacttttagatcaaaaaatgttttagatgctttctataaatatttttttaaaaatcacctgcagttggttctatagtgagatataaaactgaacaacattccaaaatcttaattttttcttaaaaaaaatttccctggtagttaacaagtattttttatttgtactcactgtaattttctctgattaagtgttatttggtcacacttctcacttggctttcaagcctgctttcaatttataagaacaggagaaaaaagaatgctatagcaagtatttaaatgtagcagttatagtataagagaatttttaaggaaaagggtgatacagtgatatgtttttttctgcttaaaacatcactgtcagtatatttttggatcttgaaagatctcttgtgtttatggcttggggcctgcttgctaggcttgacttcagtactgtttactaaattatagcactgcaataagacatttcaccaatatgatattgaagcataacaagttatttcataaggaatggtaattatctaacattctaagcaaatttggcagtgtgacttggtggggcgcagtgctgtccctgacacaatgacagccttactctctaaattagtaacttccgtaggagaccccagaagcacacctccctcccagcagtgaaagccgaggattcccgttttgattagcaggcgccttctgttcac

SEQ ID NO: 7392 - DNA, 1605 bp, Homo sapiens
ttgccgttcgtattttgtttcactttctgcctttgcatgtgaacttctatcttttttactgcactgtgtgtcctttatcactattgctgttctttttttaagtctggctttaaatatcgctattgtggcttttctttttgtatgttaacttcgcgtttagaaagaccgtaaaataagtaatgtgatatagaaacagcagccatgttgtagtgaaaagagaatgtgctttgcaatcagttagacctcaggtcaaatcccacctcttccacttagtaagtagaacagcattgagtcacttcacttctctcaactgtcacagggagtcagtactctgttttgtatggggtggttgtatttggcaaatgcactccagtatatgaaatcagcctgtcagctctaatcctcataacagtcctgtgcctagaatgatattatcctattatcttttgttctttttctgtttatttatttatttattttgagacagtctctctctgtcgcccagcctggagtgcagtggtgtgatatcagctcactgcaacctctgacttccagattccagcaattctcctgcctcagcctcccgagtacctgggattacaggtgcctgccaccatgctaggctaatttttttgtttttagtagagatggggtttcaccacattggctgggctggccttgaactcctgacctccagtgctctgcccacctcggtctcccaaagtgctgggattacaggcgtgagccactgtgccccaccagtattatccttaaataacaaatttgttatgagtaaattttagggttggatagtgaaaattgatcacgaaatccaaattgcaaaatagaaaaatataacctactatgatatttgtatggtatgcaactacaatatcattattggttctcaaaagatttgagatcaatttcttgaatataacttgaaatttcattaaaagccagaagaccatatatatgtatgtatattatatatatatgtgtgtgtgtctgtgtgtgtatgtgagaatgattctaattttcaaatgtaagtttgtaactgttcatatctgaattttcatgaaatgcttccagcatattctaataaaatcatgcaagcccctaaaactctgataacaaaggttaattgtgattagaactaaattctcctgactggtggttgagaactcttcttctctttcccaactgactgactgtaatagggcctggaagatttctgcttttctcactgcctaccttattgtgcagataaagatggtattgggaacacttacataaaaatcactgtgtctcaggcatgattctgaccacttaatctgtgtttaatcttcatagtgaaagttgtaggaatgttttacatatgagaaaactgagacacataagggttatgtaacttgaccgagttcccacggctggttagtcagagagctgagatttgaacccaggcagttgggctccagagtccatgttcttgtctatgacattgtacttggtagcagttatgtatcttcagaagtcccgttacctggttaggaagaggtagatcactctttatagagatttacagcccttttacaatttgttgtt

SEQ ID NO: 7393 - DNA, 1030 bp, Homo sapiens
ggtgtacaggaatgcctgtgatttttgcacattgatttttgtatcctgagactttgctgaagttgcttatcagcttaaggagattttgggctgagacgatggggttttctaaatatacaatcatgtcatctgcaaacagggacaatttgatttcctcttttcctaattaactgatgggcttccctttgtgggaatattgttatgtgttatttctttctcctgcctgattgccctggccagaacttccaacactgtgttgaataggagtggtgagagagggcatccctgtcttgtgccagttttcaaagggaatgcttccagtttttgcccattcagtatgatattggctgtgggttgatcataaatagctcttattattttgagacacatcccatcaatacctagtttattgagagtttttagcatgaagggctgttgaattttgtcgaacaccttttctgcatttattgagataatcatgtgttttttgtcttaggttctgtttatatgatggattacgtttattgattgcctgtgttgaaccagtcttgcccagggatgaagccaacttgattgtggtggataagctttttgatgtgctgctggatttggtttgccagtattttactgaggatttttgcatcgatgttcatcagggatattggtctaaaattctctttctttgttgtgtctctgccaggctttggtatcaggatgatgctggcctcataacgtgagttagggaggattccctctttttctattgattggaatagtttcagaaggaatggtaccagcttctgtttgtacctctggtagaattcggctgtgaatccgtctggtcttggactttttttggttggtaggctattaattattgcctccatttgagagcctgttattggtctattcagtgattcaacttcttcctggtttagtcttgggagggtgtatttgtccaggaatttatccatttcttctagattttccagttaatttgcatagtggtgtttatagtattctctgatgg

SEQ ID NO: 7394 - DNA, 1032 bp, Homo sapiens
atgtgtaatcttgcatgtataactagattgaaaaattagaagagattataagggtgtatttaaatactaaattatattacttgatttcttaggattatccttctattgctcaccttgtccagaaactgagtgaaaataatattcagacaatttttgcagttactgaagaatttcagcctgtttacaaggtaaatgtgtgagataaaaagaacaagattctaaacatttttgattgttagaggcaaatcatgtctgaattgaaatgtgggaaaatgccaccagataggcaaaccgaattttacaaaagtggtttatattaatttttaatcacatattataaaactggtttctaggtttgactcctaaagttagttaggaggaaacatgggaactggcatttaaagataaaagttgctcagtggatcctaattggttgaatgaatagcagttgtattttacgtgttttatcttttaattgcaggagctgaaaaacttgatccctaagtcagcagtaggaacattatctgcaaattctagcaatgtaattcagttgatcattgatgcatacaatgtgagtacatcttaaataagatcagttttggacaataccctgttgagaatactttgtacaaagaaagtaaaacttccttcatacacactttagcgagcccaaagtactacagaaaaacttaaattctgtatgtatctagaggaaaaactttatacatattgtcttacaaaagcaagattcatggcctaaacaaagtgaaaatgtgataaaggcatgtggggagtatttccaaataactgtttgtttatcattaaggaatagatctccttgttagaaagcaattgtaaaacataacttacatttaaacttacaggatttctccaatctttttcctccccaaaatatcctttatagagtcatctattctgatgaattgtgctagaaaagtttttttttttgccaattcttctcttcccatatattcagaggatatgggtttctatttcaggaggtacacactc

SEQ ID NO: 7395 - DNA, 1033 bp, Homo sapiens
attcacttgcagggagtggcatcccactacacacagaacagagttcacaacttcagtgtctaaaaagtcagttgtaccctatcacgtgttctgccttgccctctccagactaatttatggtgttctatttgttttcttctcttataaactgactttttgtctgttttgtccactgtggattgggaatatcttttttatctttgcatcctgaaggcctggtgtttaaagtatttgttgaatgaaactgaatacatacccattgagttacttatggaattcccaggtttttgtaaaaattatgacaacatgttttattttattgtgtttaccgtgtaaaccacatttatttggtttttctcgtttgcgtttgattgccaacaggcaagtttcattttctaatctcttgtctaattaggggagccacagacatttacattaaaattcaagagagctgaagactatcccattgacctctactaccttatggacctgtcttactcaatgaaagacgatttggagaatgtaaaaagtcttggaacagatctgatgaatgaaatgaggaggattacttcggacttcagaattggtaggaatgttgggaacattgaccattttcattataaagtcttggcaattctcaaatgttgttttatattttattcctttgttactcacaacatacttgtgagataaacaagccagttttttagccttttctgagtggaagttgatattccagtcacacgtttaataatcttttctgccaccttgttcctctgtcactggatgctactgtttgacacagattgtacctcatagataatgacttgcatgcttattttcatactaacttgatcatttatcttatgacttactttattttatttttaagagtttcactcttgtcgcccagactggagtgcagtggtgtgatctcggctcactgcaacctccgcttcccgggttcaagtgattttcctgccacagcctcccgagtagctgggattacaggcatctgccaccacccccaact

SEQ ID NO: 7396 - DNA, 1021 bp, Homo sapiens
cttgatcaggtttttgaaaacgaatgttcagcattgaggtaactgaggcatctggatatgctggtctgggcccctgggagccgcaggagataatggagatagagattctatgggctgagaccattggtaggttttatggtgttgaggaatacttaacactgattttttttttgagcgctgttaattaaatgttaaaatataatcggtttgctttagagaaaggcacgaatggattctggggctctggtatggaagttattttcgcagtgtaggtgcaaggtgagggaaccagatagggaggggagatgggcgagggtctgtggagaggggctggagtgaaatggtttgagagccatcatgtttataaaagcaatagaaggtacggtggggtaatactttctatttaatgcatttttcattttatttctttataactaatataaggcacattttacatttcagatgaatttacaaccaattttctggattggactgatcagttcagtttgctgtgtgtttgctcaaacaggtaaaaacaaaaaattttcttagttgtcttttcatttccgtatcttgtattgcgctttgaccagttaggttcatatgagaacctaagtcataatcatgctgctccttctggaagccctgcaattgttcctcttactcagagaaaggtcaagttccttcatggtcaggctcccctcacccctgccacctgggatgatgggaggcaagttggctggtgaagtactaaaatgctagggattgaacacactgcaagaagatcttttgagaacatgagagtgtgtaagtgaacagaaggcaaaagcaagtatatttagaagcaaatgaaataaatgtgtagaatggaggattatgaactgtccattattatctgcaaagactttctagaagacattctcactctttgataaaaaagtctcacaaaatgttggcatcatctaggaaagcagtgaaaataaagctgaaaatgtatttaacccttctataaagatgtggc

SEQ ID NO: 7397 - DNA, 1102 bp, Homo sapiens
ttaaactgtttccagctgctggccttgttctctcagctgttcttcaacactgaagccttgtttcgcctgcttccgggtttggagctcttccggaggcacaagggtttcagaaggttgactttttgccttgtcaaggtttatagaaggaaaggacagtgacatttaaagtagtgtggctccgaatgttaggaatcattttctgttacctaataacttcatcttagtggtgattgtctaaattgtatgatatgttgacagatttctcaaagcagtctctagtgatcattaaacagcctgagttgtatcctgaagaaacatgtatctgtccatatatggaacaaatatttgttccattccctttgtgtggaaactgcctgcatgcttcattcatcacagtaatgcatttcctcaggaacttttaatgtttcaggtgtctgttgtcatagctttggaatcgtgataacattatttgacttgcttagaattatagtctaatggatttactacacactaaaccttttagacaggccttgaaaggtgaatttggtaggcatttcacacttctgtgacactcagattttgctggtctcttggatacagtcacaagtgatatgtaagcaaaactgcaagctcaggcataacagcctgctgggctgagcacgattgcagaagtgaatgacttttcacgttacgcttaactcttttctctcgggtgctcagagcacaacttaaagcattctctctgagccaggggaatagcatcctggaatgtaagcccttgaagatggaggtctgtaaaagaaatattcagtgttaacttggaattcagtgaacttttttcatattaaaggaaatttgtcaagaaaaataattgcacagttaaattgtgctacagttgttttcattaagaaagtagaaagaagaccctaacagtttaaaaaacaaatggccctcattgtctttatattgtgcatataactctttgttatcttcagattatatgaaactattagtattatttttatattcttctcatctttttttcttttgccttgagaaagtcacgttcttctcattgtgtactttacatccaaaattattt

SEQ ID NO: 7398 - DNA, 1031 bp, Homo sapiens
ccaccacagacaggatggagaggaagatgtgacaaaagatgtggtcaaaattagttttaatcaaggaagcattttggaatgatctgcttaaaaagtggatataattacgcagtttgagaagataattctccttaattgaaattacggggaataagtcttgctctcaggtgcttattgataccgttgatcatgctggttcttttgctggctccactcacaattatctttgacaacttgccccaaagtaaactttctcaaccaaaaccgttcccaacttctttcctcctcacagggaaaggcaaaaaagtccgcaggcatagagagtggaaagaaggaacagcatactaggctggtttgaaaaacaatcaattgctaggtaataatgtcttaccttttgagtggaaggaggagctgggaagaattaagttcgggcaggttttttgctcattttggatcagcccttcatattatggcttaatagctttgtttatagtgtatttttctgcttttacgttcatcctctgaagtcttgagttaattttgtgcccctttacccccatttgaattaaatgcttcatttttttcccgtttctcacataaagctatttttttttcaggacagggaggggctggtggtggtggtggtgctgtaccagttgtctgtttatgagatcaccattagacaacgtttctcattggcttgaattatttgaattttgtgtgattttcctgttatgttgattctgttcttggtgtctatgagttctgtagaggattccagcctaaattttcttccttagttctgtttacttttcctcgacttttgtggttttgctctttgatcactgtcaagatctatttgagattttctgactttcttgaagagcagaatgagatctagattttctcttatttttaaagaagattcttcactgacttcctttcactttttgttctgtggaagtctttcctaggtgttaagtttccaggctttacctccccctacccccaacgtattatctttaggcatt

SEQ ID NO: 7399 - DNA, 1033 bp, Homo sapiens
cattcatttagttgatataatcctaccagaaggaaagcactaagaaacactcgtttgttgtttttaaaggcaacagacttaaagttgtcctcagccaaggaaaaatgatactgcaactttaaaatttaaagtatcttgcactgataaatatatttaaaaattatatgtttataaagttattaatttgtaaaggcagtgttacaaaatgttcagtttatattgttttagattgttttgtaatttttaaaggtgtaaaataacatattttttctttatggaaatctataaaactttctgtagtaaaatgttttcattttactggtatattattgcttcatgttttgtaccatcataagattttgtgcagattttttttacagaaattattattttctatgacaatatgacacttgtaaattgttgtttcaaaatgaacagcgaagccttaactttaaatgacatttgtattctcagacactgagtagcataaaaaccacatagaactgaactgtaacttaaattccaaactatgactactacattccaaagaaacagttgaattaaacattttcataaaatatcccacacctgatggcttttattatattagcactgttctagttaaagaagttggtgacatgccactatccaataacttccaagatttttaaaaattctcttttttaaaatatcctgataaggagagaagattaagaagacattttctgaaagtagaatctcaactcacattggaccctgtcatgataaggaatacggaatttgacgttaggaatgggaatgatcctaaattgtgtgtcaaatgttctatatttcatttggtaaagtttcttttatcatattcactcataacttggtaagttttgttcttgcagaaaatagtaatgaacctgacagtatttattcatgcacccacgctgcatttaggtaatgggaaaagttgggtatgacattacaactggctgtttggtaattcttaggagagttttattccatctaggaccagaataatagg

SEQ ID NO: 7400 - DNA, 1023 bp, Homo sapiens
tttccatacccattttactaatatgaaaaggctgactaatacatgattagaacagtggttatactggcgggcttttattagaaagatgttctgtctttacccaggttatttcttggggaagttgtttaagtgggattttcactttactcctttttctcttctactcataggtcctgaatgttcccagaactacacaacacctagtggagtgataaagtcccccggattccctgaaaaatatcccaacagccttgaatgcacttatattgtctttgtgccaaagatgtcagagattatcctggaatttgaaagctttgacctggagcctgactcaaatcctccaggggggatgttctgtcgctacgaccggctagaaatctgggatggattccctgatggtaagaatgacaggaagcaccccaaaaagggaaggttctggaggaagggcaccagtattcttttacaagtctcatgatacatgaatcattaaaaaaaacctcaaaaggacactggaaaacaaagcaaaactctctatattcagagcagtgatgaaatatttgagctcaagaagaccttagtaattatctagtccaattccttcattttatagataagaagctgaggccatgaaagattacaaaaggttcttttagctatttttgtgatataattgagacaaacacatagtttttctctctaaactattttgctcatccactgacctggctactcatcattaattcacagattgtaagaggatgggctcttagtaattccattacatcaaaccactcattttataaatgcagagaccaaggacctgagaggttgagtacttaataaaattttaaggctaaactatgcatccgttatgctacaaaacaaaaatttggaaaaggaacgagaatgtttgggcattcctaatttagacaggttccctgtacattctctacagatttttcatcttagggaatttgagtcacctcaatacatcatttatagtcattgacctatgcattcata

SEQ ID NO: 7401 - DNA, 1026 bp, Homo sapiens
tgtgcagtggcgccatctcggctcactgcagcctccacctcccaggttcaagtgattctcctgcctcagcctcccgagtagctggcactacaagtgcatgccaccatgcccggctaattttttgtatttttagtagagacggggttttaccatgttagccaggatggtctcgatctcctgacctcgtgatccacccacctccgccttctaaagtgctgggattacaggcatgagctgaacacactttttagtggctgaataatattccatggtatttgacattattttgggttgttcgcttagaacagatttctaaaaaatgcttttgttaaataagaggctatgactcttttaagacttttcatacatcatgattagaacattgcaagccagaactattaggggacgactctagtgtaaaaacactcagaaacatagatgcagactaattggctcctcctagctccaccattgtatatttttatttccaaatcctgtttctaatactctggaagaaaaatctgttctcttttgtgggatacgtaagttaattcttggacggcagcacagcgatcgtttacaggttgttcagtttgaatagctattaatgctcgtgcaaaataaaccaaagagccacagaaacacatttttgctggtgaaaattgtgttcgccaacatcatttctcactccagcttatgatgtcaggcatcatatttctccattattaatgtactatgccagtggggggaggtcctcttggaaggagattaaaaagacaccaccacctcaaatcccccttcctaataatgtgagaatgtccggaagcctggggggttggtgcagtagctcacagtgtcagacaacaccctgtggaggattagcttcctttccattaaccatctccactgtagagagtcaggggtcacttgtactcaccagagaaaacctgacttaggcaaagtcactattcatctgttcagcaccacatacctataaagcctcagaaaccgctattcagtgactga

SEQ ID NO: 7402 - DNA, 1047 bp, Homo sapiens
gccagaacaggagggtgagagctgtctgtgtgtacagcccattcttccgatccatgagatgagactctctacgccctggcagtaaaccccagtgaagcagagatgacagaggtctacctgattacccagcagggagtcactagtcacccagtgtagaaataagtttaatgtcactttcacacactgttcctgggacgagtgttgaaaatatatgctttcttgcaagttccttttcaacaactgaaaaaatatttccagaggatcccaagatctcaaaaacttgcttggctccatacaaacatgtgtattttcgtgcctgccaaaatgagcaagattaacaggataactgaattttgactgtgaactgaagttgatgagtatagtatcaacaggaaaatgtggcactagttttcagaagataatatgattccaggggattttttttttcttagaatagcatcctagaatctggttttcatagggcaggagaccatacccccatctaactgtaggatcccagaaaatcatcaaggggtgacagcctctgttccttcctctcctccttctccctctgccgtcaggacagagggtagtaaatcctgcctttaaacctcaaagtgtttgaaggaaaagtaggtttcttggaacaagatgtactttttttttttttttttttttgagacaaagtctcgctctgtctcccagactggagtgcagtggcacagtctcagctcactgcaacctctgcctcctgggttcaagcaattctcctgcctcagccttccaagtagactgggactacaggcacatgccaccaaacccagctaatttttgtatttttagtagggacagggtttcaccatgttggccaggctggtcttggactcctgacttcaggtgatccacccaccttggcttcccaaattgctgggatgagaggcgtgagccaccgctcccagccatgtactttagccacgtaagatataaggtaggaaatacaattttcagaggccccagtaatgttccagaatcgttatattccatcca

SEQ ID NO: 7403 - DNA, 1048 bp, Homo sapiens
ggttgcagtgagccgagatggtgccattgcacactagcctgggcgacagagcaagactctgtctcgaaaaaaaaaaaaaaaaaaaggccgggcgcagtggctcacgcctgtaatcccagcactttcggaggccgaggcgggcagatcatgaggtcaggagatcaagaccatcctggttaacacggtgaaaccccgtctctactaaaaatacaaaaaaaattagccgggcgtggtggcgggcgtctgtagtcccagatactcaggaggctgaggcaggagaatggcgtgaacccgggaggcggaggttgcagtgagcggagatcgcgccactgcactccagcctgggcgacagagcgagactccgtctcaaaaaaaaaaaaaaaggcaaatacagcaagagagtaggtcctatttcgaacattttgagaggcttttaaacattgcaggtagagatgtgcaaaaaagaacttgagaaacgggaaactgggcaaagctggacatagaaatgtgggaatcacttgttggctaaagctgtagaaattgacttttcgtagaagggcaaggagaaaaagaaaagaaataaatgtctcgagaaaaagcccccttgatgggatggattaaggttagagggtgttccaaggacaatgggaaggcgttatgagagaggtaccagttacaacagtgtcttgctacagaaagctgctgatgtgagcatttcaaaaacggaagcattgttcacagtgtcaggtgctagaaagaaatacaggaaattgtggacatgggcgatacagtaactaggctcaccaggacccttgaggcagcagcttcacccagcccttggggcagtacatcctaacacagacattcagcattgaatgcatatgaagagacaccgcgcatttctttggatttgaaagaaatacacgcagaacattctaagacattcgaagcaagatgatcaagatctacggtgataaaaatgtatttcaccatgtagtcttaagaggaagggtggaattaacttggaaaacttatgtagccctctcac

SEQ ID NO: 7404 - DNA, 1035 bp, Homo sapiens
tcccctgtcctttgaccttgccatctccttcctgcatttctggttatgacagattttccagtagtagggaggggagttggttcttagtggcaacaccaaagagcatgtttgcaggaaagagcttgggatcatggcagagaagaggttactattctagctccttatccccacctcaccctcatgaatggccttatgtgatacacactatatctgcaactcttcaaaagcactctcaacgcttcttcatttcaaatggctacagatgtggctgggagacccaatagaagggattggctttcttttttgtgggactgttatgggcctctatgggtcaaatgaattctgtaggatctacctctttgtgagtagcaaaatccttcttggaccttgttaccttgcaagcaaacatttcatatatctctgtctctcacactctgtctcacactctctctctctttcttattactgtcaaggtattgaaagtggtgactgcagttcagaactccactttcttacttagctgtcttcagcatgacagcataacttcagcgtaacattccctccagtggactgaaaatgtttgctcaaatcaaataccccagtggctcttctaatgcttcaaaacattggccatttcttggccctgatttctccaacttttgtgcaatcttatacataattggcaactccccagtgttggggccttcttctctcctgcatctcatggtgctgtgccatcttggttttctccccacttctctgacctcttctcttttttgcctctatttctcctccaacactgaaatgtaggcattggccaaggttttgcctttgccctgaatttttcctctgaataagctttttgatcttagccactaggctcagataatacctagcttcctgaatctgacgtgagcgttggcctcaaacttacaaattctttctggaggatgttgaccacctggagaactgaccatttcctaaaattaaaaacaaaaacaaactttgcagcttcctatgcaaatgacttctctt

SEQ ID NO: 7405 - DNA, 1026 bp, Homo sapiens
taccaaggaattgtgtgtgtgcgcatgtgtgtgtgtgtctatgtgtgtgtgtgtgtgtgtgtgtgtgtttctgtcttatgtgcattttacccacatatcttacttcagacctcagggcagtctgcttccttctctctatactgattaatttgaagaaaattttagctacaaaaaattggttctcccacattgttgtaatttccatccctaacaaacctttagtgaattctccctgtttaaatgtagaaagactgtgtcttccggggatgatgcagaatccacttagggtgcacagctgccgtagagcgaagcctggggctccatgaagctggggaggaagggggttggtggatcttagtaggccagagatgaaaaagaggtgaaatgtctgcagcctatttctgattatcttcaaactgataactcataaaagaatcccatttttgttgctgtaatatcagtcacaagttccttgttttaattaaagtttcatgattaatgtcaaatccctggtttcatgccggcattttccaacagtcttgtctctgggtagattaatttatgacttaagtgaagataatcagtgctttaggcaaataaactattccatcacatctaaggattcttgcctgggctgactgtacaaatggtgcagtcttccgttaaaagagacagacatgctatggaatgctcatccagtcatcgtcatagccagaggtgatgctggacattatggtcattttctttactgaaaatgttcccaactacattttaggccatatggaaaatgggtgcatttcactccaaaccatattgatgcaattgtgaatgttcaaaaatgcaaattgcatcattcctgcgggagatgcagtggcttcccagaccttcttttccttccgtgaaaatctttgtgaacattcagctgtgttgtgtgtgttgatggagagggttgagcaatacatactgtcgccaaatgattttcttattgataaatggagcaatatactttgttttattactcaattg

SEQ ID NO: 7406 - DNA, 1037 bp, Homo sapiens
tttatttatagaggtttcaaacatttaatagtcattgaagaactgtgggctccctttttaattttttcaatgacatcaaaaccctcgattgttaaatgtctgaaaggaactcagaatgcttgccccacaccatgctgatagctacctggctgcctaggaatctgatggccctcggctccttgaggttcacaaagactgatagctgggtggtacagctcctgtttcctgaacgctcaccctgcatgagcagttctaggggaccgttgggtcacgcttaacacatttctgtagccatctttgcctacctctcttctctgcgtccttaaccctctgcaaaatgatttcacaagaaatcaactatagatgcctgtgccatgaggtgtgatctattagtaaacagccttgttaaaaacgtactgaaaggctggcattcccctggtggtcctggcaaggattcataagattgaagagacatgttagcaacattagatgagaagtcactaatagtgctgttctcttatagaacaattggataactagttatgcaaagcctctataatttggttctgctgcccccattcaggccacctgcagacagtcttcacttaggcaccatccttattgccaattacttttcttcgctgaaatacttcttctttaatgaatgttattatttacactttgcagagtagttcatgacaacctgatttgacttgtgtccacgacagagacttttattttttagaagacatgtaagaaaaaaagtaaatcatgtgttcatggttatgtctctaaaaaatgcaattctgctgatgtgtagctaaagcagcctattaattagcaaaggcacttaaaattgttttacaccacagacagtattcaagctttgagaaataaaaaggtgtgttctttgcatgagaagttcaggcatatattatccagagagagctcattacttttttctcttttacagaaagttagataacagcctcttttgacagaaaaatgtctattttctgacaaaggaccggaggcat

SEQ ID NO: 7407 - DNA, 1076 bp, Homo sapiens
cctatggtccattttgagataatttttgtatatgagatgaggtaagaaactcaagttatcttgctcgcatgtgtatgttttaaccgataattaaaacagaccagtctggccgggcatggtgactcacacctgtaatcccagcactttaggaggccaaggtgggttgatcacctgaggtcaggagttcaagaccagcctggccaacatggtgaaaccttgtctcaactagaaatacaaaaattagctgggtgtggtggcgtgtgcctgtagtcctagctacttgggaggctgaggcaagggaatcacttgaacccgggaggtggaggttgcagtgagccgagatcatgccactgcactccagcctgggcaacaagagtgaaactctgtcctaaaaaaaaaaaaagagaaaaaaaactagtccagtctgcctggtgaactttcatttgtcctctggaacccatcttggatatttaagctctctgtggtactttccgtgtcctctcttctccactctgatacagcttcctcctacttatctctgtgtacatttgtctgttgttgaatatgaaatccagtattgtcatgatgtgtatatgtctgtgttccctactggaatatgagcttattcatcttggtgttttcaatggctgaaacatagtaggacctaaaatatttttggttaaatttgattaaatattaacatctctaaaccttgaaaatcttggtctcttttttttctgtctctctttcaaaatttaaaacagtcaagcatttgaaacaacaacaacaatgaaaatagagccagggaaccagcttgttcaggaaaaggaataaatcattctagctgacagtactcagtagactgctttgtagctttttgagatagacatataaaaagggacactgatttgatggaacttgaacaggatgatggataagtgctccaggcctaatgaaatagcatgtctaagaaaacctggaaaccctcagatgacagcagacacgcgaccagttccacctctgctatttactcccagtcattctgcgctttgtttggccgagggtttcatggcccc

SEQ ID NO: 7408 - DNA, 1029 bp, Homo sapiens
aattgtagaatatttttaaaaaattaatagtaacttaattactgtcagattcatggagttccttggagaaattgctttggcaaatagataaggaaaatttacaaatagcacaaaacttggtaaataaagcaatttctaaagaatccgccatggactagtatttttaagttattttctccataaagtgcatgtatgttatcaatttgccttgcaaaatcatttttataagaaagagagctatttctgtttttaccaattatttgtggtatttgaaagtcattcatttacaaaaacataagaatgatatccatttactcattcattcattcattgagcaaatatatattggaggtcactgtgctgggtacatagtggtgagttcaataaagtccttgccttttctagcatgggggatgggagttaactaaaaaataaaataaatgaataaatattttgtaatacattatgataagagcataatcaaggtgctgaataatttctttgggaagatgacatttggctgagtactgaaggatgcaaagaagtcattcatgcagagaagggaggaaagagccacccaggcagaagggagctatgtggacaaagcaaaaggctgggagatgtttagcatgggccagaaactagaaggtagtcagtgtggctacagtgtgttgagtggtatgggaagaaatcagagaggtatgtggcagatgaacctaccgaggcaaagctaaaatatgaaattttattccggatgtcatagggagccatatagtgttctttagattgtgagcatagtctgattcataattttgaaacatcccaatggctttttatgagggaaactgattacaaagtagttgtatcagccaaagtagttatatcagtagttatatcacaaattgattacaaagtagttatgtatcagtagttatatcagaaattgattacaaagtagttacgtatcagtagttatatcagaaattgattacaaagtagttacatcagccaaagtagttttatcagtag

SEQ ID NO: 7409 - DNA, 1050 bp, Homo sapiens
aaatttaaacactctttttgtagaggatctaattttatggtattttaacgtcaactttgataaatattgggaataatattttccaagagctaaattattcttagtttccccatccttttaagaaccctaattctcactctccccctgcactcccttgatgaaaagagttgcagtcatccagacttattggagaatagacttgattggtgctaagagaattgtgaaggtctttagccccacattatttcttattgaatcccactaaaacttttgaaaatttcacattggtttaagagatttggacatctgttaacgttttccgtcttgagtactagcatgggtctaggtctgttccttcctgtaaactagttgttgcaaggcggtcagggttgcaagacaatttttccataataccaaacaggaaaaacaacagtagcgcaacaaaaggtttctaccttgctaaaaggaaaagaatatttttataattaaagcttttagttatttgtcatatactcattatcggaaaatgttgttatctttagtcctgtattgacacaaatgtgttacgtgttctttattatagttgtggaaaactttagtaaaggtggtattaaagtagtcccggtcaggcagccctggaaactgaaataaatggaataagagtgggaaataaaaaaataagcttcaatatctgtgtttagcccagtaaatggtgtctattactacagatgcagttttcttttatggatatcactggacagacagtaggctgtgtagattgtgaaatttagtcatcatctctccagtaagtgctctctctccccatttccttagatcataagctgtaggttacccatattatagccgtcacataccccaaaactagccttgtacttcaatagatggttggattaggtataatctccaaggtctttttaaactctgattccaacatttggcattcaccagctatagagaagatgacattgtcctagtgacacccttttagttgtgcagagttttctcggtatctctgttaattcaaatact

SEQ ID NO: 7410 - DNA, 1023 bp, Homo sapiens
acattattaaggtcccacttatgagtgacaacatgctgacctagttttgacagacaggggacctagttaaggtactggatttatatcttcctggtaaatattaaatatgatgaacactttactgtgaaagttcctagatacctcttgccctgaaaagccactggcagacagctgtgtcttctctgagtggtcgtctgattctttgaaactttctatgatatttcagcaattaaggattgcttagcctctacactcatggtgtcctgaaacctcaggtagctgaggccttaagacctgcgggataatgagggagagccaggccatgaagagatgctgcagaccctccaaggtagcaaccagatggcttctaggcctcaggtaccgtggctcatcactgtgggtggtgattgtgactgtatggatcagttccagagtaggtctgtcagaatatcaatgtctttaatatagttttaagcatttgaagaatttaacattcttggtttggccattcatgactgtgaatgacacatgatttacagtattgctagggcctgtaggctttgctggagcatgaggggttaaagaactaatgtgagtcaaggacagtatctgttgcgcacctacttgacacaaactactttactaggccatttcagatacacagacaaatgtcgtaaagtaatgattgagtccacaccttccttctgatatttatttgtaaggaattttatttgcatctgggagagttccattagtctctctttgtaacagacaaatctaaaacctactcccacagtttcttgtaaagaccagcacatctttgaattgtcttggttttttaataagatttccagcttttataccagatcaaggcaaactggatgtaaatatagcgttatccttgctgaacactgttgcagaccaacaggttcacagtttcctacatcctacccatttataactgaaacagtatgtcagttgatttttaaaagtgcaggtggttttctgatcgttcactatgat

SEQ ID NO: 7411 - DNA, 1050 bp, Homo sapiens
tctcatggctcctgcaccattggttgaaaaaactattttattacattgaattgtttttgctgcagcattgtgtagttttcaacgtatctatcttacacaggtctacataaacgaaagtttggcttatagatgtgtatctgtgtgttttgtttcgttagggattataaatagcattgcatttttaatttcagtgactacgtgttcattgccagcatatggagaatacaatggatttttatatgttgatcttatatcctctgactttgttgaacttgctttttagttctgggagatttttgtagattctttggaattttctttgtagatcatcatgtcatttgcaagtaagaagcattttatttcttccttttccatctgtgtacttttatttccttttctaggcttattgcattgcctagaacttccaacactatgtggaattacagtggtaggagcacacatccttactttatcatagggaaagcattcagtctttctccattatgcatgagggaacctgtcggtttttggtagatgctcttaactttaggaagtttcactttatttctagttttctgaaggttttctgacatgatgggtgttgaattttatcaaatgcttcttctgcatcaattgatacaatcatgtaacttttcttctttgatctgttaatatgatggattgtagtaattgatttttgaatattgaaccaggcttgaatttttgcagtaaacaccatttggtcacggtgtataatttcttttatatattgctgaatttcatttactaatatttcattaagggttttttgctttcatattcatgaggaatattggcctatatagctttcttttctttcttccttttctttgctgctgtctttatctgattttggtatcttttctgaattcttttgaatatatgtttatgtattgtttttgctagcagaggtctacttcaaacatgaaaagaataactgcaataaaagattatattcagtctaaagtgttgctttatagaagtaagattttactgcatttaagtgtgtac

SEQ ID NO: 7412 - DNA, 1036 bp, Homo sapiens
cgaccctattgagttttttctctttgtaataatggttccttgccatcctaatcaatattacttgacaattatagagcttgcttctctctgtcttgggtgtatatttaatcaaaaattactatgctttggccccttgatatatattttttaagtatctataatgatgcttttgaacttttttcttgttctggttaaaatgttatttaattttccttaaaaaatgcagtttgctcttataatatttcactcatttcaaatgtaacaggagatagaatacatatgaatataaggtatatttttaattctgtagggatagcctccagagtgtcccaccaacatggacatctgattttgtccctatataaacttattttttaaaaaacaaaatgagaaataacagtatattaaagttcattcatgtatctgtccttcagagaaaaaaagtgaaatgaaacacatggataggcaaattacaatttgcaaaccaaagataaagttctggacaagacctgggaaatacacgtgtggcaggtgccctaaaacacgctgcacctacaaccaccaaatgttgtatttttcaaaagtcctgtttttattattttttgcataccagtcttctgaactttgcatatggcaaatgaatggcaactattgtaaattccaaacttttccaattttggttgttgaaatcgtgtttatagggtggaatgaacacagaagtggaattcaggtgacttgcatcctcctctacattcttctaagtaatttgggattttagtcaaaacttcaactgcttgagctttaatttcttcatttgtaaaactgaagatttggactagataattgactttcaactggtgtgttgtgatctctggtcaggagcagtacctcaatgggtttggagagtgggaaaggccaccagtgtcaccttccccccaccaccaccttcacagttgttttactcacttctgtacatggggatcctttgtaaattttagtttttaaaaagggtgtttttgagtatttaggaaaaagt

SEQ ID NO: 7413 - DNA, 1008 bp, Homo sapiens
gaaaagatgtagcaatttaaataaatttttctcctttgctgaaatgtctagaacaatacaatacagacttttaaaaatccttcacgcttgtgtatgccatcccaacatcctcagtcatggcctgaaaaacctctggccactcagatcctaattttttgcatcaagatcactccaggtatctctccttttctaggctttgtttttggtaatactcatcttttaagtttcacctgactgcatcatgggcttttctccatcatgcatttaataatgatgttgttgctatctaaaataaatatcatcatttcttctggcagaaaagatcatattgaccatttaaaacctaattctgatgttaacttttgccaagatttccagcacttcctacccccagtaacccaggcaattacaacacaagtgaatggctttggactcatctctacaccaccatataattatcactgcttgtaattctttctccttcactagggcatacgtcctttaaggacagagactgtgtcttgcagtacctgctctgcagcagttgctcaatgaatgaatgaataaacaatgcaagttagtggggcttctttgtaaatttcctggtaatttttcaaaggacattcacagtttagaatgcgtgtagcattttcacattataagacatttgagagagtatctttggctttaggaaacttcaaaccagaaaaattgcatgcattgccctgagctatatagttgtagcgtcagaggtagtaatagactcgaggtctctgtttgacaatcatttatgaaaaataaatgtgctaaattctgttttgttctaccaggttgagcagatatgtggaaaattagacttttactaatatagcaaagtattaaaattaatagatgtaacactttgatcgatgtctagaattttctcttcttcttttttcactggacaggtaaataccagctgtcccctacagtgaatatgccccaagatgacactgtcattatagaaga

SEQ ID NO: 7414 - DNA, 1030 bp, Homo sapiens
caggaaacactgggatctcaaaagcccctttagctgaattttttcttgaaatcagggtcacatcttccttctcagagccaacagtttctcttctagttggcagagttatacctgggaggtgaatcatgcagagaaacagttgcttattcatttatttaaaatgggatgcctcttacaaagcccctagtagggaacagtctttccttccctgtcctttcttttttatttgagacaggatctcactgtgttgaccatgctggagttcagtgttgtggtcacagctcgctgcagcctccatcttctgggctcaagggattctcctgcctcagtctgccaaagtcctgggattacaggcacgcgccatagcacctggcccacagtctggctttcttagatgatggtgttctcttgtgagattatcaatagcatatacctccctctctttcctcagtccccattttctctttctctatgggattgagtctgttctcttagaatgcctcctttttcagtgatctgtattgtattatactctgcttgttctaaatgtatgttgcagtttggaattaggggtgaggaggacacagggcatcctctcttgaaaggtaggatcatctattttcccaaatatggaaaaacatactttgttgtataataggacatttgaaagttaaaaataaattatatgttgccttgataatattggagcttgaaaaaagctaaatttcatggatccattataaattatgtgccaactgtagaaaataggtcagacttgcccatgtgcaaaatgagctgttgaaaatgtgaagtttttcttaaatcaatgttcagattcccacattttaagatcaaatcaactaagataaaatgattagcaaataatacaaactgaaaattatacctaagttgtttaagagtttttcttaatttttaaacttctgtttaataaacacataaagcaccgttttcaggttgcagtgaccactcatctgaacctatgatacaagcatattttacagagaaaata

SEQ ID NO: 7415 - DNA, 1136 bp, Homo sapiens
agttgataaggtgcagaatttggatggaatagcaaggtgatagaaagttagtttctattttacatcagaatatggagattcctatactatctgactttatgaacattctcagtaatatagcatttcaaatgatttttgaagagcacaatttttaaaaaacatttttctgccagagaactaagttctaaaagctggcattaatttctgtctatgtcaaaagccaaatggattaatagtggaatatcacatgaaacatacaatgtttcacatcagtgttcttaatgataataatgacttaagacttggtaagaaagctgaaaaagattattcccattctgcagttgttataataaataaactatcccctggagaatatgctcttctttaaaacaggttcagagttcagcaatcagaaaatattgcaacttgattaaaatttttcttcatatatgcagccagctccttatcctgatctttcaagtaggaaaaatatgagaattgtaagccttggtaaaatgttatggaaatgtaaaactcagtaaacactgaaaaggcaactgaagattcaaatcagaaagtaacaattaagaaccttccagagttgaagcaagtaagcatagtgagtgatgagacttaggtgtgtccatagaaagaatattcttgttttccattttttcaaatgtagcttttccatgcttataagtactgattgacagaataattttttatttcagcaacctccaaatttaaagtcaaggggaactatgatgtgtattgatgttgttttgtattttaaacatcaaaatttaccgtactttatattcttgtaacagattttatattgaggtagtgcagttcattcacacatagtcattatttcgtactctgtaaatgtttcaaggggctgggcacgtaagcccaatactttgggaagccaaagtgcgtggattgcttgagcccaggagtctgaaaccagcctggccaacatggtgaaaccccatctctaaagaaatacaaaaatttgcccggtttgttgacatgttcctgtagtcccagctactctggaggctgcagtgggaggatcacctgagcctggggaggtcaaaggtgtagtgagtagtgattgtaccaccgca

SEQ ID NO: 7416 - DNA, 1997 bp, Homo sapiens
acaacatgcaacataagcatcagcatatttggttcagttctccttactccctagacctatggaagtgatgcccttgggcccagatggatgcctgcatgctctatgggtaatgttacaggacaggactctgagctgatgaatcttttataatggcagtaagcaagactcactccccttggccctggagggagacactgtctctgtctcccacagcttatctctgtagaggtatctttgaaaagcaagtccagaacagaagcaatcagtgcctctgtttataagacatgcagatttgcaagagacaaatggagaattgtgtcccaacacagaaaataaaagttgtgaaatgaacagtttaataagaggctggtaatgatatcaattggctcggtcattttagaaagtagtttgatactggctaccttaaaatgatcatgccatttgaaacattatgttatagacttcctccaaagaagtgaatcctaaatattgaaatgtttttatttagaaatctgtcagttactggagttgaagtgttctttgatgagtgaattgtgaaatgatgatatgtttacccgatagaatattgaatcattaaaaattgtttctttaatgattgcaataaaatgatacattaaatatttatattttattattactatgtaagaaaagaaaaacctatatgatctaaaaaaaaaactgaaagtaaacaccaaaggtaagaggaaaagacagaaatcatctcacatcagtacaacagtgtcctggagagcctggtgttctttaatcactctaactgaacttttgtgccatagaagatgaaggacacttattttttaaaacaaatatgttaccaaattcccattttctttttaaaatttatctagagggtggtgttgagcacctagttagcccttaatagttacaagacagttttctgagtacttcaattagctcatttgatttttgtggaaactctgagatagatactattatttcccacagtttataaatgagtaaactgaggcacagagaagttaagtaacttgtcaaaatgattctgcatgcaaaatccgtgttttttattactgtgctcagctgccatatcaaatataacatgtttaatactttaaattattgtatttgtttaatatcttaatttttgtttcacatttgtatcatatactgggaattaaggacaatgcaacaaatacatagctaatgagttttattttcaaaagaaaaataagtgttactctggtaagcaagccacttctgaaaagagattgattagtctgaataaaatcgtgtcaactagagggtggccacttggtcactagtgtgtggtgggagaaccctaagcagtgcagacgcccttcgtgcaaaacaagcggtgccagtgttcctggcatggtggtatctgcttgagtggtcatctgggataaatatgtataggaatgcggcagatgatggcaggtaaggtgctgggactagttattagattcagtgatttttagtaagcatcaatatgtaaatcttcctgtgtgaatcattgatgacaggcaaaatggaagaagaatgtgaagacaaattgcagtgtacttttggatgctggactaaatatcttccaagaagattcctccatgctctggaatcctaataatcaatgagaagacttacatattggaactgaattttaagattccattatgcatggaactggtgcagagatacatactttttgttgttctctgtggttagatagctttcataaatcagcaccatctgttcttttgcctttggttgtatggagtcatgttgtatatgtatcaagacgggaggcatttcatttctctgggaaatggaaatttcatggactgtgttaaatactacatttgatcagtactagcttgagataagaatagtaggaatctggttgaggggatggcgcttatatacagtgattacatcacaggcgctgaataattcttcataga

SEQ ID NO: 7417 - DNA, 1102 bp, Homo sapiens
attagaataaaatttaaccttttaaaatcatctctggttcttttctgaagaacataatctgacacaaaaatgacatcagtgttaatctctatgtctgcttccattccttatattctcttttgtttttggcgggcgtgtgtagttttaataagattaaatgtaaggataccattaagaatgctaagtatcttcatgagagcttctgcttgaccacttgctaggcatctgggtcccttcgtgatatgaatggagtttggagggcacagcatcactcatttgcttttggacctggggtgtgcagttgaatgggggtactcatcaatttctcctttaaaacaaattttacaactgtctttatttattgcttctttggcctatggagctaaaagcctgcaagcagcggggaagtaagttagaaattttactgagtgaaaaatctttggtggtgtgtggattaaccttcaggggaagtctgttaggagctgatggttttcttacctgtgaatactactgctagaactagacatttagagcttgcactacggagaaagatacattttcatttttaactttgaccttcaggtgcctttgcatattttcattgcaggcagtcttaaagatttttgttgtgagctgtgtgattaaatacgacaatggaaggaatacatgctttatactataactctctttattcccacccatctgtacgtcatttgcttttgaaattttgttctttatttctacgttccatctatgttccatgagctgtgcaactgctattctttaaaaaatactggttatgaaattgcattaacattttcatcctacaatgtgtttttttcactgcctgtgtcctacaagcctgcttttagaaattgaatcacttttataagtcatttttaattttgaaattttatgatctagctatttaatctatttctatccaggactttcccagttaccttcaacatggtcttgaaatggccctaaaaaattcccgtcttcagtgttcaaacattttgcccggtggttgtatgttttcttcccaccgctgaggcctgggtatatgtgccctatagtatttttgtgacttctgtagata

SEQ ID NO: 7418 - DNA, 1036 bp, Homo sapiens
aggccgagggtcccataggcttctgaatttcttaaaatatttcatgttttcatttggaagtgagatggagagggtaagggagttgtggcttttttcaaagttatttgaaatactcacctttgtgtccagtattttgtggctgactaccttttccaactgttttagggaacattttgctcatactttgtgtggaaagtttcttgctagaggctgtattttcatttgagagttaacatgtggttaatattttatcctgaggaagagtatttcaatcggtgtgaatacttaaatcatcttgccacctctttggtcttccttattaagtcagtgttgctgtgaataaagaggccagctagtctgtggagagcatgtgatttatcccatcaagaaagatgtaatgagctcttagaagaatctgctttccatgcagtgccggggataaggactgtggactatttcactgtgcagttgctacaagccattgttccttccctctaaataatgagtggcattgtttttgtaaatgatatttccccctaaacaattaacataggtagacttagtataaaaaccaggtccggacaagtttccaaaagagattctcacctgattagggaaaggggaagaaagtaataaagggaacctattgcattggcatcattagcttccttttcttttgattttttaaatggagaccttgcaatgtttcttaccccttgggtttattatttctgtttggtttagttgcttagcatgtttgctatctttccaatacccccgatacacacaaccacttgtaagagatgctttcttagttatgtctttgtcatctcgcttttctttctattagaagggtgagatgttttgtctaagtttaggaaattatttttataaacatttttgaagtatttttcaaggttccccaacccccttttttttccctgatagtaatacagcttgctctttgcatatgtacggtaatgaagggtatatagaagcagggaaatgccatcaggcttctgtgtccatgggttct

SEQ ID NO: 7419 - DNA, 1289 bp, Homo sapiens
agtggtgcaatctcagctcactacaacttctacctcccaggttcaagcattctcctgcctcagcctcccaagtagctgggtctactggcactagccatcacacctggctggttgtttaatttttttagaaacggggtcttgctgtgttgcccaggccagtctcaaacttttggacttgggtgttcctcccatctcagcgtcccaaaggctggaattacagacatgagccaccatgcccagcctgttgttttaaatgacatgctactatcattgtagaaaatttggcgaacttatagaacaaaataaaattattcataactccagaacccagcaacaaccagtatttacacacacacacacacacacacacacacacacaagttggagtcatgctatgttcatatatttgcatcctgattatttcaacattatttttcgtacaatagggattttccctggtgtgaattttattatcaatattttaatgagtgtaaaacatttcattgtagattgtattctgttttctctcaattttggacatccatgctctttctctttttttcacattttaagtatcagtgttgtgagacatccttaaatataatatttatcttaaaaattgttaaatattcagcaatctttttacttccatggagcagtatttaatgtaaccagatgcccatactttcccataggaaaagccttgatctacatacatatttttagatgaagtgatattcgcatatgatatacttaaatagtaatgtgtaatgaattagtattttgaattttcgttggctttactcttcaaatactaatcttgctgtctgcgttttatgctgtttgtattttagtctgagagctcatatataaatatgattagatggcattttattttcagttataaaaagcctcctcatcttttcaatattcagaaggaaggaaagcatacttgctgcttaggtacaaagcattcaatttatttatttctgttaagcccaggagagcttacctatggtctcatgctttaagatgttataaattcttatgagtctgtagtggttcaggttttctgtataaaattgtagaaataaattagttgtgcattcatagccctctgatttagtgatctctagtggttaaaataagttaacattcttaaataactcatctacatagttaagtggtttatattcttccaagttaaatgagcagagtaaattattttagaataatgttaccaatcaattaaaatcttgtttctaagcaggaaagttgtattctgatat

SEQ ID NO: 7420 - DNA, 1042 bp, Homo sapiens
gaatggaacatcctggagggattattggccttccagttcaaacgattcttctgcctcctgcctcagcctccctagtagctgagactacaggcatgcaccaccacgcccaactaatttttgtatttttagtagagacagggtttcaccatcttggccaggctggtctagaactcctgacatcacatgatcttcccacttcagcctcccaaagttctgagattacaggcttgaaccattgcgcccagctgtagatatttgtctttggaagaaagactttgtaaacctccttagaaagcttttagtggggcgggcaagcggcggggccatgcgcatggcatgctgggctgtgggcgctggctgctgggaacccggcagaacatggccgtgcatgtgtgctgaagggagaggtggccacagagatagcgtgttcctcatgatcaagtgccactgcatcaccatcttcacagatgccagggtgtctagcatggtgtttgagttgaagtgcatcgtcgagggcatcctcagcagctgtacagggatgaccagctcttggatgttggcaagacgctgggagagtgtagcttcaccagccaaagtgcatggccacagccccggccacagcggtgctgggcttccaggcggacgacggccttgaggccctgcacatcccatggttaggaagccccaggacacaggaagcagtgctcacgagcaagccgtgcacagagggcactctgcgtgtccgtgagaggcccacttcccccagtaaaagagatttagatgtcgggggcaaaaaaaaaagggttttagtaccatgaagattcatttgcatcccagtgcctgtggtcccagctgctcaggaggcaggggtgggaggatcccttctgcctgggaggttgaggctgcagtgagcccagattgcatcactgcactccagcctgggtgacagagcgagactctgtctcaaaaaataaataaataaaaataaataaataaaataaaaataaaaaattcatgtgcaagatgaaaagcccagctctga

SEQ ID NO: 7421 - DNA, 1079 bp, Homo sapiens
ccactgtctaagtccattcaggctgcttcaacagaataccttagactgggtggctgataaacaaccaaacctcatttctcatgtcctacaggctgcgagtgcaagatcaaggtgccagcagttttggtgtctagtgaaggcttgccttctcatagatctttacttctcaatatgtctttacatggtgggaggagcaaacaagctctattgggtcattttaataagggcactaatccaagtcatgaggacacagcttcccacaaggccccacatcctataccatcaccttggggattaggatttccactcttgagttttggtagacacaacattcattccataccactagggtaatgtcctgatgccaaggtctttaccttaatcacatgtatgatgtaaggtaacatggcaggttctagggattaagatgtagacatctttttttttttggcggggaggagggtgggagggcattattttgcctaccacattttacatgcatttaaatatttacggtagtgtgaaaataacgcactttacaaatacatcgtcttccatgataatatgaaatgagcatctgacctagtgatattaatgggctgatcattttgatttcagtattttgggaaggaaagtaatgaacagtaatgatctagtgagtgtattcacccattcttacattgctataaagaaatacctgggactggggtaactttcattggctcactgttctgcaggctttctaggaagcatgccattggcatctgcttggcatctagggaagcctctggaagcttataatcatggtgaaagttgaagggggaggaggcacgtcacatgacgaaagcaggagcaagtcgggcagaggggggtgccacacacacacttttaaatgatcagatatcctgagaactcattgtcatgaagacagcaccaaaccatgaaggaatcgtccccaggattcagacacctcccaccaggccccacctccagcattggggattacagttcaacatgaaatttgggcagggggcaagtatccaagccatatcagtgagtatttctttgagaccattttt

SEQ ID NO: 7422 - DNA, 1074 bp, Homo sapiens
gttgttaatttaaagagttactattgagggattctcttatttatcatttgttaatgcaggcatttctggatacacgtaaacatatgaattgtcaagctaaattgttcacagattagaacactatgctgttgacccctgtttccacgttactccctcttagatatgttggaaggttggcagagtggcaaggctggaacatatacccataggtgaggtactgctctaatatcacaaaccatggggctagagcctgagacgggtttgaggtcaagtttcctggtactgtgtacgagaaagtctatccacactttgccattcttggcttagccagtaggaacattcgctagtctttaatgtgctcatggtattttagtgttcttttctaagttttaggtcttttttatcagacagtatatacccttcttaatatgctgatgaagcgtggaattaatctcacatgcataacatttaaagttttccagtggcaagcttaagattcttgttctgtagcgagtttttattggtatagtttgtattactatgattacaaaacatcattggttcaaatatatccttttgcttactcgtccagttaaacactagctctatttaaatgagtttttaatgaaccatgctagcaagtaaggctcagagaatgattaaggatttagtattgtctctgtgtcattaaagtaaattcagtcatcagaaagcttacaaattgatttttagttccctttttgttgtgtctacgtaataattagttactacatcatcgcatttgcttctgagattattcatcttgcccatttgccagtcttaccatgttctctttgagggaacactgcatgtgttcatgataaaatcacaactcgtgccacttcctccagtttggagtcaacctatctgtatgtgattagcccatttctgaattattttgttctgtcttactgtgctatcctactttttattaatacttaagcagtagtgttatgtagttgtaacctcatgggtggataccagtgtaacagtggcactcatgatagagagtagagcaagaggggtttatattat

SEQ ID NO: 7423 - DNA, 1061 bp, Homo sapiens
gcctcctgagaagctgagattacaggcatgcaccatcatgcttggctaatttttgtattttttagtagagacatggttttgccatgttggccaggctagtcttgaattcctgacctcaagtgatcccccaacctcggcctcccaaagtgctaggattacaggtgtgagccaccatgcctggccctaaattaggatgatactaatgatagcaacaacaacatcaaccaccgtccctactgttctgcagccgctggaccttgggctcacttgctttgtgcctgtgattttgttcactgtctgcatatacaggcacatttgctcataatgacctcagaagtttatggcaacttcctgtggttggcattgtagccctcttcatttattagacgaacagaaactgaggcactgagagctcatgtgacccattcaatgtcacccactagtcagtgaaaatgtgtggatttgaatctttgtcttctgacctccagggctgccccctcaaatttctcctgccgctcttcagcctgagaggcacgcccgtcctttggagtggaactcacctctttccattgacttgacccagacagactcctcctgtctgcatttccacagcattcacattccttctgggtctttttttttttttgagatggagtctcgctctgtcacccaggctggagtgcagtggcacaatctctgctcactgcaagctctgcctcccaggttcatgccattctcctgcctcagcctcccgagtagctgggactacaggcgcccgccaccatgcccggctaattttttccttctgggtcttaagacctcctcacactgatacttgttgccttacaagtagacctgcctccaaaagttaacccgttggctatgtggaaattgaagtgcagcctttcatggaaatgggggtgtttattatctcttgccgacgtactgaatgctttctagagctgaaatatttttgccaacagatagaattgcaaaggactgttttgccatttctagtggatgtagatgtttagggcaaatggtgttaatccaaggagtaa

SEQ ID NO: 7424 - DNA, 1066 bp, Homo sapiens
aatgttggactatgaggtccatcaaaatttaagactttcaaaggaaaaaattatttaaaatagggttttgtacattaattaaataagactgtactgtgggtactctttaaaggcaaccacccaagttctgttgaaacacatacccataatccccacagagctcttctttcagaggatttctcatgggaacaagttctactgctagtagttgaattatctatgttatcacaattgtatgaagaaacatattggatcaagatttctactgtttgcgaaaatatcggctacaaacacacagaaatgcaactgtcgagctctgagttacctgttggttgcagttttgttctcctgctgcagcccactctctggaaatgctggggcagccactgtttgatttgtttggacctggctgatgtaaggtctaagaatggatatacctggattattcctgtccaagtagttgaaagtggactgcttttttagagtgctgaacaggaattgaatttgggacgtgatagagaccaaagaaagacttgtaggaagtgaatgtcatttttgttcaaagtatttgcaaaactaaagccaataaaaggctgccttctcggtggcccttttatttagttcctggctttttccttggaatcagagaaaagtatggcaagtttccccacagaagagagtggaatgtcaaggaagattgttcataaaccacattcattgagtgactgctgtgtttagggtgacattttaatgccagctggtagttaattgcatgctattttatttttttttctgttatcttaaaatatccttcatacgtgaccacgctattttatttattagtttattttattttgagacagagtcttgctctgttgcccaggctgcagtgcagtggtgcaatcttggctcactgcaacctctgctgcctgggttcaagtgattcttgtgcctcgacctcctgagtagctgggactacagtcatgtaccaccatgcctggcttttttttgtgtgtgtgtgtgtttttagtagagttagggttttgccacattgcccaggctagtc

SEQ ID NO: 7425 - DNA, 1028 bp, Homo sapiens
atctctactaaaaatacgaaaattagctggacttggtggcacatgcctgtaatcccagctgctcaggaggctaaggcagaagaatcacttgaacccaggagacagaggttgcactgagccaatatcataccattgcactccatcctgggtgacatagcaagactccatctcaaaaaaaaaaaaaaaattagcaggcgtggtggcgtgcacctatattcacagctacttgggaggctgaggcaggagaatcgcttgaacccgggaggtggaggttgcagtgagccgagatcgtgccactgcagtccagcctggtgagagtgcgagactctgtcttaaaacaaataaacagacaaacatgggatataggattcatgaaatgtttcattagctcttatgcagtgatatgtacatacttcttttcagcctgtgacttcaaccttattttcaggcttttagataatcaaaaaaagtattcatttttgcccacattcaaaatattacatttataatccgagtaactgaaagaatgatgatacaaaatatggttgtatgtagaagaatgaatgattgtagtgttatggttagtatagagttaactgatattcatggaattagaaaaatggatttgttttttaaaatcaataaataaggtcaggtggggtggcttatgcttgtaatcccagcactttgggagatcaaggttgaagaattgcttaaaggcgggagtttgagaccagtctaggcaacaaaggtagacacctgtcactacaaaatataaaaattagccaggcgtggtgacacatgcctgtagtcccagctacttgggaggctgttgtgggaatatggtttgaggccacgagtttgaggctgcagtgatctgtactgcatctgtgatggagccactgtactccagcccaggtgacagagtgagacactgtacttagaattaaaaaaaaaaaattaaaataatcagttttaataagttaaaaaggccatatttctctcttcctctcctctctccagataat

SEQ ID NO: 7426 - DNA, 1055 bp, Homo sapiens
ggcaggagaatggcatgaacccgggaggcagagcttgcagtgagccgagatcatgccactgcactctagcctgggcaacagagcaagactctgtctccaaaaaaatatatatatatagtcacgtgtaacacagtgttatatttaagcattgcaaatttactttgtgaataatttctccctcataatttaaaaatatttaaaaatcaaacccaaattaaatatccactgtaaattatcctatagtaaatgtcctgtggtaacatgaacatttcctccccaaaccctcattattctgttgaatgattttgcgtttctctacaatttccacatgttgatgtttgaaccttaatgcaatacaatttttctcatgttgtatttggctaatgttgtctgctgtctgcttactcaggagagtgccacagtgatttgcttctgaaggaaaataaagttatttcttagatttgtaaaatacagttcatctggcattaaatattttttaatacttttacttagcatgaacaggactttggaaaatttgatgagtttagatttgaatatcaataaccttagtgagtgtttatttttagatggttttgttaacatttttatttggagataataatatatactgaaaatgtaattaagtctctaccagttgaagtgtttcatattcagtattattagaaaagtgaagagtaggaattgagcaattaacatttgagtgcatcttttttacaattgaggaaattgaagttcagagaggttaatttgccctgaagtcaaacagccagcaagttctggagcaggactttagctcttctttaactgcagcatctctgttctttagcttggaaatcgctgcgtctgagaacaggggaggtcacgccacatggtctgccaccccacagctgcaagagtgtgtaaatcattattcttaagactcagaattttgtttcttatgaaaatgaatataatctctgtagtctttgtaaaaattaaacccctatgatttttatatcttatttctataaattccatgaaataaaatttgtagc

SEQ ID NO: 7427 - DNA, 1085 bp, Homo sapiens
ttcaagggaggagtttgggaaggattggcacaattaagataattaaaatcatttgcttttgattgtttaaagtaatgatttttaacccataagtccagtgtcccctttttataatcaatattttgtaaatcttttggtatcctacaataaaattcttagaaaatataacctaactgaaaatacaaataaatgaataataagtaaatagaaaaaagaaagtacctgaattcttatagaatatactatattaatttataatattaacattataggatgtattgtattataggctaatttgctctcaaaagataaatacaaagggcataacttataataaaaatatcaatccaatatataaatgctcaagcatgactaaactggaaacaaatgccttcacaatgtcaaaacacctcccactgggtggcagagctcctcttgacaaactcttggttgaatacttcacagtggcattgtatgaagagtgtgtgcatgaagcaagtatagttcggtacttggaggctgattctctgtgtgtgtgtgtgtgtgtgtgtgtgtgtgtgtgtgtgtgtgtgtgtgtttttgtttgtttgtttgtttgtttgtttttgagacggagtctcgttctctcacccaggctggagtgcagtggcatgatctcggcttactgcaacctctgcctcccaggttcaagcaattcttctgcctcagcctccttagtagttggtactacaggtgcctgccgccaggcctggttaattttattttttgtcttttggtagagatggtgttttaccatgttgcccaggctgatcttgaactgctgagctcaggcaatccacccaccttggcctcccaaagtgctaggattacaggcatgagccactgcacctgctcgattctgtgtattcttacttagcgaagactgtaatacattcttgaaattcttacctatttttaagagacagggtcttactctgttgcctaggctggagtgcagtggtgtgatcatggttcactacagcctcaacctcctgggctcaggtgatcctccaacctcagcctcttgagtagctgggactacagac

SEQ ID NO: 7428 - DNA, 1066 bp, Homo sapiens
tgctcctgtaacttaggagatatgaaatatgagttcatgtgtcaggcctggggtttcttattacacagaagctaaccctatcctaaggggtgtgctctttatgtgcagaaataggagataggagccaaattatttctgtgtctaccaaatttttccaatttgaggaaaatagataaagcctactcccttgtgattatgtcccaagagtttaaaatcaaattaaaatttggtgttgaaatctcaatttcctttaaataagatgacttaaaaattaatagtcactggtcttaattatgaataatgcattatcatgtaatattaagcctcacataagatataatacgataaaaattctgggatgttgaatctggtttaagaatttgtgcattctcagaattttgttttactttcattaagaaacagtacatttaaggccaggcatgatggcttatgtttgtaatcccagcactttgggaggttgaggcaggaggattgcttgagcccaggcatgagctatgattgggccactgcagtccagcctgggtgacggagtaggaccctgtctctttaaggggggagcaggggaggggaggagaaccatttcagtaatcttttctactttatgaatgtgttcataataaagactcctgtggaaactgttctggataaaattattagtgcaagtagtgccagaatagcagatatttctgcatggctgcttaggaacttagtttttgctgacaattttgaaaatgtttcttattccaaagtgcttagaggacctccaggcttatgattgttctttcccaagagtattttttgagggacagggagaaggagctcctatatcttggttccgtggttctctgtctaaagggaacactgccgtaaatacttgagtcatactttaataaagcccatagaagagtgaattgggcttaactccctcatttttcatttgaggaaactaaactgcctgagtgaggcctgaaagccgtttttgatgattttcaggcgtatgcactgggatgggtcactattttggagtcatgtaactttggatttt

SEQ ID NO: 7429 - DNA, 1064 bp, Homo sapiens
aaaaaagaaagaaaaagaaaaaaaaagaaaaattagaaaaagtggtgagccttagtactagaaatagtaaagaattagcaggtgaagtttagcagattttttttaaattaacattgttagtttaatttcagttcctaatagattgatgaaataaacattaacaagaatgtgtaaacatctgtaagttaatgggtgcaggactaaagcattttaagtagtaatcatcatacaaaaacctgattgctttccttgatagctctatggaattacttaattttaaaaaggctatagatgttaaatatcacgattttcgagtaagtgattttttgaaatcttattcaccaaactaaccgaattggataaagaaatgtcaagtgtgtaataaactgtccaagagttagtggcaattgaaaacatatcaagttgaagagaaccacaggataatgtgtatcttttcttttaatgatctagaagaattagctaagcaatatattaaatctacagatgatcatgaatgaggtgttttctttttgttttttatgagtgttactgagaatgaagcagtagggtcaaacatgcaagtttaataaaatggcaaaagatgaaaaaaaagtctttgcaaaaagctaactaatgtttctggggatggataaatccctaggaacaagagaggggaagacctaatgagcctgggaaaacctaatgagcctaaagtgttttattccatgtaacgaaaacatatcaaacagtaatcttgggtgactagcctatttttttgtctgcccagttagcttaattgacagccatcattagatggcattatgattgggcaaaccaggaacttctgcagtaatggaagttttcaaaaaaaggtttgtctctcaactgaaaaataatagacaaacatcacagagacgcttaaaaattgattgagtcaggtaacgtttgttttcatgtgaattattaggaaactccgctcgattagttggacaccatgtacctctctttttcaaggtactgtacacaggagcttgagaagagatgaaatggggccaagaaactag

SEQ ID NO: 7430 - DNA, 1053 bp, Homo sapiens
acagtcatattctgaggtactgggtgttaggacttcaacgtgacattttgggggatacagttcaacctataatagtactacacttttttaagtgattgtggggagctcttgataaatgaatttaagggtacactctggctctgtttaaccaagttcttacattgatttttatagagcaaaatatttcacttctactcattactatgtaatctcacaggctggttgagttttggaccatttgtcatgtatcttccacatatcttctatgtctctctctctctatgtatacatagtagaaagagagagagacagggtatcactatgctgtccaggctggaccaaatgaaccttctgtcttggcctcccaaagtactgggattataggcatgagccatggagcctgtgctactttgtattttaatgtagaactattctcaatagagcagtacccctcagactttgaggttatattaatgtcctacagatcttgattcagtaggtcttgggtggaacttgagatcatgcatttctagcatgttctccagctgatactgatgctgccagccctcagaccatagcttgaggaatagagtcaggagtggctgcacaatttgcaggttcagtgtttcagaaccactcagtgtagcaaagccaaacactaacgggattgcagcaagagaaagtgagacatttattgcgtggccccaagcaaggagaatcgggcagcccatgtttaaaaccccaactccctgatggcttacaggtagggatttttaaaggcaaggaggcagaggtcacaggtatggtaataaattcatacatggaggttgtacatggttttgacctatacaggtgggctttcttgaagcgccgggtgattaaacgtgataggtagattttaaaattttcagatttgcagttggttaaggaagagaagctttgtttaaatatttggggtcaccagaaaagaatgttagctgtggcttgtatcacctcagatagactttacagcaaagaacaagaagagctgtcagaggcccgccctcagttttc

SEQ ID NO: 7431 - DNA, 2283 bp, Homo sapiens
aatgtagtcacattttatagtagacttaagttctagttttaagtaaattttttttatttttacattttcaaatgacttttaacaaatactctgaatgaatactcagtaaatacttaggccattaatattttgcaatggaaatttctattgtagtttcagttcatgaatctttgctccttaccccatcccacaagaaagacttaaacattcaatgagaggcaaatttgacttcttcaaagccggaatggaagaagggagacagaatgtcacaaactgtagtctgaacttgacattgtgatattcttagagaatgtttttacttttaagccttaaaaagtattcatgttcttgaactgtggaactccagtctcaagtttggttgtttggcaagtaaattaagactaatcattataacagtcctttgctacatgtctactgtagctgagctctgtcctgtgtgttttagacattaccgtatttagaaagagaatgactccaaggtgctacatggagaaactaaagagagtcacatggccaagatgtaccacactggagatgccaaaacttggttaaaagccctcatctgactgactttatttatttttattttattttatttttttgagacagggtctcacacttttgcccagcctggagtgcagtggtatgatgtttgctatagccttgagctctctgggcacaagtgatcctctcacctcaccctctcaagtagctgagactacgggcatgagccatcatacctggctaatttttgtatattttgtagagttgaggtctcaccatgttgcacaggctggttgacttattttgaagccgattttctttttgtcgtcctcctctaccttcaggacttttcaggtagtataatcctgtcgtcgtaattcctggcatcacttactccattcttgaggttttctggtctcttgcatagccaggtgagagctgagttgaaaagctttttatacaggcttcatggatatgtatactggtataagtgcatcacacagttaataaaaatattggagaagaccatttagttcacttctttataacagcagtgcctgtacacactttcctcaagactttctggtagttggaaatatgagtttaaaagtaatagtcattaaattaagtggaaactgtgggtcatttcaaagacattgtttttacaaattgattatacacatactaggtccttccaagagcatgcttaggttgaacagaaagtcttactaacaaaacacgtgccctgtgctctgtattgtcctcagggcatatgattgactattacagtaataaacccttgctttctctgaggtgcaaaaagaagctatagtctgagtgcttgggagaggcataagtcataattgtaggctgtaataaatgcaaatctatgaaaaatgggttagcttcaaacagctgagtcgcagagtcttgcaaaaccatgccccattattcctctctggagcccagatcatagaagaattatccatcttttttaacagtgggatttctaaggcttctcagaaatctccggtctcttggtttccagcaagagaacaatatcgagtcttaaatgacagaaatgaattcctaaataagttgaactttttcaagtttttaccaaatttaaataataatgctcatatgaatggtagctcatgtcttccctgtgcaggtggtactgaactaacattctaaatttgaaatggcaggctctctgttcccctgtctgggtaatctctgataaaacattaatcatctcaaggttctattcaagtccattgatggaaattgtgaaatgtaatttagcttgaggaattgaattaatgttttctaatagccctgagatattcactgatttataggtttgaatgctgggaggtgcatttgtgtttctctgtgtgtgcgtgagctcatcctagttaatctaaataggtgtttagaaatgatgcacattctatatcataaaaatatgtattatctctgtgactggtgaatattggtatggtttatttgtgtctgtcatggaacttatacattgctttatacacctggtataaattcgtgctcaactgagaaatatttgttgaattttaaaaatcctttaaatgtatatgcatatatatgtagacatggaatcacagatgtatatatttagttctaatgttttattttcaagcaggtgcagaatttatctgatttgattacttacactatgtgcctctgttgtgcaaatactagttttctcatcctttgttt

SEQ ID NO: 7432 - DNA, 1029 bp, Homo sapiens
actcttccctcgatttaaaaaaatattttttttcattctcatattgtcaagagagtgctctgaaaagttacagtgtaacagtaattgaatattctatttatttttgcctttgaatactaagatatataagtcaagggtggactattccttgtcataaagctgaaagtttaatttcaaactgacatctgctgccagttctgtgtttcagtattttatttatatttaaaattccaccttccctatatttgtaatatcatttttttgtggtaattgtgtctttgtgttcttcctttcagtaggtgttatttattaggctcacttttattctgcgggcaacttcagagatcccttgttcctcagaacatgctagaattccttctcttcttcagtgtcctaagtagatgatatgaatgtgcataattaactacgttctgcagttctcagctcaggaatacttttcagctcttacagatagacacttaggcgtaacagttgttacttatgagctcattttaaaagtagataaatgtctgaattttcaaagacaaagggtttcagagttcttgatagtttcttatagaggtgggtttagagcctgtgagaaagccactacttcagaatcttaacaaatagtaattgacacccagtggcaaaaatcagaatccgcttttctttcaacagcagatatttaaggcttaattgctgactgaaagtgcagttcgccctcctgcttctggagacagtgatgcccccagcccagctcactggacaatcagccagggtcaaggtgtggtccccatacccagagacgtcatcttctcctcttccgatctccacgtgtaccccagcttaccccagcttcatcttccctatgcacagaaaattaggataattctaagaattgtttttcttggaaacaatgttttcaatatggcaaagtgaaaattgtttttctaaacaagatattggctggatgtggtggcttacgcctgtggtcccagctacttgggaggctgagatgggaggatc

SEQ ID NO: 7433 - DNA, 1090 bp, Homo sapiens
cagtagagtgagatttgtcaatatctttgttgcttatagttcgacaaagtacacttcttttttttataattttaatcttgaaaaatttctttcacataaaggaacaatctctatacaagtaattaggaaacgtcttacagataaaagataattttgcctgagtttcataaacatctcatttcacagtaaattccaggaattgcaattttttcccgcttctggggattaaactagtgagtttcaaatgatgtctccatagctgaaaattttaagcacacataaaaagtccaagggcccatgtagaatgacagaatggaaataagttgtatttctttatcattgcaataaactttgctatcattttttaatgatatttaatgaatttcaaatgtagtcggaaactgaaggattccatagtgccacagggattggagaaacaagctgtgcttagggcaagcttgaatggttctcaactcttaggagcttacctgaaatgaatctgtgactcgatacctgtggggtgggccgctctataatgagttttctgaattaacttccatgtgaaaaataatgttcactaaagcataaataactagttacatttgtgtcatgtaacctaatatgctaatttgaattttatttacttatttattcatgaatgaatgaacgacgggttctcactttgtcatccaaggtagagtgcagtggcgcacttatagctcactgcagccttgaactcctggactcaagatcctcctgccttagccttttgagtagctgggaccacaggcccctgccactatacttggtgctaatttttgcttttttttttttttttctttgtagagataagagtcttgctgtgttgcccaggctggtctcaaactcctggccctcaggcgtgatccttctcctgcctttgcctcccaaagcattaggattacaagggtgagccgctgtgcctggccttgaattttaaattgaaattaaaatttaggcttggcacaatggctcacgcctgtaatgcgtgcactttgggagaccgatgcaggaggattgcttgagttcaggagtttgagactagcctggg

SEQ ID NO: 7434 - DNA, 1309 bp, Homo sapiens
tttttctttttgctgtgagtaccacatgcaaatttaatgttttctggtacagtttttctgttttcattctgtgctcattttctgcctcctctgatccttctactccctgtctaatatgttgggatgaatattatggcctcacgtactattacttgcctctggttctaaagatcatggcaaagaaatgagtcgtttggagttcctaatcaaggttctagtctgcatattgaactctgattgacttggaaacccctttgcccaaacaaaagatgaaatgttccatcctgaattcagcatctcttgttcaatgtgttccgtgactgtttgtcttcctcttcacattattttggaacaaattaggcagaagagacaatctttgcagattgaatttaggcaagttaataatgtcattgggcaaagaacattaacccctggggctcttggaatgtatcaagtcttctgtgccaagggcagatgccatcagggacagagatgagctcttaagggacacaaggacacaacttaacaccagagctgcggagcaccaggcaggtggttctgatttaaacttgcagcccaccaaggcactattgcttcattctgggacattttgacaacctgtcagccaggggtaattttctaagcaccacatttatttttctggtatactccctcatgtctgttaattttgacagctgtccactgctccaggacttgactgtactttcttctttcccttaatcgctctctaccaaactatcactccaaaggatagaacataattacattttgaaatttcaaaaccacagcactattatgtgtcaactattgttaactatctataataacttttaagtactaatgatgttacatacacatttgacattttttggacctcagttttgctttctgttaattgtgtgcctacgtgggcagtagaggcctttaaaaaaaattcaagaggatatatagtgaaggcttgagaagtttttacatgtctatgaacctatgtaactttcacgcacatgaagatacagaacactttctgtatccagaaggctcgcctgtggccttcccagtcaatatcctgcccgatgttcacaccatagattatacatatgtacattatacattctctcattgctggctgcttttctcatattacatctgtgagattcatctgtgttgttgagtgtaacagtagtccatcttgtgcagtattttgtcgtatgatttttccacaattttcttttttactccattctagtgctgatggacatttaagagtattttcattttggggctgttt

SEQ ID NO: 7435 - DNA, 1047 bp, Homo sapiens
ctttaaagttttcgttggtccttccacagactgcagactgagctcacaggagtgtgtccatgatgcaaacagaagtatcttataggtgccaaaggatggacttaccttttcctgccttttaccaacatatttgcaacagaaaaaggatcatgtgaacagatatcacctagggtagctgtcatttggaatttgtgtaattattagaatttgtacaaaacacagaatatccctttttttaaatccattcattctacatttgcactcttttccctcccactatcccaggaagttacttaattattcagtggctcttctagctgttatgcattaagaattcctattgttggcacaaaatccatcatttaagcctcatcttgaggaggttgtcatcttcttatttctgatatgtctgtgaaatactgcattttttagcatatttgtgtgtaccctggagggttgtttgcaaatacatattgcctgtgttgtgcatttatctgtaaaatgccggaatttcttacacttttaatgggtcttgagtaatgactttgtgggtgggatagggtgaagctctgtcagtttcgaaatctgtaaggtgaagaaaacttggtactagttttccaggaacttagatgggcccccaaagattaagatttgtgctgaaacacatttctcaacgtggcctctcatcttatgcatctatctacaaatctggacagctacttacatgctcatgctccagctgtgtttggctgtctttttttttttttttttttttaagacagagtctctctctgtcaccaggctggagtgcagtggtgtgatctcggctcactacagcctccacctcctgggttcaagcgattctcctgcctcagcttcctgagtagctgggactacaggcgtgcaccaccatgcccagctaatttttgtatttttagtagagatggggtttcacaatgttggcaggatggtctcgatctcttgaccttgtgatctgcccgccttggcctcccaaagtgctgggattacaggcgtgagccaccatgc

SEQ ID NO: 7436 - DNA, 2615 bp, Homo sapiens
agaataaactggcccttattctgcctcactcaaggtgcatgattttcatctatttttgggactgagtttggaatgcatcgttaacatagaccggtttcaactctgctaaactgttcaaagactagaatattttcagcaactaggtattttttaaaaaggaaaagaaagcaacttactttttctgtcattgcatgaatgtatttccctgggagctgcttactttctaaaatcattaagagctgaaaatttcaaactcccccccacctctccccatcaccacacaccaccctttacagacataaataggtcttgtatattttcagtaatcaaaagctgtgggtacttctaattgttctattgcatatcaaactttataaaacttagagtatacctactagttaatcatacatacacaatgtttagcagtttaattttgctcagaaacaataaagattataaactgaaataaaacaaaatgctgtcagcaaccacattatatatatatttcaaaaaaggaaactcctaatctgtctagcgtattctaggaactccatatttcacccacgatcatactggctcctgagaattttcctcacactgattcttggttacaggcatgcttatttttccttctttgattaactcaggtccacacgtaaccctttttgggttactgggtcatcttcctaactgctctaagcctagatttctgtttaatattagagtattctgttcccataatgtccgaccaattcttgatgagtactggcatttttaaattttttaaacagtgacagaatgtagtgacagtttttctttgtatgtatcagagcatttcttatgataatagctgtatcggtggcctcctaatcaagagcattcagcaactttcacgttccctggatggtttgctaggtacctggattattgattggaacttcaggagagtttaatgactctcatccttcttgccacatgccctagccgatatatttaatattacttccagtcgttgccaatagaatgcactttaaatagtgtaggaatatactaccagagattagagtagatgtggatgaatctatcatgaataaccagagcttcaataaaaggcccctttggtataaaattctgaactttgaaacagttggcctccgcctaagttttggtatatttccactagctagaaatttcactactcttaataaaaataattctgcagaaggtttcccagcctttctgacggtaatgtcaaatgatttttctcgtctcatagtttattgcctagcactttgtaacattctgctaatttctgctggttttaaaaacacgatcaagagagtgaagtaagaggctgggcgcactttgggaggttgaagtgggagaattgcttgaggccaggagtttgagaccagcctgcacaacaggttttttgttttgtctcgacaaaacaaaagataaaaataacaggacatggtggctagatagccctagctactatggaggctgagacgggaggatcactggagtccaggagttcaggaatacagcgagctatgattgtgcccctgcactccagtctgggtgacaaagggagaccttgtctctaaacaaacaaaaagagggaagtaagtactcaagacctcgatctcttcttacgctccttaaccaactggctctgtatctcaggagtgtggtatacttctaagagcaggtttcagtatccacacagtcttgacagtattgagattggtggtgtttgccttgcattgtttgaaatttccatttttacaaaacctgccctacagactttctcatgctaaattattggagcttatatttatctactggtgataattttggcctgcttttgacagaggaatcttattttaatgttgtgtgaatattaattaattttagactcataattaattgacaaaaataactgagttgaaaatgtacctggggattctaaattttaaatagaattgttagttttaaagatgtctatgccattgctttagaggaaatactgacttgagtccaaaattagtcgaattatgaatgacttattcattcctggaatcttaggattgtaaagattttttaaatgttctgggccttttgatgcatctgttaacaggggttatctagtcagttgagagaaaatctgaagatgcccaaggtcctcatattggttggtgcagtatttgcgtatcacctatttctactctcctgtagactgtagatgatctctagattacttgtaatacctaatacaatataaatgctatgtaaattgttgctataccctgttagttttaaaaatttgtaggctgggtgcggtggctcatgcctgtaatcctagcactttgggaggccaaggcgggtggatcacctgaggtcaggagttcgagaccagcttggccaacatggagaaagcccatctctactaaaaatacaaaattaggcgagcgtggtggcaggcacctgtaatcccagctactcgggaggctgaagcaggagaactgcttgaacctgggaggtggaggttgcagtgagccaagatcgggccattgcactccagcctgggtgacagagtgagattccgtctc

SEQ ID NO: 7437 - DNA, 1806 bp, Homo sapiens
tttcagagagtgggtagtaattaagtaagagttaatgattttaccattgggctactggtatgtatttatgatacatagctctattattcctacaagatatacttcgtaattgcacagatgttgttgaactccaatttcaagccataaaagtgttttggggctgctttctttttatatatctttgtaattcactagcaagccctaagaaaggtgatactaaaagctgaatcaaaaagaaagcaggtggtcagtgtgtgtgtatgtgcacacaggttaatcaggaggggaatttgcttttttgatttgttgttcactttgctatgttttaaatgtatttttataaaagtgcaaagatacacttattttaatgctttaaaataacttgaaatgattgagcaatcgtaggctagttctgagcatgcctttaaattcaggaaaaaagggttactttgtatgttggactttaggtagaaatatttattaatatttgtactgtttgtagctttggttgatttatggtcacctatgtaggtttaggttttgtacactgtggataattatatatgttaactttttaaaagattaatttttattgaagatacagagaaacagtaactagcattatttatttgattggctgttcaacttactttatcacctcttcagctgttttccagtccacaattgctcaattatttcacaggcaagtaagttataccttcatattttcccaaaatgagaataatgatatccatcttgcagcattgctatgatgactagcaacagtggtttttattcattgtgtctggtactatataccagcattaagaagctttctgcagccattagctcataaaacctcactatagccctctagggtaagaattgttgccccagttttccagataaggaaattaatcatcaaggttcacatggctttgccaaagttgggtgaaattcctaaggagctgagctaggactgtgcatgtagagcaccagacattgtgcctctcacacgattgtcatcttacacgtccatatcgatcctttggaaaaagtaggtaaagagctactttttattttttctttttcctaagtgttttttaaccttccgttgtattaggctttaaaaacaaaatggttgtcctcttcctaaagaataatttctctctgatagggaaaatgtgtgtatatttcaatattttggtggtatatttggaataggatttgttaaaattgtttttaattattattatttttcatattaaacacagctttcaaacacttaggcataaacatacaattaaatacacacatttctagcctatggttatgtttctgtataggttatatactgcatgaacagatgcatactacatttcagtgtctttattagaaatgtatcacagctgggcacggtggctcacgcctgtaatccgagcactttgggaggccgaggcgggcggatcacgaggtgaggggatcgagaccatcctggctaacacggtgaaaccccgtctctactaaaaatacaaaaaatcagctgggcgtggtggcgggtgcctgtagtcccagctactcggggcgggggggtagggggggcgctgaggcaggggaatggtgtgaacctgggaggcggagcttgcagtgaaccgagattgcgccactgcactccagcctgggcgacagagcaagactccgcctcaaaaaaaaaaaaaaaaaaaagaaagaaatgtatcacatttatttcccatcttcatgtacgtggatgaaaataaattcagcagtttttagctctctcccgtc

SEQ ID NO: 7438 - DNA, 1032 bp, Homo sapiens
catataaattttaggattttttttccatttctgtgaagaatgtccttggtgtctagataaggatgcattcgatctgtagatcactttgggcaataggaaatgtacttaatttttatttagaaagttaagcaaaaatatcaaccagtattaaaaatgttttaaatatgtgttagacatttagacatctttaaaatcttttaaatatatgtagacatttatatttaaaacatttaaaaatacatgtctatgtttagttatgtttatgcctgcatgatttaaagaaagaaatgatctgggtccaatgagataacttgttaataaactgtttatcattcataatcagccttgttaccctagaataggacacttattttaatgtctgacttggtttcttttaaatttatggcttttatttctttttttcccttaatcttctgactactcattgttagagaacttcttgatattttcaattagtttccagagcttctgctctggttagctgtttttttagcgccaactctgaaataatttcccaggttcctggtccttcctctgagagatttagtccttcatcccatgtagcggagcaaaaggagagaggtcattggcctcacattacttttctatgttggttgacttaatattattacttttcccaagaaggaatacatttttacagtaggaaaactttttttttcttttcttgaatttagctgtttgcctttgaaagctagatcaagcatacaaacacatgtatgtatgagtatacatgttctcatgtttccctgtttataaacttttcctataaggatagcctaggtagtacattcttaatgtttgctatagttttatatcttgaataagttagttcaggaaaagatttgctgacaatagatgataaattcgtagcttgtgatgcaacatcattttaaaaagcaagtttaaaaattaaagttattagaaaaagatgcaaaatggtttctccacattcaccctagttggtttctcccataaactgagaatcttgga

SEQ ID NO: 7439 - DNA, 1025 bp, Homo sapiens
tccaggaatggtgaatttggaccttataaatgggatctgggatcacaaatgggcgtgggtttcactgctttggctaccagtggaggagtaggagtcatatcttggttgtcagggaggtgggtgatgtcttctgaataaattggtggcatttgggagcaagaacacagaataaccaaggggaggtgagattataccacatgccagtggttgatgatctgggcatatatggcatgggtgattatttgaacaatatctatattttatgcttatttttaactccatgagagtggggtctctgaggaggaggtggtggtggtgtgtgtgttctttatatcccaggtgcctggcctcaaggtatttgttgagtgaatgcatgaagggatgaaccttcataagggttcattctgctattatattatgcagaaacagagagaggtaagcttattttatacaatatcagggagaaggctggagagccagtgtcaggaacagtttcctgaagtcagagctctcaaacattgaggttggctgcctgtggaggaagggagttcaggtaaagggtgagcagtagaaatattgtagaggacattcaaagatttttaactggtagttaaaccagatgatcctaaaatgctatttatattctgagactccattaaatatttgagcacctactgtttccataacaatgtgagcatcacagcagacagattcagcagtgtgagaaacgagatgactacccatgctggagtattccaatctcatggtggtggtggtaaaataaaaattaaaaaagaaaaaagttggcaaataacattataattctatacaataaaatgcaggatatttaagctatttattcattcaataaatatttgaatgccaataaacttcataagtgtcagcatcaccattgtagttgaagagagaacaacacaattttttaggagaaggtggagttgagctacaccgtaaagactttatgggactgtgggccgggcatgatggctcacatctgtaatccc

SEQ ID NO: 7440 - DNA, 1092 bp, Homo sapiens
acatgcaaaatgtataaatctgaacaaattcgtttcttcagaataaatgatgatcttggacttatgttcctggaatgttttccaaattgagttttataattatctttttttctgcatatttctaatagatgtgtaatattgccctgtttaaggaattctattctttaacaaggaatgttgtcagatgtaatataagcttgatttaagtaaaataatgtaatcgatggcaggtataggaatggccacctttatgagtgctggttcttctactgaattttaagatatgtgaaaactaaataatgattaaataaatgattgatagtcacgtattgattgataactctttttcttcaacttacatggactgttacaacctctgagcaccatggtttgggaatttactttatcaaaatacattttatgtgaaataatgtttggatacacaatcttttttcagttttggtactatgaagttggtttaataagaaaagaatctgacatttaaaaaattgtaaaatctgcacatgatgtaattgcatttgtgtttattgaagtagtttgttataaaaacttgtagagaacaataacaatatccatgctcctttagaaagtgtagtgtgtaaataatcagtgtagtgatttttttaaaaggtgtcaaggtagcagtgctctttctttcagtttgtgcagtaaactgtggggtttgggttctgtcttaggggtttccaggcgtgttcttgaaatgctaggaatgtacaaatacgtcatgttccagtgttaaaagttggaaactaggccgggcgcggtggcttgcctgtacaaccggcaccttgggaggccgagcgtgggtggatcacttgaggtcaggagtttgagaccagcctggccaatgtggcaaaaccctgtctctactaaaaatacaaaaattagccgggcgtggtggcacatacctgtaatcccagctaatcagaaggctgaaacacgagagccacttaaacctgggaggtggagtttcagtgagcctgggtgacagagactcttccctcccctcaaagaaacccccaaaacaacaacaaaaaaaacccccaaaaa

SEQ ID NO: 7441 - DNA, 1940 bp, Homo sapiens
tgcttctcactgggacagcattgagcattggcgattcttgggacagaggatatattgcctgcaaagcctaaaatccatactctgtggccctttacagaagcatgtgctgagccttcacctaaattgtagcaggaattcaataaatgttgactgaatggacgtattagagatttcccaatcaggttttacttaatatgtacacagagtcactggtccctggcatttgactacttgaatactctgtagtaaagacacagcagagtatgtgcttgagcttatttcttgtggatggatcatcccatcccgttattactaaatgaaaatcttgtctaagctcctgtgcagtatctctcaacaggaaaagggaataatttggggagagaagttgccagagtttggaaagtattcccacgtagcatgggtgaacatcctgcatttattgtgaattggttccttcatcatggctgtgcaaatcccaggagagtggggcagattagggcacaacgtgtaaactcagcacctcttctgcctgggctttagagcagaaagcagactctgtccaccaagagggcttgcagcaactttggactcttcatgaagctgatgaggcaacctgtgtgtacccacctctgcccatcatttcttcctggaatcagtaatcttcccacataacactttaaactatttcagtcagagggcttatgtatggtctgttagttttgaagggacgtcataacaaagtaccaagaactggatggcttgacacacagaaactcattgtctcacagttctggaggctggaattctggcatcaaggctttggcagggtcacacccccctccccaaaggctctagagaagaacctgctccatgcctgttcctggcttcggaagcccaggtgttcctggccttgcaggtgcatcagtccagccctgcaccttcacctggccttctccctgtgtgtctgcacagcatcttccctttgcgtcttgtctgcctctgtgttcacacttcccctttttataaggacgttagtcatctcggattagggctcaccctaatgacctcattttaacttaattaatccaataaagatccgatctccaagtaaggtcacattctgacatactggagtttaggacttcacatatttttttgtcgggagaggggaacacaattcagttcataatagatgggcagctgggcacggtggctcatgcctgtaatcccagcacttcgggaggtcatggcaggagaattgcttgagctcaggagttcaagcctgagcaacaaagtgagatcccatctctgtttaaaacaaaaattgaaaattatcttgttgtggtggcacatgcctgtggtcccagctacttgggaggctaaggcaggaggatcccctgagccaaggaggtcaaggctgcagggctgcagtgagctgtgtttgtgccactgcactctaacctcagtgatagaataagaccccatctccaaaaaaaaaaaaaagatgggtatctcagatcaatataattcaaaagaatatttggctttgaaagtggagtcttataaaaatatagccaggcgaagatgacgtgtcatcctctgagcctagaaagtctggaacacgatcgcctgggcttatgcatgtgcctaggtgtgggtcgtggtggttatgacatttcactttggatgtgcacattccatcactcatatctttggctgcagttagaaggaagggagtgttttttgaaagcttgccctgaaattatagtatgtgcaactgtgttagatttgagtgtcataaccatgttcttcttgtgtgttttgtcagttccttggctaattttcagatgtttgcatccaaatatgagttagggctctcaaagcagtcagcattttcttctttattttacattttagtcataacagatataatatatgcc

SEQ ID NO: 7442 - DNA, 1049 bp, Homo sapiens
ggcagggttgcatgagcccaggagtttgaggctgtagtgaaatatgattgcgccactgcactccagcctggagaccccttgtttcaataaataaataaataaataaataaataaataaataaatctgtttacagaaatcactatgtgtgtttgctcctcctagcacagccttggaggataagatgccaggtgcagtggctcatgcctgtaatcccagcactttgggaggccaaggtgggaggatcgcttgagctcaggagtttgagacaccaacatggtgaaacgctgactccacaaaaaatacaaaaattagccaggcatggtggcttgtgcatgtagtccccagttactccaggaggttgaggtgggaggatcacttgagcccaggaagcggaggttgcagtgagctgagattgtgccactgcactccagcctgtgtaatagaggaagaccctgtctccggaagaaaaaaaaaaaaaaaaagagagagagggaggataagggtggactaggatgctctggtcgggacttgtggccatagttggtcatgggtgtttggaggttgggaacctggatgtgaaaagctgcattcctgcaggaggagtctctgccacatctgggcagggtgttttgaccattgtttaaacttccttgaaatcaggcaaggcctggtcgtggatgcagaagggaatctgtttttccagttttggtgatcaagggtccagctccatgccgagtaagtgcaggcccacaaggagttgaaatgctttacgtttctaaactccaggagtaccattgctatgtcggtgattttagatcactttctccatttcctctctccctccctcttctagtttgataggccctaagtttaggcagcctgtgtaggggctacacgttttcatcagtaatacaggccgtgtttcgctgaccacagttggggacagctgcatgtattctttgtgtgttttgttttgttatacattagatacttagataaatatctacatatatgaaatatacttaatatctatgcatattctatctgt

SEQ ID NO: 7443 - DNA, 1025 bp, Homo sapiens
ggccactggagctctgttaagccaacgggaagtaaagacactccaaccatgcattagaaaaatcacaatcggaatgataattgattccttctgtttgaatctattggagtgttacagatgctttgatgaaggtaagacttgctgggtttatcctctagagctgtacgctactaatgctttgtatttatgtataatcagtataataagcttttgactgcataagattcttattttcaaaatatacatttttagctaccccatttctaatttctctcaaaagcagcatttctgatttgtatctacctggtacagatgccagaggagctggtgttggcagtattatctgtgtttacctacatcgaactgttcataccttcttctgagatactgttcttctctggtctgtcttttgccagccccttaaaaccaaagttaattcctttgtcctacatgggactgatttgcttaggagaaaagtgatgccccactgtcccctggctaatggcgtgtgaaggttgtggtggcctccttagcgcagaggatggggctggattctgggagtacttcttaggattagggatgggggtgatctagggaatggaattgctgaagtcagcagggagtccactgctgaggtcctctttttgagacacggtcttgctttgtagcccaggctggagtgtagtggcgcaatctcggctcactgcaatctccgcctcttgggtccaagcaattctggtgcctcagcctctcaagtagctgggattacaggtgcctgccaccacacctggctaatttttgtatttttagtagagatggaatttcgccatgttggccaggctgatctcaaaagcctcccccttccaaagtgctgggattacaggcgtgagccactctgcctggcctcaggctaatatttctaattaaacatcaatacgagagacctaaaaatggacaactttgtcacttaaaaaacccaaaacatccacctattaagacctcagcggcggctggacatggtgctc

SEQ ID NO: 7444 - DNA, 1031 bp, Homo sapiens
gtcatctattcctgccattgtgtagcttcctgggtctgttactgattaccttttgaataagaaagggacaggtcagaggactcaggctggaactagacaggtcaatgtagttgagtatggaataggggttaaaatggacgctaatggccttctacttaaaactctcaaaactagagaaaggaaaagtgaagccacagtgaaatgtcacctccctcttgttagaatagctgttatccagaagaccccacaaaatgaccagtattgtgaggatgtggagaaaaaggaaccctcatacactgttggtgggaatgtaaattaatacagacattatggaaaacagcatggaagttcttcaaaaacctaaaaatagaacttaccatatggtccagcaatcctacttctgggtgtttacctgaaagatttgaaatcaatatgtcgaagagatgtctccacacccgtgtttgttgcagcgccgttcactgtagctaagatacggcaccagcctacgttggacggatggataaatggtctgtatacacagtgcagtactagtcagtcataaaacaggaagaacttctgtcatctgtgacaacgtgtatggaactagagaacattgtgttaggtgaaataagccaaacacagaaagacaaatactgcctgttttcacggatacgcagaatctgaaaccattaaactcacagaagcaaagaggaatgggggttagaggttgggaggttagcggttgggaggggggttggggagatcgtaaccaaagggcacaaagcctgggttacataggaggcataggtttgatttatttcttattcttttttttggagctctgttacatggtgtagtgaatgtagctaataattgagttccgtacattttaatactgctgagagtaaatttcatatgttctcatcataaaaaatgttgaatatttgaggggatggaaatgttagttaacttgatttattcattccacattgtattaaacaataacatcacttttgtacctcaatgataac

SEQ ID NO: 7445 - DNA, 1060 bp, Homo sapiens
tccagatgctgggatgcagtagtgaatggagacaaagcccctgtcctcatgggcttagactccagcttatgacttgttgtttataataaataatgaacattgtgaggttattcacaggaagggatgaataatggatggatcttcaaaacgtgattctggttaactacagacatcctgaagttccaggtataaaaagccttctttaaagcatactatagcagtcagaatgaatgagtagttaataaagctctttgctgaaataaaagcaaatatgttcacacttccaaaaaataaatacccaagtgggagttgtatggttctgatgtcaaacatgttatgagaccatcagaggtatatggaaatttggggaggaagacagtaattatataaaagtgcatgcaagcctgggcaatatagggagaccctgtcagcctgcaaaaaaataatgataataaaaaatcgtagctgaaggtggtggcatatacctgtgggtcccagctgcttgggaggctaaggtagaatcactaaggagaatcacttggggcagggaagtggtggctgcagtgagctatgattgtgctattgcactccagcctgggcgacagaacgagaccttgtctcacgcacacgaaaagcaattactgaattagagatgtgatgtgggaaacgctcccatctaagtaatgaccaagaatattccgtgatagagatgaagtcttagcaggacttccctctcaggttattagtggtgatgatcctgctttgttttattaccttattactattatgctctctgaggtatgaagtgatattaatctgtttgcagtgagaaataacactttatagcattgctatcatttaaacatattaaaatatgttgtaatgcagaaaaacaccctggggagagaggtgaaaacttaggagtttaatttgaaatgcagttgggaaattatttggacagcagagaaagctttagggcaaaatttcagtaataaagtatattattttctaaattattcatcagggagttgagtttgtttttcatgtacctggacttaat

SEQ ID NO: 7446 - DNA, 1074 bp, Homo sapiens
ttttagtgttcttttgtgctttctgacctaagtgctggcaatgtgtaccttcatgtgtgaattgattatgaagacaatttctaagagcaatcctcaagactcagtttttgtctggctttctgtaatcattgaagcaacttaaaaaaaaatgtccacttcatctttagagttctccccctgcccaggcacacaggtctcactgcacaccctattcgtcaccccacaagatgcatgtgctgtctttggcttagcagttcacatgcaaatacaaatacagtcacgtgcagcataaaagcatttcagtcagtgatggaccacataaaccacaatggtcccgtcagattataatggaactgagaagttcctattgtctagtgacgtcgtagtgtcgacctgcagtgcagtccttaggtgtctttggtgatgctgctgtgaagaaacctactgtgctgtggttgtataaacgtctagcacatacagttgtgcacggtgcatggtgcttgatcatgacaatctttgactctgttactggcttatgtatttactgtactttttattgttattttagagagtcatccttctttaaaaaaaagcccgttgtaaaacagcttcaggcagggccttcaggaggtttccagaagatggcagctccatgtgtgctgtcacctctgaagcccttccagtgggacagaggtgctggtggaagacagtgatgttgatgatcctgaccctgtgtaggtctaggctaatgtgtgtgtgtgtgtgtcttagtttttcccaacaatgtttacaaagtaaaaaaccataatttaaaaatggaaaaaagtttataggataaggatagaaaggaaatatttttgtacagttgtccaatgtgtgtgtgtttaagccaagtgttattatgagtcaaaaagttgaaaaaattaaaagtatataaagtaaaaaagttacagtaatctaagtttaatttattgtggaagaaagaatctttagaaaatgtagtgtagcctaagcatgcagtgtttctaaagtttacagtggtgtacactcatgcctttggcctcgacactcact

SEQ ID NO: 7447 - DNA, 1090 bp, Homo sapiens
gtaaaacttgatggccgccgatgtgttgctgaagtaatcagttgtaaaatgaggaggtagaaatgtattcttgtcttttctgggaggttcaggtacacacaacttcaggttgatgatgatccaagttccttccctgtttgtgtcttaaaaacaagattgaaagcataaacaaaaccaacaacaaagttctttgatcaagggaagggattgcaactgttcacggatggaattggattggaccctgaattcttacagcttgatttgactttgtcatttagtgtaggatttcttaaccatggtttcactaggtgcttatagatactctaaaacatgcacacactcatacatcccaccccatagatgcccagaaaccactcaggactcgctgaatcagaatctccagtggtagtgggatggggttggggctagtcaggtaccctcacttcctcccgcaaaggtcccaaagtgaatccagcctaaacattgccaggtgaagaaactgaagtctagagcaccaggcgatatgaagataatagaactgtttagtgacagatttgagaaagaagccagtggcatttgagcatatgccctgtgctcaccccagtaagaaatcagaagcatagtggtgcagatcacctgcctgagagccagcggcggcctggcgagccggtgtgcacgcgctggctggtattggtgtcagctttcgtgaaggcgtcccttgtgttttgaggcttctcaagttctgaggaagcacctgcagctgcacagaggtgcgtgtgcatggagttgggaggctagccgccaaatgctgctcagattcccaggccagagagatggtctttatacgtgataagagcacggataagccacctgctttggggtcaaaattaaaaagtcaatatacaagtctttaacctggttactaataaagaatctctcagccctgctaacataacctgtgactttgttcgtgttagccattttctggttatctaactttgaatgaccttttcactataaatcttttagacacataggtgtagctttgtcaaagagtactatatttttattcttcctagtagaattttac

SEQ ID NO: 7448 - DNA, 1030 bp, Homo sapiens
gactatgcagaaagtaataccagaaatgaatgaggaaattcagagactgcctaaaagtattgttgctgattctgttggcagaatcttttctcttccctttcgaaaaatcatagtttaaaactgcttgaacctgagggtggtggcctaagtgttggtatttgccagttgagaatttaagaatgagtgccttgtattgtcattaagaattccataatattgtttatagaagtagggtgttgacctagagatctctgccaaaacctaatttgtctaattaaattccgccgagcatttctaacttccttccctaaacgacttctaattgcgtgtcgttccagtggtagtgatgataatgatgatgttctgcccttgtaaacatgcctttaaattattaagttctaagctggcaggtaaaatggaattacttttcatcttaaagatgagatgtggccttttgggggatgtgtgtggatggggacattgcgggtagacgaagaatcaggtagacttcttgtacaaaattcctggatcatttgtttattgtgggaaggagcactgctaagaaagacagactttttccccctcaagcaggaaccatcctctcttcagagcgttttgtttccctgctaggagccaggatgtgacatttaagcagccatataaatttcagttttgtgcatcactttgaggtaaggtttccgtagaaaacataagttttaaaattgttttgtgtgcgcttctttggggagggagatgtagttggaataagagtataatacctctgagatttgtcaagagaattgagaccatgctttttccctgctgctgttgagttatggaggcggaggcttgggtgcgttcaagatggggcatcactcgttacctgtggcctgccttggtggctgaggagggcattgctgctggcggtgtgatggttgttaacactgctttacaagcggtgctgaagaccactctcgtccatgatggcccagcacatgagattcgcggagccgccagagccttagacaag

SEQ ID NO: 7449 - DNA, 1029 bp, Homo sapiens
ccaggctggagtgcagtgacgtgatcctagctcagtgcagcctccaacacccgggctcaaatgagcctcctgcctcagcctcccaaaagtgcttagattacaggtgtgagtcactgcacctggcctgaggatttaaaaacaagcgagcaaacaaaccaggctatcctagatatttgtgttatgaaatgagtttctgtaggtaatcagtttcacttatttttttatttctatgaatttatagagagcatggtatatacttggcacccagagatagttgtaagaaatacattgtttattttctgtgtgttagaatttgaggattctcaatacattattaaggcaacctccacctcccgggttcaagcagttcttctgccccagcctcctgagtagctgggattacaggcgtgcactaccacgcaagaattctgaagttccttgcgtctgaatgtgtgctatactgcttgacttaatttcttacaaaagattgtcaagagatacttcttttcaagggcacagtcgaatgatgaccgtccactatcaggcattttgttatcagcacttgtgggtagtgtcaacagggatctcttggctgctgggaacttgaggttgagatgacactgcagttgcatttctgtaacagcatccttttctttcatctagccctcacatatttattgagcatctgttccattctaggcaggacttgagagattgaagtaaatagagaacacttgtccttagggatctgttgtaaaatggggagatgaaaatgttggcggggtgctggtagctcatgcctataatctcagcactttgggaggccaaagtgggaggtctgcttgagcccaggagtttgagggcagcctgggcaacatagtgagaccttgtcttacttaaaaaaaaaaaaaaaaaaaaaaaaaaaaaaaatatatatatatatatatatatatatatatatatatataaaatacatacgtaaaatacatatataaaatataaaaatctaattatatacatgtatattat

SEQ ID NO: 7450 - DNA, 1083 bp, Homo sapiens
ataagacatattaaatgagggagggcttcacatactacatttgtaacaattgtagttcacacttaaggaattcaagtaaattatgtgttagtgaaaagcagtgatacctgaaataactaaggtgttcttatttcaagtaagtagtattttagttattactaaacatgtgaaattaatttgagttcagtgttttacatgcaaaaatgggatgagttgcagggtggggatcccagaaatgtgtttaatttccattaggatgtggcatcatatgattactacctcgaattttaaaatgattgcagaaaggccgggcatggtggctcacctctgtaatcccagcagtttgggaggctgaggcaggtggatcatttgaggtcaggaggtcaagaccagcctggccaacatggtgaaaccctgcttctactaaaaatacaaaaattagccaggtttggtcatgcgcgcctgtcgtcccagttacttgagaggctgaggcatgagaatcgtgtagggccaggaggcggaggttgtagtgagccgagattgccccactgcactccagcctgggcgacaaagtgagactccgtctccaaaaaaaaaaaaaagattgcgggaatcacgtgcattaagttgttaactcccttagaatgtttaagccaccggtttactctgagttttttcctttgtgcacatgtggcttaatttccgtaagtaaacatgaattatgatatctgcctagggtgttacatggtgaccagcgtactgttttttgctgatcaggtaggtgagttgttgaattccttgccttccttcaggtgaagtggatgtagcccaggagaacatgcttttaatgcaggcatcttaatctttccatcttggggaaatatacattttaaagaagcagtgttttctgaaggcataccttatcataaatcctacttacagaaaacagtataatgaaaaacttatgaaatgtgttttctgttgtcttaatcaaaaggaataatttagttattcataaatacataccctactgtcttctgatgaatacttgagattaagattaaatggaataaattaaaacct

SEQ ID NO: 7451 - DNA, 1050 bp, Homo sapiens
tgtgaatttgtaacattattaaaaacttattttttatggaggggaagaggcagtattttaaatgatagcaaaagaaaattaaagtcaagtactaaattacccctaattttcctcattatcctttaattattaacgttcagggcacagcactgaggaagttttctgttagtgcctatacagttctcacttccaggatttacccaaatttgttcaaatggtactattatattaccctggccccttggagtaggtttgattttctaaggtgtagaatactctagatctctttgagtgtaaaaaggtactttgttttgtttgtcctttctctgtgtttctggaacagtgatgtcgtgtttactcttagcatctcagtctcagttttctcaattgacattttgccaaattaggaaaaactgaaacagtttaatgttatcttcaccaccatttagagcagctgtcatgcgtttgtgtacgtgaactttcctgatggacaagctgtattttgtgtgaatctctgtctggtttggtctttgtcatttattatttgaggaccttcccttcgttctcaacagtgggcctaggccactcctgtttattccctgtgggtagtacagcaaatttagaaatgtggataatttttccaaatttatcacagaataaaaatacttgggattcagttcctgcgcaggccagtcacctgagactgattgtaaggggcgtaaacaaagatttcagagccaggcgccatggctcaggcctgtaatcccagcactttgggaggccaaagcgggtggatcacttgagcccagaagtttgagagcagcctgggcaacctaacgagactgtttctacaaaaaatactacaattagctgagtgtggtggtgctggcctgtagtctgagctactcaaaggctgaggtgggaggatcgcattgagcctgtgaggttgaggctgcagtgagccatgatcacgctgctctactcaagcttgggcaacagagtgagaccctgtctcaaaaaaaaaaaaaaaaaaaaaaaaaagatttcagg

SEQ ID NO: 7452 - DNA, 1049 bp, Homo sapiens
tttccatttgtttatatcatatctggtttctttgagcagtgtttttaaattctcattgtagagatctttcgtttctttggttagctgtattcctaggcatgttattctttttgtggctattgggaatgggattgtgtttctgatttggctcttagtttggatgttgttggtgtgtaggaatgctactgatttttatacattggttttgcatcctgaaactttgctgaagttgtttatcagatcaaggagcttttgggcagagactgtggggttttctaggtatagaaccatatcatctgcaaacagggagagtttgacttcctctcttcctatttgggtgccacctcacctcttgagtagttgggactataggcatactgcacgatgcctggctaatttatgtaaacatttttgtagagacagggtctcattgtgttgccaaggcttgtctcaaactcgtgggctcaagtgctcctcctgcctcgacctcccaaagtgctgggactacaggcatgagccactgcgctcggctgtgttttgatgtatggattcatgtacagtctcgttgtacttgctgtggacacttagatgactatggagacagctgctgtgctcacctgtacgcttttccctttggcactctctgtactctgagcagctgagatgagcacgcctgtttctccaccacgtttcctttttacttttacagacgcaggttttccctcggggttctgccatccttctttacaccttgactttgtgcctttccatagagctagcgaggcgtggcttataacatgttttctgggatatgcctggccctggtgcatggcttggaataacctgttgtggaagtttggttgttgcacaagtaggatttatggggctgtacgatctcaatgcttctgagaatgctgaactcaatggactcatttatgctcagcataatgtagtaaggcctgaagggttatgcagtaccaattactgtttccatttgtccccttgcactccagctgacattagatgccctcagagtttatgtttggagc

SEQ ID NO: 7453 - DNA, 1028 bp, Homo sapiens
gttacatcgtgaggtcagaagatggtaagatcacccagatattcactctgcttcctactggggctccttctcattcctggccctctccccaccggcctgctcttctttccctcagctgtgagctgggtgcacacagctgttgtgtcttgttcacacctatattcctgacagttagcatcatgcctggctgagagttggtgcatatcttaaatgttttcttgaaatttcaagtaagacaaaaaatatcaaataccaaatagtgtataaatttggaagattagattcactgttgcacctgtcatggtggaatttgtcccatgtggctcctgtgggtcaggaatacattgtatcaaaaaatgcagatcctggctaacaaggtgaaaccccgtctctattaaaaatacaaaaaattagccggctgtggtggcgggtgcctgtagtcccagatactcaggaggctgaggcaggagaatggcgtgaacctgggaggtggagcttgcagtgagctgagatcacaccactgcactccaacctgggcaacagagctagtcttaaaaaaaaaaaaaaaaaaaaaaaagcagaagttttctgccgacttatgttctgatgctatttttcttggtgccgtttctccttcttgggcttttgagtgagccaggcttagggtaactctgaaatccttttctgcagtccacatgaagagtaccatctttcatttattgtgtggctcaattccaacactcaaggcaactacagagatttatgaagaatttaaacaggtgctctttttccaccagagtattagaaagcgatgaattaacgtatcaatctttcaatgtcttcctcttctcccttcttcttcgtccttcttttttttgtttctttttttttttcttctccctctctttctcagtctctctctcttgctgttacttcctatgtaaaaatagcacaactccttgtgaggaaaaattggaaaatgcagaaacatacaaaggaattaatcacctgacatcctgctattgctg

SEQ ID NO: 7454 - DNA, 1074 bp, Homo sapiens
gaaacacttggagccaccagggtgtgcaaactactttttgcagataagcaaaaatacaaattcttcagacacataatatatgctgtttgcttattagaatatttctgtagattgcattgggggttaataagtataataagtatttcatatattgggcaataggaaatctagtatgctttagagaaatcagtattacttatgcagtacatattgcaggtttgtgcagttcctatcataatagagtatcagcatcagagccaaagggaagagtgtgtatgagtcactccatcataaaaggagcagtgactcaataccaaacttagggtgctgtctgaatttttaatcagttgcagtattgttgatatgaggttgattcctttttatgggcaggaagttatcacggtttaaaatgtctaattcccttttggtgatgctaacttgctatattcagtgtttctgttctttcgtataggatccaaactactggatacaggtgcatcgcttggaacatggagatggaggaatactagaccttgatgacattctttgtgatgtagcagacgataaagacagagtgagttcaggtcctggggaacctgttctgaatgcattttttttttttgaggactagggagcgggtgcgattcttttcctttctgttttagacacatactttaaattatgtgtgggccacccactctagtatattttcttttataataagtatcatgaatcttcactgtcctgaataccaaggtataatgattttcttgatacctgggacttaacactaggttttggggttttaaaactacacttttacaatggaaatatcacaaaaagatttctatgccatattctgccttaatttaaccaaacataacatctttcttcacaactcgggcctgtccttatcatctccgtgtatacaacatgcagccattctgcattctggtcccagcgttggccctgagaagatccatcccaaccgtggccttggcggtgcaccgtgctcctgtgcagtgggcgagtgtgtcccaggcagcctaccctgtgcagggcctggccctcagg

SEQ ID NO: 7455 - DNA, 1053 bp, Homo sapiens
tgcatgatgctgaggtttggggtacgattgattccatcacccaggtagtgagcatagtacccaataccttttcaaccatctcctcaccctcccttctccatctagtagtccccagtgtttattgttgccatctttatgtccatgtgtacccccttaaaaaaggccttttatcttgggtgttgcgacagtgtctcccttcctaatgtgtcaccttggcaaacttcttggaagaatcagtgtgtcctaaagggaaaatgtggatttccaggttagcgtctgagcctaagctatgcttgactgtgacattatgtggtgttgatctcaggcaagtcaagtgtcctattccttagtctcttcttctacaaaatacagttgaaaacattgatcttgcaggattgtcacatggaaaagcaggtgtcatgtcagaagtgctctgtaatcagagtgagggtgaaggaatggaatggattaggaggtgggcgcagcaccaggtgcctgctttcatggtgctgatggttgtgaagcttgcagatacagatttgagttctggagcagaatatcctgtagctacgtccacactgtggtttagggacttaggcttggattattccatattcactaccttccctcagtaaagccttctgttttctgtctaccagttcatcaggtaacaatactacccactgttcgtacccttccacactcttagatccatcgggactagagtgaggagaactgggttggccaaggtgagttttggcttgccctcttttttctggggtatgagtaagatatttatcggggcttaagctcacttcttctgcctaagattcctggccagtcacactggggacccacctctgcaggtgaggacgaaggtattcatattgcaagttgggttcgttttcattgcaagggaagagtgtctggatgtcttctttccccacatctgaaatgtttcctggaatgtaaactagaataatcacacagcatttcttgagccagctctgagggacaggataaagggtgaatgggggcgttgatcctgacatg

SEQ ID NO: 7456 - DNA, 1046 bp, Homo sapiens
tatcatactgaactcagtagtttaggatgcattcctaagtttagggaaagctgtgaggatcttttgattcattctagaacattccaaagcaccactgaggttgcacaaggtggttcatagcaataggaccgtgatgcttatagggcaagaggaggggatatcacaggacctctgggacagagggaagcactgaggccttctgcaactctgcaacaaagttcctgtgatcccctgccctcgcctctctcccagcactcctgggatttcagcattttaattaatataagtcaggtggacgcttatcttgctggattcctcagtagtacttgatatggttgatcccttcctcatttcttgaacagccctctggtgcggtcattctttaacataaactttttattttaaaataactttagatttattaaaaactgcaaagatagtagagagagtgtacccctcacctcatcctctttgctaatgtcttacatcactgtgatgcatttgtcaaaatgaaccaacgttgactttaactaaacttcagaatttatttgctgttcaccagtttttcagttagtgtcctctttctatgccaggatccagtccagagggctacattgcatttagttgtcaacttcattttatgtaataaaaactttacctacatttcagtggttggtaattttgtttaaggaggtgatcccttaaacaaaacggagaaagtgagttactttctgctagctgaagtgttactttacatccatttgtaaatttttgttcagatatatcaatcattaccatttactgaacacccccatttgtgcttgttctggttttatgttttatgctacaatgtgctctaaacattttagaaataaaattagcagtactttgtgtgaagtggcaataggcttcctccccttgaccccttctgtccccttattttgagacagggtcttactctgtcacccatcctccccctgacctcttctgccctgtttttttaagacagggtctcactctgtcacctaggctggagtgcagtgcgg

SEQ ID NO: 7457 - DNA, 1049 bp, Homo sapiens
ccgaagctcctgctttcagtgaaggagcctgtggtaggaacatagggtctgcagtttcagatgttgtggcctgctgtgccttgttggtgattgtagattcttcacgatcaatatggagaaggctgcctgcattgtctcccttcttcttttgaaaaattagtttttacagataattgcaaacaatgcaaaattaaggaatgcaatctctttttgacgttttactccctagtagtgactggtattaaaaagcctccacgcagtacaggatgtgggtagatcaaccctggattggttggttgggatgtgattcattagatcatctatgagattctctgttttttaggtcagagtaattgccattgatcttatgatgcagttctgcttccaggacacttaatgaacacggaaactgaaaagtaaagaacttggcctgtagggtctgtgagacgggaccacccctgggagccgtgttgtgtagaggccatccagccaaggactgcaaacgtggagatctgttgtggcagtggattggattaatctctattaatcagtctattaatctgttgatctctagctgaacaatctcttttgttgaattgttgcattatgatatttatcgtgactactgagattttggtcccccccttacattggtgtcagaggcaagtgcctctgatctcatcccagttcctgtccttgtaaactctgtgattgtttgtagtttgtcattaaaaatagttatcaaaggcaagtaatttggaggtttaattgagtggaggaaacttggaagaaccaagtttcagtagcatgtagctatcacgtgaattttcatcctcccaaggttgtgctggggagattgagacaaaagaagtacaaacaccttgaaaactaaataggcagttcctgtgccaggcaatgggatgggattgtctcattgcttctgagtattgtcgctgaacctgattattatgaatttaccttattgttatattgtacattttaagaaatttttaggtattttatattctaatgcttgcaaaatctggaat

SEQ ID NO: 7458 - DNA, 1032 bp, Homo sapiens
ctacttgaagagtttgctacagggggtttgattccagacttcagggcaagtctgttctgtctgaggtgtggagtgcttacagaggagcgaggggtgggaggggaggatgtggaggtgactgagaacagagcttcctttcctttctttttctttttctttttttgagacagagtcttgctctgttgcccaggctggagtgcagtggcctgatcttggctcactgcaacctgcaacctccgcctcccgggctcaatcgattcttgtgcctcagcctcccgagtagctgggattacaggcgcacgccaccacacccagctaattttggtatttttagtagagacagggttttgccgtgttggacaggctggttttgaactcctgacctcaagtgatctgcctgcctcaccctcccaaagtgctgggattacaggcgtgagccaccacgcctggccaagagcagagctttctaagtgatgcagcatggaggggttccggtggctgagatgtggattgcagcccttgatggctggctgacctagacacctcctcccgcattttctgctttttccatgatgttccggacagcaaagtggcttgtcatggtggtaacccccacgtccattcctgtgctccctctctgctccatggctgcctgggtttaggtctccttggttaggaaactgtcgtgtgaccatgcccagctacaaggggagcctggaccagtgagtacaagatttttacttttccagccgctgtaggcaaagaaaggcagggagagagagccttaggagtggatgctgagtcagccagttgcagtgtctgccccagaaccatcctataaaagccattttcaaactttattcattgtatgtgaacatgtttcaacatctttcacaagtggcttttaaatcgttgttagtcatggaagctttgattagatgaactcttgtgagggaacctggcatggtgggcataccacgacaccagctctcagagactcagatggagggagccaggctgggtgtcgtggaa

SEQ ID NO: 7459 - DNA, 1051 bp, Homo sapiens
ctgtaatcccagcaactcaggaggccgaggcaggagaatcacttgaacccggggggcggaggttgcaatgagccaagatcgtgccactgcactccagcctgagcaacagagtgagactccatctcaaaaaaaaaaaaaaattgttatgtcattaccaagaataatccaaattaacattaaaaatgcattaacatttataaaacttaattagttcagagaagaaataaggctccctgcccctaactcctcactcctctcctgtaaatgtaaacatgtaaattgtgccttctgtgttgctttcctgtcctctatagtcttagggtgtgtgtgtgtgtgtgtgtgtgtgtgtgtgtgtgtgtgtgtgtgtgtttgaaagagagaaagaggatgtaactgtaatggtactacaaatgtgtctgtagctttctagaaatggaatttcttgatcattttattttaaaaataatcactcttttctgcttttgcttgaaatgtcctattttccatagattaatatatgtttgaccttttctgaattagatatactgttttatttgtttttttctcttcttctgttttcaatcccaaactggttttaattctaaaaaggtacttccatatcgttttttgttttcataatttttgcgaattttctgcttttattttccaagcttatgactttgactcattttgccaaagtggacccatcccatgaaaacaacacaaattctgttaatttttaaattgagactgcgggttttgtgtgtgtgtgtgtgtgtgtgtgtgtgtgtgtgtgtgtgtactttttttgagagggggtctcgttctgtcgcctaggctggagtgcagtggtgccatcttggctcattgcagccttcgcctattgggctcaagggatcctcccacctcagcctcctgagtagctgggaccacaggcgcacaccaccacacctagctaactttttgtatttttagtagagatggggtttcaccatgttgcgcaggctggtctcaaactcctgaactcaagtgatctgccctcctgcctctc

SEQ ID NO: 7460 - DNA, 1033 bp, Homo sapiens
aaatacaaaattgcgttattcaccagaacatgagctactttctgtgttgtccatgtggcaaggtctttagaaatatttgtgtgggcctttgccatgttaaatggctgtattccaaggcttcatttgtggtggtctagtcttttgtaggaggatagtaaggacgaaatgaattggtgtcttccagcagtcagatgtggcacacagggctcagggcttgcaccagtcgtctgcctgttcttcaaggtttgcctggagcttatttgccagcttctccaagggtgtccccagctcttagtttgcttttccatttgtcagtccaagtgcccttggggatagagtgtcatcccctttggctcctcatgtgggcatgtatgaagaagagagacttcgtttgtacacacagcaatcaggacccctgctggagctggagaatcgaggtgcttttcagaccaatcctgaggccctgtccttggaactgaaacaacaggctgagatgactgaagtgcattaaggaggaggctttagcctgctgccttggctgttttcttccattagaaaacatctcatgaatggagcatttggaaaaacaggtagttttagaaaaagagaatttccactcagactttgagaccaatctctgtaattgttttggtagggtaaggataggctttcttgaaacactagcctttagctgaggtattcgcacacagcccctgtctctgcataaggagataataaccccaaatcaaaggactgtcttctgttaattactaaattcccatttttccactttaagttgtgtggctggtaatagcgtccgccttctgatataagtcatagcatgcaacatgcactttgcaagtgcattttgcttgaatattttgcaaagatattctattgaattgagaggcagcaagtatttgatgtaatgattacacttgatcacacaaaaacacttcacagtgccatggctggtcttcatagtagtcagctcttgactttgcttctgtttttttttttttctccccacaag

SEQ ID NO: 7461 - DNA, 1049 bp, Homo sapiens
atttttgtattttaccgtctgtactaaaaatacaaaaatattagcccagggtggtggcgcgtgcctgtaatcccagctactcaggaggctgaggcaggagaatcgcatgaacccaggaggcggaggctgcagtgagcccagattatgccactgctctccagtctgggtgacagagcaagactccatctcaaaaaacaaacaaacagacaaagaaacaaacagaagaaaggctgtaattgtatagtcccaccagcataccaaagtctttttggaagtaacctctcattagctcaattaatgaggttgaattaaaaagtcacggagtccgtcaggctgctgagtgttctgggcactctgtgagggccagttaataggatgtgcacctcctgagctgtgttcctttctcccctaccctgagcacacgtttcagaggaacatggcgagttctcaggtagcgacgcttcccagctgctgtgccatcaggtggcactccacctgtccctctctatctcgtgatcttgttttattttcttcagcgtgtttcttactaactgaaattatcttacatgtttgactttgtctcattgcctagactcccagctctgttaaaacaagcactttgtttttctagttcatgctgaatccccagccttgggcccatagtgggtgctgaatatatgttcattgcttgaactccagagggtttctgtagcctctgtctccagtttgccccaagccactgtctcaggccatctttatgaatgacactgcaggagtcctgggcgctgcagctcctgtttagggatgtgctgcttgtgggacctcttctccctgggatgcctcctttctcgctgagtctaggtctgaggacatgcggattctttaggacctaactcagttgctggtttcttccacaaaacctttcctaacatcctaacaggctctagtgcttgcctgtttgagcctccgaaagtcactgtggttatcttaaagatgccttacaccacgttcctgcgttgtaattgtgtgcatagttgtctgacggtagg

SEQ ID NO: 7462 - DNA, 1041 bp, Homo sapiens
ccctttcacttacagttcttcctgaccctcagggcctctaggatgaaaagtctgggagcaagttacttcatcacatccagataacccttttatgtgcagggtgtttggttggaggtgctgccctcaaggcgtttacaggctagccgagggctcgaggtgtcatctccgtttaagaatgcttagaataccaggcaaaaagtgatagttttaatcagcagtaagaagtgcttttgcagttcaaaggtgtgagatgatcatggattggccataaccaggaaagacttttgggaggagatggcattgactagatcttcatagaaggacagatgtgtgggcatggtgactgaaacagcatgaagggtgacttgtgtctaaggagcaggaaacatttggctgggtgatgtggtctgcaggcagaagataaggctaggaaatgactgtcccggagggtcttggatgaagggccatccgctaatactgaggaagtcattgggagccagtgaaaatttttgagcagggaaattggggctgtattttaaccagatggagctggtttgatggtaagggtgtactagagaaggggaaccccacattctgaattaatgtcacttaggaaaggaccccttgtaagtatgaaatggttataattgtgtgtgtgtgtgtatgaatttgagaaaagtgtataactgaagaacactaggtatggttttcttgtttttttttttgttttgtttttttgttcgtttgtttgtttgtttgtttttttaaagacatggtctctctctccctctgttgcccaggctggtgtgcagtggcatgatcacggtcactgaagccttgacctcctgggctcaagtgatcctcccacttcagcctcctgagtagctgtgactacaggaacgtgccactatgtgccaggctaatttttgtattttttatggagacaggtttttgccgtgttgcccaagctggtgtcggactcctggactcaagtgatccacctgcctcagcctcccaaagtgccgggaggtatggttttag

SEQ ID NO: 7463 - DNA, 1035 bp, Homo sapiens
gttccagctactcaggaggctgaggtgggaggattgcttgagcttgagagtttgaggctgcagcgattgcaccactgtattccagcctgggtgacagagtgagaccctgtctctaaaaaataaaaattatccaaatgtctaatgagcatctactgtatacctggtgctgcactgtgaggatgccctctaagagccccctgtgcggggagagagaggttgtataaaatgtttgcaaaggtggaaatggagtaggagacacatatgtgaggacatggggctgcagggaaggccttctcaactcctctcaggctgatggtgagttagagaccagccagggaaattgacatctgaggcagatctggctgagtccaccaggggaagagggtgggatggtggagggaaggggcttgaaggactgagtgtagagtcctttgtcacataggaagatgtccgtgctttgtgagcaggcaggagtcttcgaaggttccaaagcagggaaatgacataagactactgaaggccaggcatggtggctcacgcctgtagtcccagcactttgggaggccgaagtgggtggatcacgaggtcaggagtttgagaccagcctggccaacatggtgaaaccgtgtctctactaaagatacaaaaaaaaaaaaaaaaaaaaattagccagacatggtggcacatgcctgtaagtccagctattcaggaggctgaggcaggagaatcgcttgaacttgggaggcagaggttgcagtgagctgagattgtgccattgcactccagcctgggcgacagagtgagactccatcccccacccgccccccccccccacaaaaaaacacgactgaaaatacttggaaatagtctccttaatttgtttttttttgttttctttttccaccaatggtggaattcggatgggaggaggcttctaattttctgctcacaatgttgttccttcactagtttgaagattcttctgttgtgaaagaccaagagaacatatgattagttaataggagctgtattcta

SEQ ID NO: 7464 - DNA, 1041 bp, Homo sapiens
gcagtctccagtctcattttgatcatatgttagtggagctgtaataccctcttctccttgaagattgtatgagagatacatatgtaaagaaccagacctacaagagatcgagaccgtcctggccaacatggtgaaaccttgtctctactgaaaatacaaaaattagctgggcatggtggtgcatgcctgtagtcccagctacttgggaggccaaggcaggagaatcacttgaacccaggaggcggagtttgcagtgagccgcgatcgtgccactgcactccagcttgggtgacagagcaagactgtgtctcaggaaaaaaaaaaaaaagaactggacctagagcttggcccaggtaggcagtggctgcgtggtagatgcggtggtggtggtggctgatcttatatcaggtgtttagagtcgtccatgttaatggagcagagtgctgagttgggagatgacatcaactggtcctgcgctttctgggtgacacacaaagtgcttctttgaactggggttctgtagaaaatagtttggaaagcaatgtgtaatattaatttttttctttcctgagaatgttacatggagtgaaattcaaaagtttcctgatgtctagataacttcctatctgtccacgtggtcttgtaagacccttgcatgagcctgtcccatttgtgctttataaatgcatgctggggctggggcgacgttacttatacctgtagtcccaacactttcggaggccaaagcaggaggattgcttgaagccaggaattcgctagccacctggatggcataacaagaccctgtctctacaaaaaaaaaaaaaaaattagctgggcatggtggttgtgttccttcagtcctagctactcaggaggctgagttgggagaattgcttgagcctaggagtttgaggctgcagagagctctggttgcgccactgtacaccagagcctgggcaacagagtgacaccctgtctcaaaagtaaaaaaaaaaaaaaaaggatgttggttgcccatttgctgtgtgccttgggtgt

SEQ ID NO: 7465 - DNA, 1047 bp, Homo sapiens
ctaggggtgcacaggtccggggcaagcacgtgggcgcgcatcctgaggcaggaacagggcgcatatctgagcaagcgagcacctgggcgcatgtcacgaggcgagcacgtgatgcatcctgggaggtggccgagggaggctcaggagagattggagtggagttgaaaaagcaggaagcagagagggaagtccgtgtgtaacaaaacattcagtttgtaggcccttgggtcagaggaggtgacagccataattttggctccctgggaagggtctcaggcagtgtcctgatttttttttttttttttaaacgaggcagggtctgactgtgtctccttagctagggtgcagtggtgcaatcacagctcactgtagcctcgacctcctgggctccagtggtcctcccacttctgccactcgaagtgctaggactacagtgactaatttaaacaatttttttttgtagagatggggttttgaatccctggcctcaggcgattgtcacagctgggcctcccaaggcactgggactctaggcgctcactaccacacctggctctgacgggttgaggctgtggggacctggctctttcactgtccttctttgccacatgtccccgcgtcttgtctcttctcgtgagggctgaagccatcctttggaggagctcaggagcttgtcctctttatccagggctcggtgttggcttcgagccggcttcctggggaggaggccccggcctggtcccgggcttggtgatgacgctgcccacagtgggatgctggggagctttggagccttggttttgcggctgccagcagtgtggtggagcatcgagagggacgcaggtgatgagactcaggccagtggcttctacctgggactgtcagggttgcctgcgttggctgttggctccctatgtagctgctgctcgttggtgacgggtacaagcgtcagtgcttctcactcagggcagtgtagaatgttacacagtgatagtttatgtctagccaggttttgaatgctcttactggaaacagtcatatttccta

SEQ ID NO: 7466 - DNA, 1048 bp, Homo sapiens
ggctgatcttgaacttttggtctcaagtgatcctcttgcctcagcctcccataacactggggttataggggtgagctaccatatccagtctgtatattttctttgtgtctttgtgtgttttcttttttgagaccgagtcttgtgctgttgcccaggctggatatattttcatttttgacttttgaagtcattcaattctcctgcctgttaattttgttgagttttatttgtagaaacagagacaacacatgtgcaaggtcatccttaggttttagctgttgactctaaatgatgtctagtctaatagccacttctactaaacagaaattggttaaggaagggcagtgagagacagcacgggggagttgtaatgagatgggggaaggaaaggccaatttggataaaatatatgagttatcctttgagccaggttatgtcctctgggtgtttgtatatatagaaaccggtcaactatggtatttggttttgggtaaagcagagatgagggcttctgagtagtggacagaatacttctcttgcaagagttgcttttcgagcttgtttatggatacacatccatttttattggatggagcagtagtattagagaagactgttggcacactttcacaaagtaggtaagggattccttttctacatgtttagactttactttggccaggtgcggtgcctcacgcctgtaattccagcacgttgggagactgaagtgggaggattgcttgaggccaggagttgagaccagcctgggcaacacagtgagaccctgtctctacaaagaataaacataaattagccaggcgggatggcatgcacctgtagtctcagctactcgggaggctgaggtgggagaatcgcttgagcccaagagttcaaggatgcagtcagttatggttgtgcccctgcactgcagcctgggtgacagagcaagaccttgttaaccacttacttagctccttggaacagtcccactgaacaagtcccctcatgacaccagattgccagtgggcctggctgttgttggcaaata

SEQ ID NO: 7467 - DNA, 1045 bp, Homo sapiens
gcaatttaagaaataaaatcccagtgacattgatttggatgctccaaacatgtccataatggaagagcttttccaggttttggtttgggccccccagaccaaagctttgacacataatacaagctctgtaagtctgttttcctgtctgtaatttgggattgtcatctttgtagggtgtcatggagattaagttattcactgtagacaatgcccctttcatgtaatagattctgtcagtattagatctttttctttctcttcaagtttcaaacatagattaggcaaaattttaatggctatttcacaaaatcagcttgattcttgtttatgacatcaagtgttgtttttccaggttgtctgttaaagggctacttttttttttttctaaaagtgctttagaaattccagtgttagtatgtatgcatcatttagctaagaatgaagatataaagatcacccaacagtttaagctgattcttttacaggtcaaggagaattgtgtttgtctagctgtcttagccgtgtaggactttctacttgttacttcctaaataattgcagccgcaacactgctacttcaaaggaaattacataaattttatttgctgtatttaaagtacattaaaaggcatcacttacacatttttcattaaaaatacttttaaaacttggaaaggataaaagtataaaatgtaaatactgtctgtattaataaaatgcagagatgttttaaaggcctttagtgtttattaactagtaatagttctgagaataccctggagctcaaatagataatctgtgttataaaataaatgggaaagttgacatttttgtgacttttctaatccttactatataggcctctataattcatgtgcccataacacttcttaagatgtgattttgggcatcttaagatggtgatttcgggcagctaaatcagcaacaaaggaacacagaacatcttttgcttaggtaggtagttgtaagggttgacagattgatgcaacttttaatactttagtttggctaaaggcacccagtg

SEQ ID NO: 7468 - DNA, 1097 bp, Homo sapiens
ataaactctttagaagtctgagggacaaaggaaaaaagaaaactcttccaggaaacgtattttcttataccacaaaggcatttaacatgtgtcatttataatgctgaaacccagtgtgcaaaaccatatgtgaataatggttagccagattcctgcccagcagggttatactctaaacttggatttcttttattacagacagcagcacctgcagaagaaggaggtaaaatgtgcaggatattggttcctgatgtactacaacacaggatgtgactaatcactaaattcattaatgttgaacataggatttggtacctttaccactttgttagagatctggaaaaaaaatcttctagacaaatcaagttgatcttggccaagtgcagtggctcatgcctgtaatcccagcactttgggaggccaaggtgggcggatcacttgaggccaggagttcaagaccagcatggccaacatgacaaaaccccatctctattaaaaatacaaaaaaatttagctgagtgtgatggcaggtgcctgtaataccagcaacttgggagtctgagtagtgagaatggcttgaacccgggaggcagaggttgcattgagctgagatcgtgccactgcactctagccttggcgatagagcgagacttcatctcaaaaaaaaaaaaaaaacaaaaacaaatcaagtagatccctaagtgcatcatttggattgataactattttttactgcatctggaaggtggtggcattttagcggttgtcatgttgaggaatatgaaataaatatattttaaattatgaaagcacatcctatcaggaatattttttccaaggaaacttgcaatgctaacaaactcctgaacttgattattgttattttttatttttattttttattttccgagatggagtcttgctgtgtcacccaggctggagtgcaatggcgcgatctcggctcactgcgacctccacctcctgggttcaagcaattctacaacctcagcctcccaagtagctgggattataggttccagccaccacacctggctaaatttttgtatttttagtagagatggggtttcaccatgttc

SEQ ID NO: 7469 - DNA, 1497 bp, Homo sapiens
cggggggcgcaggccgggaaatccagccccaggcctttcccggctcccaggccccgggggcacaggccggggactgggaacttttggtgtgaggagagtttcgtgactgcccttccgacagaggcgggttgcgagccttctgcctcctctcccttactcgggcgggggcggaacagcggcggggggcttttcctccatgtcccctgctggtaggggccggcaggggcggcccgtcgcgtccgggggctgcagggtttggggagtcgccggcttggggtcggggaggcgttcccgggagggccaccgctggcacttggcactcgcttgcgagcatttactgagctgatcccacttgctgggctctggaaagcacaaccttggaagagtcgcggaatgaaaagttttcctgcgaggacctcagctcctacctatcccgggctggttccatgtggctgggctgcggggccgggcctgacttgggagttgagtggatttccctttttcctggtggactgataacattgtctccacttcacagcattcctctactgtgtgtcagaagtgaaaaggcgttttgttaaattgttttaccgactgtgtctgtgtttgacaacagcccacgctgaagtttctcccaagcacccggggatatatttcctttgtagtagagtcctctttggtggggagcgcattcgtttgggtgcagtatttcccatttgttcccgacagtggcctggcccctgtgggcttgggggctgcaaatgacgttggaaagtggcttggtcagccctattgagcgtacacagggtactccggtggcatcttcagttctctcagaaattaagaagtaaaagctttttagacttttgttttgcttttagtatatattggaaaaaatagcataaatttggccttttaaagataattttgggggacgtttggagacccgacacaaggatggaagacgttggctttagtagctctgttatgttccttacagttgaactcttttattgaaaatcaaataaaattagtgggaattgggcacctgtttatcttgcaaagctgacaaagggaaagaaaaccatctaaatggacatttagcatttttaagtgttgtttatgtgtgacagtttatgctttaaatgttccaaaagagtactcaaattgttcaggcactctggaaaccaacaaaacaaattgtgcaaggaaagagaaataaagtaatatgcactctgcagtacgtctaggctcctgaataggaagagggtggtcaacattttctttcactttactaattttatgtgattaaaattgttttacctactgtgtcccatgtttcatcctgcacaaaatagacataggctgaactgcctgtttggcagtagttcaaatgtagttgttccaggcattcgttccacagaaattctgaagctttgactgtgtccatggcactgttctgggtgctggacatctaagggacccactggctgtgag

SEQ ID NO: 7470 - DNA, 1026 bp, Homo sapiens
tcctggcctaggggctgctggggaaaactttcttgagaaagtgtttgaactaagagctgagagttgagttaaatagaagcttggggttgtgtgtgagtacttaggttaattagtttattgtttcacttaattatgtatcattattagattttgctgtatccattttccacattgtagttcctattttcatacttaatttggcccatttgttgaaacctcagtacatttgaggcactttaaactgattggttaaaagtcattacttaatagctgaagaactggcagtagtttgacttccacatctcttccacaggtgattagccagtcaagagctaggtttaatcccagtatcagcatgattaagaagtgtattgaagttctgatagacaaacaatacatagaacgcagccaggcgtcggcagatgaatacagctacgtcgcgtgatgtcgctctcctccagcgtggtgtgagaagatcattgccatcaccatttggtgtgttcctgtgggaaaaagcaggactgtgcctccataatttggtcatttggcagcccctgttttctgctgtttacaacatcaccagtgccacgtcatgagcgtcaaagaaaatgcctagagatatttcaagctcatgtcattatgacatttcttaaaactttattaaaagaatgagtgaagtattgctgaaaagtggaaattcggttgggtaccatgctttttctccccttcacgtttgcagttgatgtgtctttttttttttttttaatgtatcttaaaggacataaaatttaaaaacttaaatattgtaatatgacagataacctaataattgtatctacattaaaatgacaaacatgatactgctgcttgtcaaataaaaaaaaaataaagaaatagaatgccttttttatgtggatggagtatcaggttgaccacaaaatatattgactcaaagcagctaatgcatctttagttgcgtttttatctgaatggtttaattcacttgtactcctatttaaatcctac

SEQ ID NO: 7471 - DNA, 1043 bp, Homo sapiens
tggtgcaggcctgtaatcccagctgctagggaggttgaggtgagaggattacttgaacccaggaggtggaggctgcagtgagccactatactccagcctgggtgacagaactaagagagtttcattgtgttgcccaggctggtctcgaactcctgggctcaaacaattctcccacctcagcctccctaagtgttaggattacaggcgtgatccactgtgcccggccttgtttcttgtttcttttttttttttgagacagagtctctcagtctggagtgcaggggctcaatctcagcccactgcagcctccacttcccgagctgggactacaggcgccctccaccactctcagctaatttttgtatttttagtagagacaaggtttcactatgttggccaggctgcttgtttctttatttttatctttttcaactttcattttagattcaggaggtacacacgtaggtttgttacccgggtatattgtgtgatgctgaggtttaggatacaatgatcccgtcactcaggtgctgaacatagtacccaaccgtttttcaacccttatgcccttcctccctcgctgtaaaaagctgtttctttttgtgagactttacaaaagtttgcactgtttgttttgtgttctaccttatctgcctgttctttgtgtattctggaaaaatgtctggctgtgattgaaagcaatgtttcatatgcactatcagttttttttttttttttttttttgagacagagtctggctgtgtctctggttcccgggttcacaccattctgcctcagcctcccgagtagctgggactacaggcgcctgccaccatgcccggctaattttttgtatttttcatagagatggagtttcaccgtgttagccaggatggtcttgatctcctgaccttgtggtccgccttcctcagtgtcccaaagtgctgggattacaggtgtgagccacaccgcgcctggccctaacagttatttttatttttatttttttttgggacggtgtctcgctttgtcgcccaggctgg

SEQ ID NO: 7472 - DNA, 1029 bp, Homo sapiens
taccccgagtgttttcacttttgtttccgcagactgcaaagattgatagctttggggaggagtatcctacgtgcatgctagacttcttgtctcaacccttagggtctggtgaaataagatcctcacacgctttctagcacttgcttaccctctagagagtctggaccattccctaccattacgtgcatgcaaataaaacatctgtgaattgcagactgttattaatgttaagtccacatctttgccccatggattaatattaacagttgaaggccagtaccctgggcgtttaaattttgaagataagatgcaaaatattaacgttcgctatagattgtgactgttcaacataaacgtctttgaactagacctggccaagcctaccttcgtagtaaagtatcggaaataatcactttgatctgattgacaactgactacataataatcgcttaaaaacattcaaaacactgttgcctaccctttagaatcttacattccttttcaagacagacacatgaacaaatgagctatactttgcttcttttgcccttatacagtatctggaagatccttccaaaagagtcgcgtgagataagagaagtacacagtttttttgttttgagatggagttttgctcttgtcacccaggctggagtgcagtggtgcgatctcggctcactgcaacctccgcctcccgggttcaagcaattcttctgccttagccttccatgtagctgggattactggcatgcgccaccatgcccggctaattttgtatttttagtggagatggggtttcaccatgttggccaggctggtcttgaactcctgacctcaggtgattcgcctgcttaggcctcccaaagtgctgggattacaggcctgagctactgcgcccagcccacagtgttttgaattacttgtttttttcaattgctgtttatgagttgggggaacatttctacaatgtgcatgcacatagcgtgggaaaaattccttttcaattgctttttgagtatttggatgttc

SEQ ID NO: 7473 - DNA, 1076 bp, Homo sapiens
gttttcattgctgtggctattgccttaaacagaaacaaaaaactaaaacaattttacaaccatccaaaagaggcttggaaacttttttttggctggatatccatagcacaatttaattcagtaaacataaacagttaaaattattccagtacacaaccatgttttaaaaaagagattacacccaattttggcaacaacacccaggaaataagcattcttttacatttggttcaaactttctgaatggcagttgtgcaacacttgttgtgaaaaactttagaatattataaacatgttaatcctgtatttccatttctgtgaattcatccaaaagaaataaccatggatatgggtagagacagagccatatggaatgcacactgcagtggtgaacacatggcccagctctgccatcaaggagaaggtgagaacatgggggaagattttatcgaagtttcttttctggggcatatgctcaggttaaacacctgctctgtatctctagcttctgactcctacccctggccagctctgttactctagtacactgctaggcaggcagagtatggccaaagtattcacaacagtgcatcactaaatcaactgggatccacacaatggaatatcctaatgcatcattaaaaatcacattgtaaaagaagattttataacagaaaaaaatgcactgtatatgatacatttttaaaatgttacttatgccagtcacaataaaagacaattacacttatatgggatagagtagtcaatattatagagacagaaggtagaaatgggtctgggtggaaattagaatgagatgttcttagcattccagttttacaagatgaaaagagtaacggagacagatggcagtggtggttgcatgacattatgaatgtacataattaaaaatgggtaagatggcacagtgagataccatctcacaccagtcaaaatggctattactaaaaagtcaaaaaaataacagatgctggggagcttgtagagaaaagggaatgcttatacactgctagtggcagtgtaagttagtccagccactgtggcaattcctcaaa

SEQ ID NO: 7474 - DNA, 1049 bp, Homo sapiens
tcaaattgttgggattacaggcatgagccactgtgttcagcctcttttaattcctatatgtattagccagttgaggtggcttgcttgaacccaagagttctgggcaacacagcaagacctcatctctacaaataattttaaaaattagctggggcatggtggcgcacacctctggtctcagctacttgagaggctgagacaggtggatcacttgagcccaggcagtcaaggcttcggtgagccgtgatcccgccactgcactccggcccaggtgacactatgagactctgtctcaaaaaaataaactatagaaaatctgagtagccctatatgtagtaaggaaatttaattatcagttaaactgtcacctgggtaacagagtgagaccacgtctcaagggaaggggaggggaggggagggtcttgtatttattatttccttccttttacttggttttactttggtttaatttggtttacattggtttaatttgttcttcttttactattttttttttactgaatcatcattattgttctaccactcgaatcaccgcattgctgttgctaaatgaccaatagaccaacagatccttccatagaaacaaaaaaaagcccttgcttttcaatattaccaaagggaaacatatagtcagaactgcaagaaaactgccttgtgatccggcttctgtcacattttagtttacaatacaggagcataaagtagctactcaactacctcgaaaataagagaatcatttacctttctgtatataacctaattaaaaccatgtcagatccagcaaaactgattttcatctctcctcagtagatataggagtatatattgatatttctacttcatgactagataggggactaaattaaaattcgctactcagttctcagttgtaaggcccacagttgcacatgggtaggtgggtagttgcacatgcacagagttggtggtcacaactctgctttcttgcccttctgcttaacatggagctatttaatcttatttatttatttatttatttatttatttag

SEQ ID NO: 7475 - DNA, 1064 bp, Homo sapiens
aaaaaaataaaaaatggccaaactgttttccaaagtcctggtaccatcttacatcctaccggtaaagttatgagagttgtagttgccctacattctcaccaatacttgctattatcagtctttttaattttcaccatcctaatggatacgtagtggtatctcactgtggttttactttgcatttccctgatggctaatgatgttgacatatttttgtgtgcatgttggatactaatatatctttgtaaagtgcctattcagtgtcttttccaatttagttgggttgctaaaaagtcttcatatattccagatacaatacctttggcaggtatgtagatatgtgttgtgtgactattttctcccagtctgtgacttgtcttcattttgttagcattgtcttttgaagagcagaagtctttaactttgtaaaagtctaattttttgctatcttcttttatagctcttgtctttttttgtttttttgtgtgtgtgtattcaattatctaagaactctttgactcccttcagatcatgtaaatgttctcctgttttattttagaaattttaattttacctttttttttttttttgagacagagtcttgctctgtcacccaggctggagtgtagtgacgtgatctcagctcaccgcagcctctgcctcccaggttccagcaattctgcctcagcttcccaagtagctgggactacaggaggcaagcactgcgatgcccagctaatttttgtatttttagtagagacagggtttcaccatgttggccagtatggtcttgatctcctgacctggtgatccacccgcttcgttctcccatagtgctgggattacaggcgtgagccaccgcacccatccaagttttaccttttaagcttaggtacatgatccaatttgaggtgaattttgtgtatgagtaagttaataatcaatgttcattttttcccatatggatatccagtttttccggtaccatttgttgaaaagactgtctttcccctattgacttactgtggccactttgtcaaaaattacttgcccatagacatgcg

SEQ ID NO: 7476 - DNA, 1022 bp, Homo sapiens
gagctatgattgtaccactgtaccccagcctaggtgacagagtgagaccctgtctcttaaaagaaaaaaaaaattgacctggatctactcatacccaccctggtctttgagcagaaagaatcatttgggaattattttgtctcatctttctccatgatcactgttgaagaatttggtcactgtaaccaggtaaatataaaactcaggtgggccgggcgcggtggttcacacctgtaatcccagcagtttgggaggctgaggtgagtggatcacgaggtcaggagatcaagaccatcctggctaacacagtgaaaccctgtctctattaaaaatacaaaaaattagccaggcgtggtggtgggcgcctatagctccagctgctcgggaggctgaggcaggagaatggtgtgaacccgggaggtggaggttgcagtgagccgagatcgtgccactgcactccagcctgggtgacagagcaagactccgtctcaaaaaaaactcagatgaactatagctaagtcagtgctcttgacacttttttagcaatagtagctttgtttctcacagaaaaaacaaaattttctgtggaaccacactatttaaaacataagcaatattagtatcaacttgtataatttatagatctactgataaaaacaatcaagaatagtctaccttaattgaatcaggaggagataactgcagtcttacatcagccatactcgtatccatgaaatatgagtcagtcatttgcacaactccctgagtcaccttctggaacacagaaaacactgagccaagttagcccaggacctgaaccttttgtggaaaggaaaatctgtagtgtctcctcagagtatggctgccctttcacctggtagtcagtttctcatgacggttactcgagcatttataaggcagttgtgaaataaccaagacattctgtgtgttgtgctactgatgctcctcctgtcaccgacctcctctccaaatgaggcctgccttttgtccttggtagtagg

SEQ ID NO: 7477 - DNA, 1046 bp, Homo sapiens
tcatcgactgcccttgctttgctttgctttgcttttagaatgccatcgggttttgtcatgttgggaacaagttaacttaggccagttgactaagatcaaggtatgtgaacatgcctggctgggagagaagtagagtaaatgttggttcgcattccctcccgacgcccacaatgccagccatccctgacttttcttgcctttattgggaagaatataaggtggcagaaacaaacttcccaccctttttccaaatatttactgaaggagtcttgaggagagtcttgtggggtgggggggtgggggtgggagctgggaatgtttttgaactagttcttgaaaaaaaaactagtacaatagtacaactgtcttaattttatatatgaggaaactgaggcccagagatgaaatcatgccttgatttatgcagacctcagtacctgttcgtgacaaatccagttactaaaaggtaagagaaggaataagggacttgatatttatctagcatcagcaatgtgtggacatcgtgtgaacggctttataaacatttcatttaattctctacatctagccattttttaacctgtgctttccctccctctcaaagtactgtttatacatttattagtccatattttaaacgctccatgctctcaactgtattaatgctatttgttaggataagtggcagatgtccatggaaaataagtggctgcaaagtggtaatgctgaccagatgagaaaagaagtgtaaaagggaagttctaaagaattaaagccctggagagggtgggtagacaacaacagtccaaaatagtgctcttcattgaggctgtgtagattttcctgcttcctgggaaaactggggcatatttacacttgcatgtgtgtattcagattgtctggggctatggagtttgggtcagattgctgaacccgtgggagagaagttcccttgttgtctgttgttgtctgttctgattgctgctttgtaatttgggccacatatgaaagtcagcatccagtcattggaccataggtgtgtggca

SEQ ID NO: 7478 - DNA, 1066 bp, Homo sapiens
gcagcgggcgtgggcgcagcccccggactcctcgcggcgcggtgcggcgcggccagggaggatgctggcggccctccctcgccagcggcgcccgccctcgccgcagcccccgccccgccccgtcaccgccccttccctctgccctggaagcagatcggcggccgcggggaggttcggggcggcgcagccccgcgcggttgtgggatcgctcccgggggccgctcctctctcgggcactggggtcgcgggagacgtcgtcgggagctcggtttctggaggcccttccccacccggcctctgcctcctccactcccccgggctggacggaacggggcccagcgcgggatgcgaggtgcgtccccggggcccgcagcgggcgggagcgcagccagggcccggtcggggacgcaggcccagggcgctgaggctgcacctgcctctccgaaaccgggctggctctttttgtctttttatttttctaatttatttttttagaggtatgatttcgctctgtcgcccaggctggagggcagtggcgcaatctcggctcactgcagcctcgaactcctaggctgaagcgattctcccgcctcagcctccaaagtagccggtactacaggcgcgcgccaccacgcctggctaaggtgtgtgtgtgtgtgtgtgtgtgtgtgtctccaaagtagcgaggactacgggtgtgtgtgtgtgtgtgtgtctccaaagtagcgaggactacaggctcccgccactacgccaggctaaggtagggtgtgtatgtgtgttaactttttgtagagatgggatctccctttgtaacacgggcgcccgccactaagccaggctaaggtggtgaatgtgtgtgtgtgtgtgtgttaactttttgtagagatgggatctcgcttcgtaacccgggctggtatcgaactcctgtcttcaaggaatcctcccgtctggactcctcccatgggattacgggcatgagccacggcacctggctattttttttttctaagcatttaaataagctggggcttgatttgggagttttctattgtattttgagctt

SEQ ID NO: 7479 - DNA, 1238 bp, Homo sapiens
gtatccattagctgggacttaaatgactcacttagaacaaagtacctggcattgaagcctcccagacccagccccttttcctccattgatgtgcggggagctcctcccgccacgcgttaatttctgttggctgaggagggtggactctgcggcgtttccagaacccgagatttggagccctccctggctgcacttggctgggtttgcagtcagatacacagatttcacctgggagaacctctttttctccctcgactcttcctacgtaaactcccacccctgacttaccctggaggaggggtgaccgccacctgatgggattgcacggtttgggtattcttaatgaccaggcaaatgccttaagtaaacaaacaagaaatgtcttaattatacaccccacgtaaatacgggtttcttacattagaggatgtatttatataattatttgttaaattgtaaaaaaaaaagtgtaaaatatgtatatatccaaagatatagtgtgtacatttttttgtaaaaagtttagaggcttacccctgtaagaacagatataagtattctattttgtcaataaaatgacttttgataaatgatttaaccattgccctctcccccgcctcttctgagctgtcacctttaaagtgcttgctaaggacgcatggggaaaatggacattttctggcttgtcattctgtacactgaccttaggcatggagaaaattacttgttaaactctagttcttaagttgttagccaagtaaatatcattgttgaactgaaatcaaaattgagtttttgcaccttccccaaagacggtgtttttcatgggagctcttttctgatccatggataacaactctcactttagtggatgtaaatggaacttctgcaaggcagtaattccccttaggccttgttatttatcctgcatggtatcactaaaggtttcaaaaccctgcattcatttctggagtccgtgattttgaaagcacctggtgttccagggagggaacgcattgctgaggtgtagaggttaatgttttaaaccatagctcaccctttacagtagaagtcacttgacaatctggtaggggagcaggcgctcttcaatggattaaactaacgggttaacatcttaataaccttcagtgcttgtgtataccaaatgtgctgcttttcctagagaaaaagctattgttcctctgtcaagactaagctaatttatttgagcagaaggc

SEQ ID NO: 7480 - DNA, 1039 bp, Homo sapiens
attagaaacttgtcattttaatctttatccatgactttatatttttttctgtcttgtttatttggaaattttaacttcttcaagtattttcaaactatttttgtcagccatttataattcttgtttcacaaagaaagatatgaattaacaaacaagcagagagattgtggcatatcttgagcacttagcatttagaatggagtgagagcaagagggaaaggagaatcatataacaatacttaccatggagttttccttctcgtgcactccacacgggcattactacatcagaaatagttacaccccattctcatagtaggaatgtccaagttcaacttaggaatccataagctgagctcatatagcaacacaatccatctctggtctgacatacctcttatttcctgtttcagatattgtgatacccaataagcctaagaaggcggcccaagtaaataacacccaggcgttctggtggagtttaaaatcattatgttatgtagactgggttgcagatagattgcagatatgaactgaagtttctatcagtaaacaggtcaagactttgggactgactggctcactgggatagatattgtcaagtttaaacaatgtttgctataatgcaggtaataataaaaataatttttaaaagcctgccaaatattcttacttggcctggtataagatctaaaaataggaagcatagcattcactctttctgaaaccttttattcttcattgaaaataacctcattttcctagctcagcagatatttaggtaatccttctcaacagcatctctaaataaaagctaaaacatgacactacctgtttattaaaaagaaaatggccaggattttatatgcctgatcccagcagcaggctcatgggatgagaaagtatagggaaagcaatggtggtaagtacatgtctgtgtttgcagaccttcatttttgtactgatacaattgtaagagaacattccacactgtgtactggttgatcaaacataagaatttaaagtaaggctgctttag

SEQ ID NO: 7481 - DNA, 1062 bp, Homo sapiens
aaatcctcaagagactctataccagcaacaaattggaaagcagtatttagtgagaataaattttctgtggacaatatgcctattaataaatgtgctaagggtgcatttctgtttttaaatgagcaaaaatgtgtaaatgcaactattagaaatgtaaaatgaattgaagaacaagaaaacagatgaaaggaaaataactgctattgaattaatagattgtataccactcctaaaaggaaactatgtgtatcagcctgaaaatttccttcaaaaatggaaatgtctcctaaaggaaacaggaccaggtatgctggacatctgaccaggtgtggtaggcacctaactctgtatgctagacacctaaccaggtataccgcacacatgactaggtatgctggacacctgaccaggtgcagtagacacctaacttggtatggtagatacctgaccaggtatactgcataactgactaggtatgctggacacctaagaatgctttatcctgacggacaagagatcattccctggagtcaatcttccttctcagggcatttaaattgtgtttctaagttggtaagatattttccacataacttcagaaaaatctcaaatgataataatggctattatttattaagcatttgctatgtgccttgctctgagctaaatgtttaacatacattcttttgtttaatgctcacaatacttatgtggaataatttttttcaaatggggaaacagatttaaaattggaaaataattgcttaaattcccatgaataataataagttcatctgagcacaggtgtgtcccatgtccgactcttagctctgtcacctcctgtcccaaacaatgtcactggtttgagcccacagttacttacacctgcgtaacaagaccataaataagaatatcttgaaatatacaacagcaggcaatctggggggcttgtgtaagcaattctgcaaatacttggagtgaagaggcagtagtcattggtggcatcatgccacaggtaagcatttaaatgttagagatgctttcatttgattggtaaagcaa

SEQ ID NO: 7482 - DNA, 1057 bp, Homo sapiens
catgcagtcactcatcattcaataaactttgcttgagcaccactgtgtaccaggcatacagccctggttctactcaaattagagtcttcaccttacacttttgatgacagccttcacagttatcttttatctttcctcaaatcctctaaaaacattcttaatctttttatgcattgggtctctttgatagccacgtgaagcctaaagaccctttctcagaatatttttaaactattaaaatacctaagaaaataaaacacctaaattagataaaataaatatgaaaataaataaggaaaatatctaataaactattactattattaaaaaccagttgtcaaatattttaaaaatatacaaagtatatagaatatttttaaaaacttatttgggaatagtctacgtgcttctctgagcattaaaataaaaagatttagtggtgggtctggtaactactatgacttcaaagtcgtgacgagcataaaggatatttagaggtctgctacacaacggtaactcccgactctagactggcctccatgttttggaataatgccaatatttcagacaaatgtcctcatttggggtctagagaataagacccctgcacatatgtagaatcccagaggatagagaccatctaggaagaaggtggagctcggccagcctctgtgtcacaccgtgggaacagcaacagaagtgtgcatgtgcacttgggtgaagaaggcagcatccgcatggcccagcccagaccagtgagcaaagaccccatgaagaagggtatgtcttagcagaggccccaagggcacatgaggaggaagggggtgaactggacagaaggcgggaggccccaagagaagagcaggagtggaatggtgtgacgtgcctgaaactacaagctgcttcaagtcgctacgtgggaagtggaggctgggaaaggccagggcctggagttggacagaccgggcaacatcagtcattccaacggagcccattgcctgctttctagaatgtggaaagacatggccaggcgcagtggttcatgcctataatccca

SEQ ID NO: 7483 - DNA, 1032 bp, Homo sapiens
aatgaatgtaaacaagcaattaagatttcaaactttaagagaattgacacagtagagaaactttatgagtttactgagtgtagaaatgccttacacaaaaagttccactttacccattatcagagaactcacatagaaatcttgtgaaagtagtcagtgtggcagaaccttcaacaaaaagtcttatctcacaaaacatcacaggctacacacaggggagaatccctatgaatgtagtgaatgtggcaaagccttttatagtaaggtacatctcactagacatcagagaatacacataggggagaagccctctgaatgtgctgagtgtgagaaaacttcctgtgtgacatcaacactgagtgtgcatcagagaacacacatgggagaaaccttatgaatgtactgaatgtgggacaatctttaaccacaagtcaacactcactgaacatcagagaacacacacaggagaaactatgaatgtactaaatgtaggataaccttttttgcaaagttaaaactcattggacaacaaagaatacacactggggaaaaaccttatgaatgtatcagatgtgggaaaactttcagtggtaattcatgcctcacagtacatcagagaaaacacacgggggagaaaccctatgaatgtaccgactgagaaaaccagtagcaatttaaatctcacactacatcagagaacagatacaagagagaaaccctatgaatgtactgaatgtgggaaaacctacactcacaaatcaagtctcaatgaacattgtagaatatagggcaaaagctctgtgaatgtaataaatgtgacacatcattgtgccacagttcagtccttactaaatgtcagagaattcaaagaggaaagaagcactgtaagtataatgaatgtaagaaatccttttgctagaagacaaactctgtggtacatcagatagcacacatagcggaaaatgtcttttaaatgttgaaaatgtcttaaatattgaaactccaaaattaaatccataaaccaaactcatt

SEQ ID NO: 7484 - DNA, 1029 bp, Homo sapiens
ccaatatgttggaaaaactccatatataacagacccatgcagtttaaacccatgttgttcatgggtcaactgtatgttaacatcagacaaaataggccttaaatcaaaaaggtcacaagagataaagaaggatattgtatgttaataaaattcaatacagcaagaagatatagcaataatgaacatttatgcacctaataagataacatcaaaataaatgaagtgaaaattgacagaactaaagggtaaaatagacagttctactataatagttggaaacttcaatatgtcgttccaataatggatagaacaaccagacagaaggtaaggaaacacaggacttaaaaacacaataagccaacttgatttaacagacatctaagttaaattatgtttgcagttcaatcaaggttaaggttatttttagggcctaactggctttgtctgctctgggattatccagacctggtctgcatttaaaaatttgcttcaatactcccttttaggatcaagtagtacacaacactatatccaacaacaactactacagaatacctattcttctcaaatgcacgttagttattctccagggtaaaccatatgttaggtcacaaattaagtctcaatagattttaaaagatagatattatacaaagtatattctacgaccacaacagtatgaagttagaaaataataataaaaggaaaactggaaaatttataaatttgtggaaataatttaaataatatacctttaaacaacccataagtaaaagaaaaaaatcacaagggaaattgaaaaatacttagagatgactgaaaacagaaacaaaacatacagaaacttatgggatgcagcaaaagttgtgctaaaggggatatttatagctataggtgcttacctttaaaaagaagaaaaatctcaaatcagttatctaacattacatcttaaggacccagaaaaagagctaactgaaggctgggagcagtggcttatgcctgtaattccagcactttgggaggccaaga

SEQ ID NO: 7485 - DNA, 1030 bp, Homo sapiens
ccatctcaaaaaaaaagtctgaaaaaaaaatgaagaaagcctaagagacatgtgggacaccatcaagtggatgaatatatgcattgttcggagtgccagatagagaaagcatagagataatttggagaaataattggtgaaacattttaaaatttgatgaaatatataaatataaacctagaagaaacacaataaacttcaagtaagataaaatcaaagaggcccacactgaggcacattataatcaaactgtcaaaggccaaagacaaagttttagagcagcaagaaagaagcagcttatacataacatacatacatacaagccattctcaataaagttattagcagatttcttatcagatcttggaggccagaaggcagtgggttgaaatgttcaaaatgctgaagggaaaaacaaatctgtcagcaaacaatcctgtatttggtaaaattttctgtcaaaagtgaggctgaaattaagacattcctggataaacaaaagctgagggagtctgatagcagtagacctgccctgcaagaaagctgaaaagagtcctttaggttgaaatgaaaggacactagacagaaactaatgccataaaagaaatgaagatatctgataaaggtaaatgcacagggagttataatacaaagatgtattactgtaactttggttagtaattccactttttgatttttacatgatttaagagactaatgcgtaaaaatgttttgtgtctctggacacaatgtataaagaagtcattttttgacatcaataacttaaaaagtggtggggacagtgctgtgtaggagcggagttttttgtatgttattgaggttaagctagtataaatttaatttatagtgttatgactttaggatgttaaatgtaacaaaacagctgtagagaacacacataaaaagaaatgagaagggaattaaaagattttactagcaaaaatctactaaaaagaaaagagctgtaattcaggaaatgagggacaaaaatgctgtaagacatagaaaa

SEQ ID NO: 7486 - DNA, 1050 bp, Homo sapiens
aaattaatgtcagagaaagaggcctggtccattatcatgcagactgtaaatgctttaaagtacttaaataaaataaaacctcccatcatacactatgacctcaaaccagggaatattcttttagtaaatggtacagtgtgtggagagagaaaaattacagagcttggtctttcgaagatcatggatgatgatagctacaattcagtgggtggcatggagctgacatcacaaggtgctggcacttattgcaatttaacaccagagttttgtggttgagaaagaaccaccaaagatctcaaataaaattgttgtgtggtcggtgggtgtgatcttctatcagtgtctttctggagggaagccttttggctataaccagtctcagcaagacatcctacaagagaatactattcttaaagctgctgaagtgcagttcccaccaaaatgagtagtaacacctgaagcaaaggcgtttatttgacgatgtttggcctaccaaaaggaggactgcattgatgcccagcaactggcctgtgaccccctacttgctgcattatatccaaaaattggtctttgtgagtagccctgctggggctgctattgcatcaacctttggggtgtccaacagctgttcttcgaattgagactgactccaaggccacaaactgttcaacacacacaaagtggacaaatagcatttagcagcaggtttggaacgtagagaatctgaatggatctgatgaaacctgaaccaggtgcttattttgttgcttttttcccatccactgagcatgacagcatggattctctttaaggagaaaccatgggcagctccagccaggcctcataggaaaaggcccggcatgaggttctggcgtcaatggccactgtgtatggctgctctgagtgaggaaaaaactaaaaagaaaaactggttccatgtactgtgaacttgaaaacatgcagactcacgggggttcctgatgcaatgcttcagatgaagattgtggacttgaaaatacagactagaaggccgggcacagtggctcatgc

SEQ ID NO: 7487 - DNA, 1032 bp, Homo sapiens
tcactgtgtatatatgaaaacgtatttggcaatacaaaccacataccccttctatttcctgacataaataaatggctatggccatttacagctgaaccacgtcttcaagaaagaagccaaaaatatttccgtgaggtttttaactacctctgaatctgtcctactctaaatactaccggagtctctttgtaggttggccagtatatgtttttagtgaaatattatttcacaaagaactatatcacgtacctttcctctgactgtttcctggcatatatgcatgaatatggccattattgaactatcacttcagtaaagaagttaaacagtacttttctgaggtttttcagctacctctgggtcattctgtaatgtaaatgttgttaataagaatggtttttacataaattatgcaaaggttaacaagcagtaacactgcactcctcaaaaagtggcggtatgtaatgaaaggcccttttgatatccttgatttttcattgtgtatctgtttgggcacggtctatgtaacactagttctgcgtattagtattttagagtatctctgcctcccttgtcctgttgtttcttttgcccccttggaacacattggtcagcagttctaagagacactgcccacatgatggccattccctacttcatccttgctgagctaaattttatatttttgtgcatccttctcccagatgacttaggtggtaagtccagattagtcaaagctaatcatggaagttccattttaatgattctgttggggtgaacttgggagcaatgagatgtttgggaagtattgtgtagtacttctgggaaagatctccttgatacaacattgtcatgacatgagaagagactctgctgggctttttcatgtctgtaacatggtattggcttatcgtttttatctctgaagggcagtagcctgaagataacagtgcacaaggtgggaaaagccagctcagaggtgacgttgccgagctactctgctctctatacctgttctctactgggactttt

SEQ ID NO: 7488 - DNA, 1050 bp, Homo sapiens
tattttgggtcatatatgtacctactgattttctgcctgcttgatccatcagtacttacaggggtgttaagtctccaattatggtgtatatttccaagttctccttttactcctctcagtttttgccttatgtattttgatagtctttcgttaaatgcataaatgtttcagattatgtcttctttaatatgattttgaacccatccaataagctcttaatttcagatattgtacttttcagatctagaatgtccattttatgtatgtgtgtgtgcatgtgtgtgtgtgtgtgtgtgtttgtgtatacatgtataagaggtgtcttgagaccacccccaggttattaatgatgtcctaggatgactcagcatatattggagcatggcgttagaaacaaaaattagggtgctaggtgtgtcagttgttactgatgtattgtttcttgtagacccatagtcatacttatggctatgatttattgtagtgaaaggatacaaagcaaaatcagcgaaattcctagaggtttctcccaatggagtctcacagaacacacttaactcctctagcaatgacatgtgacaacgcacgtaaaatgtgtaccaaggaaactcactagacatttggtgtccagaatttttattagaggctagtcacaggtacttcctgcctatcatgtaccaaaattctagactcccaggagcaatgcacatactgagtataaaccatattacttatggttatagctcaggcttagtgagccgttcttatcagagaaggttaaggtcagaacctttctgaaatccaagttcccaaatgcccatcaacggtgatcttttgtagcagacctttcaaaggttagtagtctcaggcttgctgtattaacctttttctgtatagcacacataccatgtatgtgttgaacttccctcattttctcatttattttgttaatattttcttctgttttgttgaacatattaattataattcattttgaagttcttgtttgttaattctactatcacggtcacctgtgagtttgcttttttt

SEQ ID NO: 7489 - DNA, 1033 bp, Homo sapiens
ggactattttttttctatcctaaatgagttctgagttaggtgaaacagagacaagcatattgcatcagtccttcaggtatttcccacatagttggaacagataagcaattccttgtaagtaaggtctgctctggtccctctagaatcaaggaccaggacccacacttggaatgcggtctgccgtctcaaggctgtcaccaagccaaggagggttggggtaaaggcaagtagaagtgccacaaagctttcctaccattttgaagttgccttttattttttctttctgatttggcatctacttggttgcggtcagcctttgaccttttcagaattctgacgaagtttattttgacagtttctgcttgttttttgatgtctctgaggggacctgagcttggtgccacctacctctccattttgctgacatcattccacttcattaatcttgtcctcttgtatgtttctttcttattatataaactttctgctttaggagagttttagatttatggaaaagttgtgaagacagtagtacaaagagtttccatatacctcccatagacacagtttcattaacatattaatgtagtacatttgtcacaattaatgaaacaatactgatatattattaagtgatgaccactttattgggattttcttaatttttccctaatgtaatttttctgttccaggatgcccacattctacttagtcatcatgtctccttaggctcttcttagctgtgacagtttctcagactttccttgtttttgataaccctgacagttttgaggggttcaagtcaggtgttttgtagaatgtccctcagttgatatttgtctactgtcttcctcattattagactgaggttagggtttcttagaggaagactacagaggtagtgtcattcagtcacatcctatcaagggaaaatgctatgagcatgatttatcactgttgattacctggtggaggtagtgtggtcatgtttctccactgtaaagttactcctttgtcctccgttttcaactgt

SEQ ID NO: 7490 - DNA, 1051 bp, Homo sapiens
tgtttttaaatttctttccttttttttttttctttaaagacaggatctcactctgttacccaggctggaatacagtggtgtagtagtcagtagtcatagctgactgcagcctcaaattcctgtgctcaggtgatccgccttagtctttcaaagtgctgggattataggtgtgagccaccatgtctggcctgttgttaatttcttactgctctttctttctccctgaaagcttatcatggcagtgtgttcttggtttatggaatgaatagttttaaaaatctgtttgaagatattaggattaattttccatttctatttcttatattgatttggtttcttagcattcatttctagtcatcttggtgagtatgctttatgctgttgcttttcctcaaatatctagtaaatctttattttccattcatatttaaaagtgaagaactagtttgatcagcacaggtagctaatgtgaattcactcagctgttgagaagtgtgtcctctattactgtctcccacaatggaaaggccaattcaaggattgtagatgaattggtaaggaaacataataggtaagaaatccagcaggtttcctgccagaacctagaacatctccaagctggtggctgtgcttgaaatggacttcatgcctctgacttctgtttgatcttaccattccgtatctttcagaaattactcaaaatgtttcttctgctgaggggctccttcccaggagtattcttttttttttttttgagacggagtctgtctggctctgtcacccaggctggagtgcagtggtgtgatcttggctcactgcaacctctgcttcccgggttcaagcgattctcctgcctcagcctcccgagtagttgggattacaggcactggccaccatgaatggctaatttttgtgtttttagtagagacggggtttccccatgttgccaggctgttctcgaactcctgagctcaggcgatctgtccatctcagcctctcaaagtgctcagattataggcatgagccactgtgcctggctgtattctgtttt

SEQ ID NO: 7491 - DNA, 1645 bp, Homo sapiens
tttattaacaagtatgtttcatatatacatgggggacacccagagaatgagtgtttcacaaagaggtggctttgaattccagcttatatggcatcttcatcaaagaacaggaaatttttagagaaacgttaagacaaaggaaaggggcttggaatctctaaggctggcaacttgggggaaagcaaataaatggccgatacaggctagtttgtgaagctaattaatgtagattcccctggtaccatctctaggaccatcagttctcaagttgtcttcagttgttaacctttgttctccttgatagatggggaggcaaggataccttttgtcttcgtaaatccatgtcctgcttttaggcagatagagacaggacagctttcttgtgtctacttcttgccttcagctcaacaattcttcatattttggggtggcatatttctggtctcccacattactattttagaattggattttttttaatgtattgagttttaatagttttttaaattttctagatagtaatcctttgtcagatatgtggtttgcaaatattttctccttgttggtagcttatcttttcagggtgtttcacagagcaaaagtttttcactttgataaagtccagtttgtcaatattttgttacggatgatgcttttgttatcaagtcttaagaactcttgcctagccctaggcaaagattttctctttttttttgtctaaaaattatatagttttatatgttatatttaagtacttcatctatttagagttaatttttgtgtaaggtatgaggtttagattgaggctcagtttttgcctatggatgtacaattgcttgcagcaccatttgttaaaaattttttttcaacaaatttgtgaaaattttactgaactccttttgtacctttgtcagaaatcacttaagtatatttgtgtaggcctatttctgggttatcttctatgttccattggtgtatgtgtctgtgcctctgctaataccacgctatcttgatgactgtaaccatatagtaaggtttaatattgaacacagtgattccttttactttattcttcttcatagttgctttagctattcttagcacctatgccttttatataagttttagaataagcttgtctgtgcttataaaaatccttgttgggagtttgataggaatttcatcaagatactgattttaagggtaagatattttttgactgactctgctattttttcagcaaatatctttcctttccctgaagttagcattttttatctttcttaatcaagtcattcattcatttagcaactatttatgactgttctgtattactaaatcttgttgaattgcaaacgctgttcaaagagagttggtacagtttaaattgctcacttgtaatgtgacagctatttaatatacaaggagctttaggctcccttagctgggcatttggggtagaggaaaacaagcctgaggtgctttgttagccattttttttttaagacagagtctcttactctgtcacccaggctggggtgcagtggtgtgatctcagctcattgcaacctctgccccccaggttcaagcaattctcctgcctcagcctccagagtagctgggattacaggcacctgccaccgtg

SEQ ID NO: 7492 - DNA, 1128 bp, Homo sapiens
tcctcagtttacttaaaaaggaatctgttatctctagggcttatcaaacttatatgtgattgtgcattcctggcatctttttaacatgcaggttctgatttagtagctgtggatggggtcctttattctgaagttctgataaacctccagcttaagctgattctgatggttgacttacacactattttccattattcctttttcacttaacagcatacagatgtttctctgacagaacatgaatagcattttctctctttgtcacaattgcctagtaattcaagtccatagttcattaaactacttccagctgtttgctatgacaaaccatgtggtaatgaataaccttgtacatttataattttgtgtgtatatgtttatatattagatgaattcccagaacttgatcagcttagtgggaatgcctgtcctagagatagtattattttgttttcccattggcaatgcatgggaatgcttatttcttcacagctcctcccatagaatatgtggttcaacttttggatttggggcaaccgataggtaaaaagtggtatttcatatagtttgcatctgcgattttcttcactgagtgaggttgaatacgttttcgtgtgtctaagggtgtcttatatttatttttctatgaacttaactgttagtatcttttgcctatttttcttttgggttgtctggtcttttttcccccccagtgtcttttacccttgtgtattatatgagttgcaagccattattttttggtatatcatttgtcttttgataattgttcatggtgtttttccctatgcagaaatatttggttatttttgttgtccagtttattaatcttttccttatggttttggactgatagcatttggagacatagttagaaagtccttcccacttgattataaagaatctgcccatgtattctaatacttttatgcattttatgtttaaatctttaatccatttggagtttacttgtatgtagaaacttaattaaattactacagtatcattccatttactccaccccccgatgtgtgctgttgttttgatgctttcttctccttgtgttctgaaccccacaaggtatctttagtattacgactttagagagtg

SEQ ID NO: 7493 - DNA, 1319 bp, Homo sapiens
cttctagaagaaaaaagttggaacttttccaattcagtttttcaggccagtgcaaccttgataccaaaaccaataaaacaaacaaacaaacaaaaaacataaagctatagaccaaagtctcatagatttagatgcaaaatcctaaaattgaaaaaaaaagtctagtcatatccataaactgtatcatcaccaagagatgtttattagggcaatcaaaagatgatttattattttttaaaaaatcaatgtggccttcccttcctctttcttttgattcccctctttgagtttttatgtgtctcttttgccttcccttcccagagtggaggagttagacctgcattgtgggatgagaggagttgtggctatgtgtctgctggcaccaagagggctgagggtgaggtgtggaagggacagggggaggagatgggcagcattgttaagagattggtaccactgagcaaatatgttgagaatgatgatggcaaggtttctccctgttagagaaggtatttgtagaaataggaatgaggagagctagaaaacctgcagtgtgggattagaatagaactcatatcttttaaatacataggaacaatagagaaattgttgggtgtgcccatatacatatattttgtgattcattctaccgagaggacataaatgcagtcacagctcagtaacagtaaacacaccaactgccaagttattatttcctaaatactatccacaaaaaaggggaccagggatgattcctagtcggagattgggagaaaaagaagatgagcctgaatcatttcatgtacctaacagaaagaaaatactctggctgggctcagtggctcatgtttgtaattctagcatgttaggaggtcgaggtgggtgtgttgcttgagcccaggagtttgagaccagcccaggcaacatggcaaaactgtctctacaaaaaatataaaaattagccaggcgtggtggcatgcacctgtcatccgagatactcaggaggcagagaggtgggaggatcacttgagcctgggagattgagactgcatcgagctgtgatcatgccactgcactccagcctggaagacagagtgagaccctgtctcaggaaaaaagaaaaaaaaaagatgttgctcagcaagttaatggacaaactgtgcaatatccagaaaactttaacattcttcaaagaaatagaaaacacaatcctaaaatttatatggaaaccacaaaagacctagaatagtcagagttatcctgagcaaaaggaatcaaactggagggatcatattacctgacttcaaattattctacag

SEQ ID NO: 7494 - DNA, 1069 bp, Homo sapiens
tgtagattgtattttatttactttataaatataaactaaactagtagttgctaaacatttttatggattagaagagtgataaatatttggagaacactaacaggattaaagccaaaagtatttcctagtctccctcatctcccatgcctctgcaacctttatctcatcacaggtaagacatgctgttatcctgttaagcaattccattgacttgccacatattttttcaggtttttaacgttttcttaagtttttgttatatgtttgcaaaggaactaaagttttatcacttcagtgaagtctaatatgttgacacactctcacatgaatttgcccagaacacttttatgatccatctgtgttgcacatatctgtggtgtgagtcctttaagtcctgtggtagatatgtctctgtatgtatgtttccttatgagaaggtatgttcctctcttgtaaggaagactcttgtattcaaattggaatactcagaaactaagaaagctctaggcacatgtaggtactaaatacttttgcattaagtaattaattcaccaacaggatatttctgctatgatcttttacccacaatgtgtaacataaaacaacatatatcatggaggccctttataacattttctatttaattttcaacaacaaaaattgtaagaattagtccctaaacatcttgtctcacatcagctgattcttattgcatcagactgagcagaactgtgattttccagggatcagtgtcatttagggatgtgactatgggcttcactcaagaggagtggcatcatctggaccctgctcagaggaccctgtagaggaatgtgatgctggagaactacagccaccttgtctcagtaggtaggtaggaattgtttcccatgtagaaggccagaatgcatgtcctttcttatcgatagaaacttgtggaaattttgtaaaatataacatttagctttgaaatttagaggtcagagacaatgtatcccttttggataccagaaagaatattttcctctgccccacgacaggattaaatgaggtgtgtgtgtgtgtgtgt

SEQ ID NO: 7495 - DNA, 1034 bp, Homo sapiens
ttattgacaggcatgtttcccatgcatagaattctcagctgacagctttttctttcagcactttgaatatatcaatccagtgccttctaacctccaaggtttctgctgatgatctttttgaggttcttttgtatatgacaaattgcttctcctttgcatttgattctctgtcattttttttttctgactgtttgcttataacatgacttggtggatgtatttgagtttattttgagtttattgtgcttcctggatgtgtagatttgtgtctttcaccaaatttagggagtttaattttggcttttcggcaaatactctatttccttgtctctcttgtattcttctacatttcccataatgtttttgctggtcagcttgatggtgtcccataggtcctttgggttccatttatttttcttaattcttttttgctctgattctcaaacttgataatttcaatagtcttatacttaaattcacagattatttttggcattcccaaatctgctgttgaactcctctggtgaattcattatttcaattatggtactttttagttttagaatgtctatttggtgcttttttataatttcaatctctttattgatatttggtttataagttgtttcatggttctctctggtgctcgtatgttttcttttagcttttgagcatatttaagacagttgatttaaagtctttgtttaagaagtgttatgtttggtttgcctctgggatatatctgtcaatttctatttttcctttgattggacaacacttccagtttctttgtatgctttgtgattttcttgttcctgttgaaactgggtattttaatattataatttagtaactttagaaatcactttctcattcttctctagactttgctgttcttaattactgaagtcttcagtatccatttgtttttatgaatttttcaaacttttttttgcagtcttatgtgtggtcactgaattctctctctttagcttgtgtttaggtagtgttttaacaggcatttttcctggaag

SEQ ID NO: 7496 - DNA, 1028 bp, Homo sapiens
ttgaaaccaatgagaacaaagacacaacgtaccagaatctctgggacacatttaaagtagcgtctagagggaaatttttagcactaaatgcccacaacagaaagcaggaaagacgtaaaatagacaccctaacatcataattaaaagaactagagaagcaagagcaaacaaattcgaaagctagcagaagacaggaaataactaagatcagagcagaactgatggagatagagatacgaaaaacccttcaaaaaatcaatgaatccaggagctggttttttgaaaagatcaacaaaatagaatagccagaagaataaagaagaaaagagagaagaatcaaatagatgcaataaaaaatgataaaggggctatcactactgatcccacagaaatacaaactaccatcagataatactataaacacctctatgcaaataaactagaaaatctagaagaaatggatagattcttggacacatacaccctcccaagtctaaagcaggaagaagtcaaatccctgaatagaccaataacaaattctgaaattgaggcagtaatagcctaccaaccaaaaaaggtctaggaccagacggattcacagccagatactaccagaggtacaaagaggagctgataccattccctctgaaactattccaagtaatagaaaaagagggaatcctctctaacacattttatgaggccagcatcgtcctgataccaaaaccttgcagggacacaacaaaaaaagaaaatttcaggccaatatccctgaagaacatctatgcaaaaatcctcaataaaatactgtcaaaccaaatccagcagcacatcaaaaagcttatccaccacaatcaagttggcttcatccctgggatgcaaggctggttcaatataggcaaatcaataaacataatccatcacatacacagaaccaatgaaaaaaaccacatgaatatctcaataggtgcagaaaaggcctttgacaaaattaaacaccgcttcatgctaaaaactctcaaaaaaac

SEQ ID NO: 7497 - DNA, 1012 bp, Homo sapiens
aggaaaactaacaaacagaaaggaataacatcaacatcaacaaaaaggacatccactcagagaccccatctgaaggtcaccaacatcaaacaccaaaggtaaggaaatccatgaagatggggagaaaccagtgcaaaaggcagaaaattccaaaaaccagaatgcctattctcctccaaaggatcacaactccttgccagcaagggaagaaaactggatggagaatgagtttgacaaattgacagaagtaggcttcagaaggtaggtaataactaactactccacgctaaaggagcatgttctatcccaatgcaaggaagctaagaacattgaaaaaagattagacgtattgctaactagaataaccagtttagagaagaacataaatcacctgatggagctgaaaaacacagcacgagaacttcatgaagcatacacaagtatcaatagctgactcaatcaagcagaagaaaggatataagagattgaagatcagattaatgaaataaagtgagaagacaagattacagaaaaaagaacaaaaaggaatgaacaaagcttccaagaaatatggaactatgtgaaaagaccaaatctatgtttgattggtgtacctgaaagtgacggggagaattgaaccaagttggaaaacacccttcaggatattatccaggagaactttcccaacctagcaagagaggtcaacattcaaattcaggaaatacagagaataccacaaagatactccttgaagagagcaaccccaagacacataatcatcagattcagcaaggttgaaatgaaggaaaaaattttaagggcagcaagagagaaaggtcaggtcacccacaaagggaagcccatcagactaacagcagatctccctgcagaaaccctacaagccagaaaagagtgggtgccaatattcaacattcttaaaagaattttcaacccagaatttcatatccagccaaactaagcttcataagcgaaggagaaataaaatccttta

SEQ ID NO: 7498 - DNA, 1292 bp, Homo sapiens
ccatatccttgccaacactcgttattttcttttgttgttttgatagcagccattgtaatgggtgtatggtaatttttcactgtggttttgatttgtatttccctaatgatcagtgatgttgagcatattttcataagcttgctgaccatttatatatctttaatggagaaatgtctgttcaaatcctttgtccatctttgaatcaggttattttgtttgttttgagttgtaggggttctttatatattttttatattaattcctcatcagatacatgaattgcaaatatttcctcctgttgtgttggttgtcttttcattcagttaactgtgtcctttgatgcacaatttttaagtttgatgtggtccaatttatttttatttctgttgcctgtggtttttggtattatatccaagaaaacattgccacacgaatccattctcctatgtgttctgccatgagttttgtacctttagttcttagatttaggtctttgattcattttgagttaatttttttgtttttgttttgttttgcatgtggctatccagttttaccaacactatttgttagaaaaattgtcctttccctattgactgttcttgacaactttgttgaaaatcattttaccatacatgcatgggttttcaagattattttggctagttgagatcccttgaaattctatgtaaacttcaggatgatttatttctatttctgttactatgtcttctttgtagacttagtttttttttttttttaatcaatatgtagtgtttttctcttgtaacaatttttgatttaaagtctcttttgtctcagtatagccaccctggcattctttaggttactatcctcttctgtcatttcaatttcaacctattgtgttgtgtgtttgtatctaaagagagtgtcttgtagacaatatatacctggatcatatatttttatttattttgccaatttatttttatttttattatttattttattttattttttttttgagacagagtcttactgcatcacccaggctggagtgcagtggtgcgatcttgactctctgcaacctctgcctccagcgttcaagcagttcttctgcctcagcctcccgagtagctgggattacaggtgtacaccactacacctggctaatttttgtattttttttttttttttagtagagatggggtttcactgtattggtcaggctggtctcaaactcctgacctcgtgatccgcccacctcagcctcccaaagtgctgggattacaggtgtaagccaccatgcc

SEQ ID NO: 7499 - DNA, 1567 bp, Homo sapiens
tgaacccaggaggcagaggttacagtgagccaagactgtgccattgcactccagcctgggtgacagggcaggactctgtctcaaaaaagcaaacaaaaaaaaactgggctgaaaaataccacatcacttttttcaaaaccttgttgggattctctggtttataataaagattaaaacctgaatatttttgtttagcatcagttttaatgaaagtattatgttccattctttggcttttcctaacttgcttaattagtttaatatattggtttgcatactctgttagagtacagcataagttgtttataagtcagtagaaaaccaaacgttttcacatttgaaaactaatgtgtccaagcagtacataaccatgccagagtcatgcatggacgtgtgagtatctcccttttagagatgttttgccagctgggaggtggacatttttaggcaagtgacatttctcatgttcttttcttgtttgtaagctacaccctctcggttttctctgctctgccaacactagtggaatatgatcacatcccaggtaagttgtttattttttcacagttttgcttaaaactaattattgaggtttaaaaaatgtctatacattcatatgaaagtagaaataacatcctggaaaatatagaggagaggtcacattacagttcatgggtcaaatgcagcctactgtctgtttttttatggtccacaaatgaaggatggtttttatacttttaggtggctgagggaaaaaaaccaagagtattattttgcttggaaattgtatgaaattcagacttcattgtctatgaatttttattgggactcagctatactcatgtatttatgtattgcctgttggtactttcacactacaaaggcagagttgactggttgcagcagagactgtaatggcctacaagcctaaaatatttactgtgtgactctttacagaaaatgtttgctgatttctgatagagagttgatgaagagtaagacaaaaatgtcatataggtgaatgcagatcttgtgatcttacagttgtgaaactggaacataaaacagtttgtcggtgggctttattaggtgacattgtgaaacttctgatgacagtcttgcaggtacttaaaaaagtagtacaacaaagtgagtaattcatgtgcagtccaggggaaaacttaacagatagcaaaagaaagtatatgattaaaaaattcaaataggccgggcacattggctcacgcctgtaatcccagcactttggaaggctaaggcgggtggatcatgaggtcaggagttcgagaccagcctgaccaacatggtgaaaccctgtctctactaaaattacaaaaattagctgggcatggtggtgcgtgcctgtaatcccagctagtcaggaggctgaggcaggagtatcacttgaacccaggaggtggaggttgcagtgagccgagattgtgccactgcgctccagcctgggcaacagagtgagactccgtctcaggaaaaaaaaaaaaaaaaaaaaaaatccaatgaattgtgtagcattaggactcatggttgt

SEQ ID NO: 7500 - DNA, 1041 bp, Homo sapiens
cattaagttttcttggcatcattgttgaaaattaactgaacataatatattgtagtgtttatttatgaattctcaattttatttcacatgtttacctctatgccactatcatgccatcttgattattgtaattttgtagcaaattttcaaattgagaagtgtatgtcttctaactttctacttctttttaaagattgttttgattatattcagctccctaaatttccacatgaaattttagaccagcttgttagtttcctcaaaaaggcagatgggattttggtaaggattgtgttgaatttagatattaatttggcagttattgccatcttaaccatatgaatgcaattcagtgcctttccatttatttaggctgtctttaattacttccatcattgttttgtggttttcagactacaagctctgtatttccttgattaaagttacaagtattttattctttttgatgctattgtaaatggaatttacttatttatttatttattgaaacagagttttgctcttattgcccagggtggagtgcaatggcgcgatcttggctcactgcaacctctgcttctgggattcaagcgattctgctgtctcagcctcccaagtagctaggactacaggcacatgccatcatgcctggctaacttttttgtatttttagtagagacagggtttcaccatgttggccgggctggtctcaacctcctgacatcaggtgatccagccacctcggcattccaaagtgctgggattacaggcttgagccattatgcctggccggaattctttttaaaatttcatttatgatttgtttgttgttagtgaacttgcaccctacaacattgttgaactcttttattagttttaatagtgttttagtagattctttaagattctctatatgcatgagcagtcaactgcaaatacatatagttccacttttttttttcaatctgaattccccttccccttgcttgtgttgactacaatctgctgtgtgatgtgtaactggcaagaaggcattcttat

SEQ ID NO: 7501 - DNA, 1049 bp, Homo sapiens
agcactattaaataaaaattctgtatcttttgaaactatattcatgaataaaggggaactaaaggcattattagatagggaagctaagagaaaatgttgctagcaaacctacctttaaaaattgactaaaagttctctaaatagaaaggaaataacaagaaggcttgggatgcaggaaagaaagaagattggaggttggcaaaaatggggataaatatatttttctcgtgagtttctagaatcatttttgatggttggagcaaaatgctctgtatgtaggggaaacacttaagacaattatattttaaaagtggggagggtaaaggggcctaagtggaatgaaacttggtacatttcacttgaagtggtaaaatgcttgatagactgtgataacttacatatgtacattttaatacctagaacaactactgagaaaactataaaatgtggtacacttagaaacactataaataaacccagatggaatctaaaataatatttaggtaactaatcagaaaataagaaaaaaggaacagatgaatagaaaacagaaaagaaaacaaatagcagcctaacagagcaatatttaccttaaatgtaaataatcaaagtacactaattaaaatataaattggcagagtggaaaaaacataaaacatgatctaaaatttttaatttttgtgagtacatagtaggtgtatttatttttggggtacaggagatgttttgatacaggcacacaacgtgtaataatcacattagggtaaattgggtatctattccctcaagtatttatcttttgtgttataaacaatccagttacactcttttagtcactttaaaatgtacaattaaattatttttgactgtagtcaccctgttgggctagcaaatattaggtcttattcattctttctaactatttttttgtaccctttaaccatcctcaccttcccccaaccccaccccaccacctttcccagcctctagttactgtccttttactttctacctcatctccatgagttcagttgttttaatttttacct

SEQ ID NO: 7502 - DNA, 1035 bp, Homo sapiens
aaatcaaacctccagatactactcacaaaaaatttttccttttagaatcattttttgaaggtttaccattcttacacctgccaatagttcagtctttgcccacctcaactttactgttgtttttcttggttatttttctcaaagcactttcagtgtcccaccttaacctccattgttttgtgtttattcttctgtcagaattttttattcactcatttttaaactcagcaaataatttttgagcacttggtgtgtgctgaggatatgataatgaaaaaaattaggccaggcatggtagctcacacctgtaatcccagcacaggtcgaggtgagcagatcacttgaggtcaggagtttgagaacagcctagccaacatggtgaaactccatctgtactaaaaatacaaaattagctgggcgtggtggcaggtgcctgtaatcccagctacttgggaggctgaggcaggagaatcacttgaacccagaaggcagaggttgcagtgagctgagattgcaccactgcactctagcctgggcgacagagcgagactctgtctcaaaaataagtaaataaatataaaaaaaaaacaaaattatgtctctaagtatattatgtatacttatgtttatgtatattaagtgttctgtggttttaaagactatgaaagaaattaaagcaagtttagattactttaaggaacagtcaggggaaaccttactgaggtcaacattagagtagaaatttgaatgaaatgactgtgtgagccatgaggattctgcctcttttcagcaggggtaatagcagctgctagccttggacaggaatgtgcttggtggttttcaggaatgaccaaaaagtcacagtggctgaagggagggcttgattggaggaagggcaggaggtgaggtgagggaggcagctagagtccaaaggtgagcctatcataagccttatttggttaaaatctgtttagtggtagattttcagcagatgagcaacatctgatttatatctctgtaagatctttctcacct

SEQ ID NO: 7503 - DNA, 1027 bp, Homo sapiens
cctattctttacaatggttttagtgttaatgttttttcattaaatgtattgttaacttgtttggccaatattgtcattatacattttttgtgaagactgagggagattgaaatccttaggaagcaaatatttactttcacctgatgaaaaatcttgtgcccaagagctacatggttatgttggagttgtattagggtgttctttcaccatttctaccccctattccgaagtgtcagaggacattgatattctcccagacggagcattttacctagtgggtgtgtatggcttcttagggcagaagaatccgggagttgccaggcaggccaaatctttcatgaccccattcctctttttccaactcagctgtatcttcagagttgtctccgtctttccaagaacagaacaaaatgaacaaggtaagttgtttattaattccctactttattttgcggtggactttgtgagatttgtaagagtcagtatggtttttttgttttgttttgtttgtgacatggagtctcgctctgtcgcccaggctggagcgcagtgtctccatctctgttcactgcaaccttgcaacctctgcctcctgggttcaagcaattcacctgcctcagcctcccgattggctgggactacaggcgcaggccgccacgcctggctaattttttgcattttaatagagatgtgttcaccgtgttgccctggctggtcgcaaactcctgagctcaggcaatccgcccgcctcggcctcccaaagtgttgggattacaagtgtgagccaccgtgcctggccaagagtcaatatgttaagatgagaaattagtaatagataaaaattgaacttcccagaaaatataaagtaacagatcaatagcagggccaagttagagtcaataagttgagcttcatgtgtttcttatgtttccaacaaccatggcagaaaggaagacactggatatggatacagacaaactgactcctctgaagacacaaagacttcctggcagataccttttttggt

SEQ ID NO: 7504 - DNA, 1027 bp, Homo sapiens
ttcctgcttgcacagagactcaaagtcagccagaagtgagtgcttagggtttcccaagtacttttctgagcatgtgcacagccctgagcatgcacttgaccttctagattctcaggaatgcactgcagtttttcaaaacccctatgatcatgtcattactgaaactttccttttaagctttctggttagtctattgcttgcttcactgttatctactgcttcaggcatttgtgaaattaaataccagtaattgtttttgacaatgaaccttggggaatatgatttttgtacttgagacctctgagtcaggtcaaatacagacatccttgtaagtggggtctccatgggaactactggacaggtcaaataatgacagttttctgagaatgaagctttgaaagagttccattgctgttttccctccaggggctgctacgccagtggttttcatgatgaatgtggggtcctacttttcaaggcacttgggatagagagtcagggatgggactagggcaagttcaagtgctataaaatttgcaattcttactgagattcagttatgttttttgaataaatcctcctaagatttctgcaagcgtttagttaattttggaagttctaaaaatgtggattctgacctttttgttttttgctggttttcttgttgcgtttatggaagagagggtttttggaggtccttactccaccattttcactacctggctatactctattgaaagcacttctgggatgtctctttaaacttacaatgatcataacctttgacccagcacatcaagtattaggagttcatcttttatatgtggtcacacatttgaataaaaacttttcatcaataatgcccattgcaggagtgtttttcgttgccaaagactgtaaagcaccttggtgtcttttgctagaggacctcttacatgtgtggcagcccacctacccagtggaataccctgcagctgccacagaacgtatggagttgccaggagctgaggggctctctccagggagc

SEQ ID NO: 7505 - DNA, 1073 bp, Homo sapiens
ccctgaccagcctactgtccaagggctctgctgggcgtttcactgacatgtgacttaatgtgcctctttttgatgccagcatcattacactgattttgccagtgagcctctggggtctgcagagaggggcagaggcagaggttgaggccaggtcgctcccgtgctctagggagcatgttagcaggtggtgtggttctctggtgcctcccttcatctctccgagccttcctgccgtccccgccctgcccctccgtccagctcctgagctggccatcccccttcctgcctttgtgagtggtttcccctgcctgtgtgcctcctgaatgcacactcccaccttggggctcagctggatggccccagtggggagcacctccacctcctggaggtgaggacgcccccctcctctggcctattgagcccctgaacgtgcagcggtggcacctggcttctgagtgcttgttctgtgccctctcatctcgttcctgcctgtgagggctatgactcagtgcatgggctggggattctgatagaaggggtttagagagggtatgctctcaggagacatctgtgtgggaaggacaagcaccatgcagggagaggaggaggctggacagaagtgcagttgtagcggaagtctagcctgattccatggggactccggagtgtcaactgaccccacagctagcctccctctgaggcaggggagttggagtcaggcccctgcactgctcggcccttggatgctggcactccagtcttctgcagaaggctgcaagtgtggatgactgctgcacagccctgggggagtctgggtagggcccagctgcaagtcccaggggccactgctactacccccagaaaagaggctacccgctgtgcttgcaggccctcagctggtccctggggtgctcagaatgcaacctcaggtccagcctgctcctgcatcccacagcactgccacactgcatggatatctgtcttcctggggtcactgtgagtgtctgtgggttcttctctgtgctcctggctgccagccctgggaccaagtgttgtgctggcatgaggagctt

SEQ ID NO: 7506 - DNA, 1033 bp, Homo sapiens
agtgggcagaacagcatgggtggctatgactagttttgttaggaacatttgagttacttcaatcattttcacaggcagccaacaagcaattaagagcagttataatagaggaagctgggggacccattttgcaccatgagtttgtgaaaaatctggattaaaaaattacctcttcagtgttttctcatgcaaaattttcttctagcatgtgataatgagtaaactaaaactattttcagcttttctcaattaacattttggtagtatacttcagagtgatgttatctaagtttaagtagtttaagtatgttaaatgtggatcttttacaccacatcacagtgaacacactggggagacgtgcttttttggaaaactcaaaggtgctagctccctgattcaaagaaatatttctcatgtttgttcattctagtttatattttcatttaaaatcctttaggttaagtttaagctttttaaaagttagttttgagaattgagacacaatactaatactgtaggaattggtgaggccttgacttaaaactttctttgtactgtgatttccttttgggtgtattttgctaagtgaaacttgttaaattttttgttaactaaatttttttcttaaaataaagactttttcacaatgactggcacagattactcagcaaaagatagcaaaacgggtggttgaagataattcattttaatcgtaatgtattttagtgtgaatttaaaaatttcatacatcaaatctatgatctcccttatattcttatgatgaggctaaataaaagtctaataaaaatgttaaatatgtgaatggtggaaatggtgactagcagcacacattctgggaagcatcaaatagacacacggccccagccacctgcaacttatgtgcactgttgtaaaccattcagaattttcctgctaggcccttgatgctggagtcacatctgttgatagctggagaactttagtttcaagtactacattgtgaaagcaattattttgtttctagtttttata

SEQ ID NO: 7507 - DNA, 1070 bp, Homo sapiens
gccacacccaagatcacctgacacccaccctgacaagtgtccatgatgctgggccctgagggaggtgaaggctttgtggtcaagctccgtggcctgccctggtcctgctctgttgaggacgtgcagaacttcctctctgactgcacgattcatgatggggccgcaggtgtccatttcatctacactagagagggcaggcagagtggtgaggcttttgttgaacttggatcagaagatgatgtaaaaatggccctgaaaaaagacagggaaagcatgggacaccggtacattgaggtgttcaagtcccacagaaccgagatggattgggtgttgaagcacagtggtcccaacagtgccgacagcgccaacgatggcttcgtgcggcttcgaggactcccatttggatgcacaaaggaagaaattgttcagttcttctcagggttggaaattgtgccaaacgggatcacattgcctgtggaccccgaaggcaagattacaggggaagcgttcgtgcagtttgcctcgcaggagttagctgagaaggctctagggaaacacaaggagaggatagggcacaggtacattgaggtgtttaagagcagccaggaggaagttaggtcatactcagatccccctctgaagttcatgtccgtgcagcggccagggccctatgaccggcccgggactgccaggaggtacattggcatcgtgaagcaggcaggcctggaaaggatgaggcctggtgcctacagcacaggctacgggggctacgaggagtacagtggcctcagtgatggctacggcttcaccaccgacctgttcgggagagacctcagctactgtctctccggaatgtatgaccacagatacggcgacagtgagttcacagtgcagagcaccacaggccactgtgtccacatgaggggcctgccgtacaaagcgaccgagaacgacatttacaacttcttctctcctctcaaccctgtgagagtccatattgagattggcccagatggaagagtgacgggtgaagcagatgttgagtttgctactcatgaagaagctgtggc

SEQ ID NO: 7508 - DNA, 1024 bp, Homo sapiens
atgatctgcctgccttggccacccaaagtgctgggattacaggcgtgagccactgcgctcaacctaggtgtccaccactatgctcggctaatttttgtatttttggtagaggcgggatttcaccatgttggtcaggctggtcttgaactcctggctccggttatccaccctccttgacctcctaaagtgctgggattacaggcggtgagccaccacacgtggccttgatcatgcagttttaatggaggggagtggaagtgacagtagaggccttttgacaagattttgctgaacaaatcaacaagtagctagaggcaaagttggcacaggggaggtatgacatgattgggtagaactgagcatgtttaattaccaagtagacagggctcagtggagaaaggggaaaaggaaaaaaagaagaaagcatggctccggggtatgtgaggttggacccagagcagagctgttgttcacgatgtccgctgtaaggggcccactacgtgcttacaaactcctggactctgacttgacttcacaaagtccacttccaagagtaatgtcaaccagctggagaggaggtgagagtctgtaaggctgccccagacatctgaagggctttggacaagcagggtgctggggtaggacagtgggcgatattgagggcccgcttactctatggctgttcactctgattttcttttttttttcttgtgtggtgggtttttttttggagttagtctcgctccgtcacccgggctggagtacaatggtgcgatctccactcactgaaaactccgcttcctgggttcaggtgattctcttgcctcagcctccgtagtggctgggactacaggcgcccaccaccacgtccaggtaattttttttttttttttgagacagagtcttgcactgtcgcccaggctggagtgcagtggtgcgatcttggcttactgcaacctctgcctcccaggttcaagcgatgctcctgcctcagcctcccaagtagctgggactacaggtgccc

SEQ ID NO: 7509 - DNA, 1050 bp, Homo sapiens
gcagcgtttttactgggatgttggtgatctagtgattatgatgtatgttctagtgaagcatatttcaaagaagttacccaataaaactgaaagtgtcttttggatgtgtctccacactgcttacagaggggttcctataaatcagactgaacaatttctagcaagcacccttgctccttgcccatgctatcccagtgaaagaggggtcttaaggtcaagtcccctgtggttgtcacttctcccccacccatctccctcccaagtgccctgcccccgatatttaaatttcctcccagcacttagggtcctcagtgtacaaacttagaattgggcagaggcgggcggatcacctgaggtcaggagtttgggaccagcctggccaacatattgaaatcccatttctactaaaaatacaaaaattcgctgggtggggtggtgcacgcctgtaataccaggtactgaggcaggagaatctcatcaagagtaaatctcatcaagatcaataaggcgtttcccttttgttgtgctctgtattgccctgtgaaaagataatacttccaaaatgctgttaggtggatggggtgtgagatttaatttaaacccacgggctatataaagggcttcccagctgtttctgtccttacctggagttctgatcccagagccagtgcctaggatctgagaccacacagccaatatcgctctgttttttttttaggacatttcattaccatccagaagtgtctcccactgaaggcatccgtggttgtttttaaggtaagctattttaagaagagccccttttcagctgcagtatttatatttgttatactcaaatttgtttagcagcctggagtgaaaaaagttttgtccctaacattaaccttgagcaggacaccacagggctcttttcagcttgagttttagttaatgaaaagccttaggacttctgagaaatggaacagaaaaccaattctggagtaaaaataagcagtaagtgttttaagtgtacacatgtgttttggaaaggaatggtctcttcgccttgcc

SEQ ID NO: 7510 - DNA, 1010 bp, Homo sapiens
ccaagaccgccctggcttattttacagcaaatcccagaccaataaggtctttattaataaataaatccgcagtatttctaagaacttttaaaacctaaccatgatactgctgtcatgcctaaaaatacattccaaaatatcaagtatccagggtttaagtgtttctgtattaaatttttttttttttccgagacggaatcttgctcttgtcacccaggctggagtgcagtggcacaatctcagctcactgcaaactccatctcccgggttaatgccattctcctgcctcagcctcccgagttgctgggactacaggcggccgccaccatgcccggctaattttttgtatttttagtagaggcggggtttcatcatgttagcagggatggtctcgatctcctgacctcgtgatccgccggcctcggcctcccaaagtgctgggattacaggcgtgagccaccgcgcccggcatgtattaaatattttaaacagctggttggtttgagtcaggatccaaagtcacaccttatattttgtagataactttttaaattcagagcagcactgtccaatagaaatataatgtatgctataaatgtaatcttatattctttagtggtaaaaggaaacatgattcattgtattaataatttaacctaatatatatccactactattttgcatgtaattttaaaacactttttcatttctccatgatcttgactaaaataattaaaaacaaaatcctgtgaacttgtcaaaatccagtgtgagttttacacttacacatttcaagcgtggtgaatggatgctgtgtaagtgatcatctagaggttcccctttcttaaaaggctccatcccccgttatatttgtcgggctgtcttgcagcattccttccccacacttcgcatttttctgattgtttttccgtggtggtctttgagtgtctgttctttatatttcctgtaaagtgatagttacctctagaggtagtttttggttttggttt

SEQ ID NO: 7511 - DNA, 1031 bp, Homo sapiens
aatcatgaggaatggagagggcagctagtgcagaagctacaatgagtttgatgcagttcaagggcctgctgggtcactggtgctgaatatgatcataagagaggcctaggttggggaggtgacaggagagcctcatgggccaggatgaagagtctggattttactggatggccactgaaaagcctttggagggtttcatgcttggccttgtttttgttttaaaagatcaccttggctgtcatgtggaaaactcatgtttgggggagcaggagtagagtcagaccaaccaggaggttgatgtgggtgagagcaagtgctgcctaggcctagagaggtgacagtgcagggcaggggagctgggtggatgccgatatgctttagcggtaaaggaggtgggtgataggtgagatgtgaggatgagaatgaaatgacatcggggattttggtttgagcaattgagtggttcgtgtggctgtttactaaaatggggatgactggggaagagcagatgctgatggatattgctggagcaggagttctgttggggcctgttaagtgttttgttttgttttttgtttgtttgttcaactcactgcaacctccgcctcccgggttcaagagatccttccacctcagcctcctgagtagctgggactacaggcacacatcaccacgcctggctaatttttgtattttcagtagagacgaggtttcaccatgttggccaggctggtctcgaactcctgacctcaagtgatccgcccacctcggcctccccaaatgctgggattacagccgtgagccatcgtgcccagctagggcctgttaagttttaagcactttagacgtcccagtgtagatgttaaaaggtagaaaggtggagtctggaggtgaggtaagaggttagggctggaaataaatatttggcagtgaatggtattttaagtcaagggatccctcaggagagtgttttatggctgtgtgtatatgtgctattttattttcccagtaatgttcaactacttagttta

SEQ ID NO: 7512 - DNA, 1069 bp, Homo sapiens
actgaagaagcgtcagaggcaggagcggagtaactttttccccgcagtcttgctggacttgattttcatggctttttctctttccctaactctgcctttccaggaatccatcccctctgggagtaagaaatgaccagggtccgggtgagttggcgttccatttctcctaaaatgccatctccctgaaatgtccctgtgccatgtgttgttttctttattgtcaggcccccagtacggtattttatagctatggatgtagggacattaagatactaaggacatgtagctagcagatgatgtcaccagggtctgcacagagagttttcactggcccatcctgcctccaagaatttattccactcctcagagcagtgggctgtgccctcctggggagcctctcaaagcctgccttttcctgccagacatttcactcacattgaaagtcattccaagctattccatactcatcccagtgctaagtggtctcagcaaaacagatagaatgataaaccacggtgcttttcttcaaggagcttaccatcttgatgaacatattatattacctgtacacaaaaaaatgcatattaatagtgataatttattaactatgagtcaaaaacgaggaaattcgttaaatggcagcacagtggttacaaaatcactctagaaatgcttttcaactaggctatgcatcagaactctctgtggtgttttttaagaactaagcttccttctctcttccagacctagtgaaaggagagtttcactccttttttattctgttgatctttgtacatccaaaggtttattgtgaaatatctctctatacactataagtgtctctagggtaggtaaaatgagttattcatcctttatactcaggttgatttgttctctttcactagcatgtctacatatttaactgttccagtaaattttaaattaccaagtcgtacttttttaaagagagttttcagttgtccccataaaaccatctgtaggaggttacctcaaaattaacccttagactcccagggtatttgagatggtcagcccccacttagaatcc

SEQ ID NO: 7513 - DNA, 1058 bp, Homo sapiens
tgtttcaggtgaagaccaggatagattttctaagtgtgaatccccacttcacatatggaaccccttatgctgaacttgaaaagcaccaagacttcctgtagacaagaaagtgcttaggtagggacagcccctgggcatcccacccaatgtagctggcaccccactatggcaaaggtgccttgataactgagccctgtatccctcccatgcccagccagattctcatgggaagccctctcccttcttttctgcctaacaccatctcatcgtttctggcctcactgtggacaatccacacacattcttctttcctctcctggcggggcacagagccacccccttgccttttcttttcttgaaggttctagttcagctcctgattcatcagacccttctagccccctgcatctagcagtgaagcatgaagcctggtggggatgtggtactcccatctggtgtggccaccagctctgccaatgttcctgtagccttggaaaacttgctctctcggttcttttgggtgctgtgtactccccagcttccccccttccccccccattttgcacctgggtttagtgaaaggatggcatttggttgacccatatagaaacccagaatgaggtctcagggccaggaggcctggtatttgtaggccagggaaggggaagaggcaagtggtctggggtatcaccagccagccctctctgatttggcctctactccccataagtcacagtaccataagcaggcttctggcctcagcaatttggtctttgtgcccaagtttattgtgagaatttcctgaaaactctataaaaggtctcttcctactgtaggcctctaatgtttctcccctttttgcttcagtccactcttcagtcttgtaggcctagttttcaaacctgcacatgtgtcctacctggccacaggcatgcaggcctcaggcagctgggccagtttgggagcctcgggtgatgtctgcacgatctggggctgcctctgcacccctgctgtgggcttcagggttggagaagggctgggaccaaccgggtgagatc

SEQ ID NO: 7514 - DNA, 1029 bp, Homo sapiens
ggtattgaaacagacccccaaacacagactcctgcctgccctctgccgatgctgcctcctccatgctcttgagcaggtggagccatggtgctctgtggtggcgcatgattcactgagcaaacagcactttacagaagaaaatctttattttgtaatatgtgtgtccagcgggattgacactcaaaaaaagtctcacttagaaatcttcccttccttacctttgtatctcctttacatcatgagagatcaaaaatccattttgccttacatatgctaagaagcgtggcattctttctgttcataaaacagactcatgacttttaagacaggacaagcaggccagaggctttttttttaatcacagatctcatgggaattagtggatgctaaatggcaattaaagcatgattcctatgcttttgagcctgttttatgacaaggtgttactttgtagacctggcccatacatttcttttttgtcaacactgaaaaagaacagtttctgagatcgaaatggaaggaaaggaagtgagtaatgacaacaaaactgaatatttaaaaaatattcctttatagttaaatctctccagttggtgttggcttcacattgaaagagcagccatgtgccaccctggccggggtgtgtgcactgcatgcaggttctcccttgcatgcaagatgggtgctggcccactgtgaggcttctgctcggggaagttctgtggagtcactaccagggccaagaggcaggtgggctggctctgggacgagggccaggtgtgagcaaactgccagggtccgctgtgccactgctccccggccacatgcccgcccagctgtcgccttaaccagactgaacagacaggatccttcagggcccttggccccactctcagtgcattctgtcatcagggattaccacctgtaccattttcataaaacaaaaccaaaatcactaccatcaaatggccttgtccctctaaaaagtctgcttaaaattctgtttttaaaacccagtttcctagtttt

SEQ ID NO: 7515 - DNA, 1030 bp, Homo sapiens
tttcatgtaatgaatttttcagttccagaatttctgtttgtttttttttttataatgtatttttggaaaatgtttcattcatatcctgaattgcatttctcatttctttgtattgtttgtctgtattcctgtgtatctcactgagcttccggatcttggtctgttgcccaggcaggagtacagtggtgcgatcatagctaactgcagcttccaactcctgtgctcaagcaattctcccacctcagcctcctgagtagctgggcctacaggcacacatcaccatgcccagctaatttttatttgtattttttatagagacgaggtctcactatgttgctcagactggtctcgaactcctagcctcaagcaatcctcatgcctggggctcccaaagtactgggattacaggtgagagtcaccatgcccagtgttcactgagttttaatatcattattttgaattctttttttgggatttcataaatttctttttgattggaatttattgctggagaattattgggttcctttgtgggtgtcatatttccttgatttttcatttcttgtgtccttatgttaatctctgcacgtctggtgtaacagtctcttctagttttcttaatttgctgttgtaggagaggagtttttcctgagggtgtgtctatggtgttggttgtgcagggcactttagctttgattctcattgtgtgcagtagtatagtctctgtatgatttctttggctataagtcatgtttgtggtgtctgtgatttcctcagtatcttagggtatggtggaggctgtagtgaggttttgctggggacagggataccaggttggcctgtccttggtcccagtggtggcagtagtggggtgagtatgcctgcccttgggcctcagtgcagtatatgctggcaccagtgttagcaggtcaggtgggttatttttgggggacctccttgtagcttgctcaaacgctggtagtggcagtggcgaactgggtgggtgggtgaattcttgggctcctgggca

SEQ ID NO: 7516 - DNA, 1165 bp, Homo sapiens
gcctctcccaatcttaccccttttttgcatgaatggctaaaattcctaactcatttctctttcagttcttagcttctttagaggcacttacccttgacaccctccccttagtctaaattttatcacccatttgggttttgttactctttcttcatagcacctatcacagtttgtaatgatagcagtgtgtagaaaatcttatatttttagaagcagcagaatgtccccccttggaaaaaaatctgtttaattgactgggtgcttggagaagtttgaggcagtttgagtcccacaggtgacatgctttatacaaagacgggcactggaatgcagcccccatgaaatcgccatgcatcttgcccagaccttcacctcaccgcagggtccttgaccatgtgggcccacgagccatcctggaggatgttccccagatgccccatccacactcagtcctcaccctatgtacttcccttgctgctgtttgcttaatcattttctaaagaacaaactcaaagttttatatcattgtgtagtatctgaaatcacatttgattggttttctttttttagtttatttgtacatatttatggggtacctctgatattttgttacatgcatagactatgtaatgatcaagtcagggtatttggggtgtccctcactgtgaatatttatcatgtctatgtgtcagaaacaatttaaacctctcttctagttattttgaagtatataatatattgttaactgtagtcaccctactctgttgttattgaacattagaacttattgtgactatctaactgtatttttgtacccattaaccaatctctctttatcccccactcctgcctccatgcacacccttcccagcctctagtacctataattctactttctacctccatgagatcaaatttttatagctcccacatgtgagtgagaacatgtaatatttgtctttctgtgtctggctaatgacctccatccatgttgctgcagatgacatgatttcattctttttgtatggctgaatagtatttcattgtgtatatgtgtcacgaattctttacctgtttgtccattgatgtggacacttaggctgattccatatcttttgcgaacagtgctacaataaacatgggagtacagatatctctttgataa

SEQ ID NO: 7517 - DNA, 1927 bp, Homo sapiens
ttctcatagtctggaggctggaagtccaagatgaaggtggcagcagggctggtttctccttggcttgtagatggccatcttctccctctgtgttcacattgtcttttatctgtgtgtgtctgtgtcacaaactcctcttattacaaggacaccaatcctattggattagagtccactaggattagagtcacctcctgagtagccgggactactattgacctcatgtaaacttaattacatctttaaagtccctattccaaatagttatattctgaggaagaaggagtttaggacatcaacatctaaattttcacagaagggaggggaatacacagtttagcccatgatagttgtgtatcagggaggtcaacctaaaggcaaaaaggccaggtgggatgttattcttcaagaattctagctgagaaatgaagagaatctaaactaaagcattgtcaataaaaatgaaaatgagttgtgattgagaggaggaagaatttgatacaagactatgtgactgaatgtggaggggcatgagaggaaggaggctggcatggctcccagatttccctgctccaggaggagaaactgagttgaaggagatgtgagctgtgtgatatcccgattgagtattcagcactttgttagccagacaccccaggactggtcagctgtcctactttcttcactctttcgccgtgactcctcataatgtggactgtgtcacatacaactgagcatgcagcctctccacttgaaatgtgtcttaagacacttatcaccatctgaactttcacgtgaaatgtgacttaagacacttattaccatcttattttgacagtgaattctaaactcttattttttcctgataataaaaaattaaatctcttaaataaaatgttaaatcctttaggacagggactattgtgtattcattttgcccaaatgtgcaatatttactgcctggctacatacatctagtatatagtaggttgtgctttgcaaattctagttcagggaatgatttgtcagtagggttgttgtgatcaattacttgttctttgcatattttaatcaaagattgataattaaaacctgtttgattttcttgcagaatgagaagactttgggacatttcatgagtcattcaagcaacatttctaaggtagagtgccactgaaaaatgttatttattaccttgagtcttttctgttcttatgccttacatgtgtttatactcttttttttttttttgaaaagacgttagagttcttgatacatttctgtaatctgttctgggaccataagaggtatgtggcagttacatttttctggtaaggcaattttgagtgtgtgttgggggaagtgacttctgggagaaaattccattttttccagaaaaccatatactttaaggcagaagaaatctcaggcacaggagagtctgttgccacaattaggaatatatttgactgaaagtaacagaaagctaactatgatgacttacataattatggatttatatggttcatttgacaaggtgtctggaagcaggtgatccagggcagagttgatcacagattgtagtgcacccgattctgtggctgttcggggtgccactgtgtaacccgcatggacctaggggaactgaacaaggggtgaaggcgggaataaaagacaagagacaaaagagtatatttggaagaaggaggcatcttggctctagtggacaagggccctgagctttacacagccctccatatttattaggcaaaagagatagtgagaaggcgggtggaagaaggggtcagctgctcagtctagagtaggcttgcaagactgcattccttgaacaaaaggttctagatgttgcagtagagaaccttggcgccagggagtgattgcctccagcaaaccttctgttggcagg

SEQ ID NO: 7518 - DNA, 1026 bp, Homo sapiens
tgcttggcaaactttacttctcattcagaaccaagatgccattctgactacagggcagagtggtgtcacacttccaccttgatatactttatgtatgtgcttcttttatgtcattcttaagctcttccctagtttggacatttctcaccaaaacactttttcagaggagttcagtggtaatacacgttgagcgtccctaatccacaaactcgaaatccagcatgcttcaaaatctgaaactttggaatgtcagcatgacactcaaagtaagtgctcattgtcacctttcagattttgaattctcagatttgggatgctccacctgtaagtataatgcaaatattccaaagtccaaaaaactcagaaatatgaaacagttctggtcccaagcatttcaaataagggattctcaatattatcattggcatatggttaggagtgagattttggtccatattctatgcctgacacagttgttcacacatagtagttgcatagtaaataagtgtggaaagaatgactgatttgaatgagttttgggacttgctttctggaaaatatctctgatgttgtcctgcactatatattttaagtccaaataaatggacatctaaagagcagtgtttaggctgggcgcagtggctcacgcctgtaatcccagcactttgggaggccgaggcgggcagatcacgaggtcaggagatcgagaccatcctggctaacacagtgaaaccccgtctctactaaaaatacaaaaactgagccggacatggtggtgggcgcctgtagtcccagctacttgggaggctgaggcaggagagtggcatgaacctgggaggcggagcgtgcagtgagccgagattgcaccagtgcactccagcctgggcgacagagcgagactacgtatcaaaaaagaaaaaaaaaaagaagaagaagaagaagaagaaaaagagcagtgtttattgggggaaaataaaagatgatctggtctgctggaactgaactgttaagatcctaccaagtagt

SEQ ID NO: 7519 - DNA, 1031 bp, Homo sapiens
aaatatccaaactattttgagcccttcttaagaggttctctttttacattatattcatattactattcttgggatggggaatggaaggaggccctaaaacatcggtagaattgttcacgtgtatagtccataagaaaagtttttaataacttggttaagtgctagtggattcacaactctactgtcaactagctgatactccagggaaatttggtgtccatgttttgacttcttgttgtgctactcaccactgttgccaccattgtgccaaactgtctgtccttttaatttgcttttacaatccagtgttcccatacatactgcaggccaaagggtgagcctggctgttaataaggaggtacatacatatattttagcagagtgaatagatttagctgccttggcaggtgactggagagctgtctgggagtgttgagagaaacagctggggttgccattttataggattgaggctctggattgggttggactaaatgatctttatgtcgctgttaattctgaggatttttttgagcactcttagccacacttgattcttttttttttgagacaaagtcttgttctgttacccaggctggagcacagtggcgcagtctcagctcactgcaacctccgcctcccaggttcaagcgattctcctgcatcaacttcctaagtagctgggattacaggcacgtgccaccacgcccagcttatttttgtatttttagtagaaatagggtttcgctgtattgtccaggctggtctcgaactcctgacctcaggtgatccacccaccttggcctcccaaagtgccgggattaacaggcgtgagccaccgtgcctggcccacacttgattcttaataatcaatcagtttgagccaggcacagtggctcacacctataatcctaccattttgggagccgaggcaggaagatctcttgaggccaggagtttgagaccagcctgggcaatatagtaagaccctgtctctacaaaaaataattagcaaaatgaaacatactgga

SEQ ID NO: 7520 - DNA, 1081 bp, Homo sapiens
ctcactgcaacctccgcctcctgggttcaagtgattctcttgcctcagtctcccgagtagctgggattacaggcacgtgccaccacacccagctaatttttgtatttttagtaggcatggggtttcaccacgttggccaggatggtcatgatctcttgacctcgtgatctgcccgtctcggcctcccaaagtgctgagattacgggtgtgagccactgcacctggcttagtgttagtgtattttatgtgtggttcaagacagttcttccagtgtggtccagggaaaccgaaaattggacacccttgctccaagatctggaatatgacaaggatgcccactgtcaccactgttattcaatgcagtactagaagtcctagctagagcagtcagacaagacaaggatataaagggtatccagattggaaaggaagaagtcaaattatcgttgtttacagatggtgtaattttatatttggaaaaacctaaagactccacaagaaaattattagaactggtaaattcagtgaagctgcaggatacaaaattaacgtaccaaaatcagtagcatttctatttgtcaacagtgaacaatgtgaaaaagaaataaaaaagtatcccatttggaagccacacataaaataaagcacctaggaattacccaaataaatgaaaggtctctataatgaaaactataaaacactgatgcaagaaattgaagaggacaccaaaaaatggaaaaatattacatgttcatggattggaagaatcagtattgttaaaatgtccatactacccaaagcagtctacagattaaatgcaaaccctaccaaaatatcaatgacattcttcacagaaacagaaaaaacaatcccaaaatttttatggaacaacagaagacccagaatagccaaagccgttctaagcaaaagaacaagactggaggaattacattacctgacttcaaattatactatggagatacagtaaccaaaacagcatggtactggcatgaaaacagatccatagaccaatggaacagaatagagaaccgagaacccagaaataaatccacacacgtac

SEQ ID NO: 7521 - DNA, 1034 bp, Homo sapiens
aagcgccgccagagtgggcgccaaggtcgaggaggcgccgagagcgagcgagggcgcacgctgtcacctctcagaaatggaaggaaatgttctactcttgaggagactaaggaacagcaaggaagtcaggtggctagagcaaagcaagtgagaggacgatgggaaataggggctagatcatgcaggacttagagccaaacacttctggattttattctgaattgggaaaatactggggttgacatggttttgaaaagtcactttggcgattgtgtaggaaaaaaaagactgtaaggaggcaaggatggaagttgagagaaatatacagcagtcatccacgtgggagatcctagggctgggctgggctgtagcagctcctggatgatagtcacatgctctcctttctcaaaccaccagcacctctctccctcttgtcatgctcagcttttattttattaaactatcaacaatcgaagagaaattccacatgatacagaaacatcggggattctgtctaagtcttggtgctcactgctgaggaagaagactttaatcaggtgttgcagccaaggagatgggaggtcagtctcaaatccatctccctgactaaaatttggggtttatatagcggggaagaagtgtaacagtgtgttagaaaacacgaactagggagcggtaaggaaacaaaaggaagggtctggcatctcattgtctgaatgtggtaatctggtaagtttcaattatttgatactttttcagaggccaggggtccttcccgagaaaggaactcagataaaacaaatgtaagtttcgagctttaagaaaagaagggtcactttctatgtttggccaaaagaactgtctatgggactattgggtcagtttcatgttcaacaacgaatctaccaagctatctgtatctgtggcctgctattccccttctcttgttttttccttatctaaggatgactcctccaatctactcaagattttccttcttacagttgtcactttcttgtacatccagttattac

SEQ ID NO: 7522 - DNA, 1047 bp, Homo sapiens
tgtattgtgcgtgtgtgtgtacacacacacacaatatacacatacacacacaccatattttgcttatccattcatctgttaatagacagttgtattgtttccatgttttagctattgtgaataatggtgctgtgaacatgggtgcacatatatgtctttgagacactactttcaattctttagaatatatacccagaaatgaaattgcgggatcagaaggtatttctatttttaattttttgaggaaccgtcatattgttttccacagttgctgtaccatgtttcattccatcgacagtgcaaaaggattccaatttctccacatccttggcaacacttgttattttcctatgtttttgctagtagccatcctaatgggtgtgaggtgatgtcactgtggttttgatttgcgtatctgtgacgattagtgttactgattattgattccctaattagtgaagttgatttcctaatgagtagtttcatgtgcttattggccatttgtagatcttctttggagaaatgtcttttcatgttttttttttccccgaaaccaaactgtatccagctttattaaagatactttccataaacaatcatggtatttcaggcagtacatggacagacagtcgttaacagtatacaacaactttcaaactcccgtcttcaacggactaccaaaaatcagaaagccactataaaacccaatgaagtatctgatgttctgaacggggaaagtttagagtgagggttgacatttcacatttagcatgttgtttaacaacttttcacaagccaaccctgactttcaggaagtgaaatgaaaatggcagaatttatctgaagatccacaatctagaaatggaaccactgctcttttgacaggtgctatctcagtggcatcactggaaagtccagaatgcctgacacattaggaaatccgatgcctgacacattaggaaatccagtttgtctattttctccttttgttacctgtgcctttggtgtcatatccaagaaatcaccaccaaatccaataccatgaag

SEQ ID NO: 7523 - DNA, 1002 bp, Homo sapiens
gtttctttttcgtttttttttttaaagaaaatttgcaattttagttggtatttcctcattagtccaagagtattttaatatattttgaaaatgttctggtggcagaggctttttggtttttctttttcttttcttttcttgtttttagaggtgggagtctcactatgttactgaactcctgggaccaagggatcttctcatttcagcctcccacgtagctgggactatgtgtgcagcaccatgccgggcttgatttttcattgtttttaatttctagttttattgcatggaactcagagaatattgtttgtatttctactttatagcattttattctttgggatctaatagcacttttcatgaatatatacctcagaagacagtttattctctatcaaaaaggtaaaagtttgctagatatttataagatagaccttattaaagtttttttttttttttgtcaacttgatctgtcttagaatgagaatggtaatagatgaaggtctattattcataggtttctgtgtatttctcttttcatttctcatactttttgctgtaagaaagtggtagttgtgtaatttggtacataaatattaataacatattttcactgtgttgctagttacaaaagtagtgaaatgtttcatctctatcacattcactgactttccccttgaattttccttgcctgatatcaggcccatacctactggtatcttcttggtttcatttgcttggtataccttttcccatgtctctatttattaacttttaagttactttgttttacatatttcctttatatacactatagagttggtttttgctttgtgagccagcttgaaattttaaaacaggtaacttaatcacgtttatatttattgatatgacttcatatttggtcttaaatgtcttattttgttatacttacagtttccttctctatgctttcttttgtgtgtatctgtatatatgaatgtgtaagggtgtattttttgg

SEQ ID NO: 7524 - DNA, 1096 bp, Homo sapiens
gattctaccattaaaattttttaaattttatttttgtggtaaaatacatatgtcataaaattatcttaaccatcttaagtgtacaaacagttcagtaatgttaagtgtataacacagtgttgtgcaaccaatctccagaagttttttgtcttgtaaaattgtcataacgtgtcagaatttccttcctttttaaggctggataatatttcattgtatggctatataccacacttttttaatccattcattcctcaatgtatacttggattgcccccatcttttggctattgtgaataatggtgctatgaacataagtatacaaatatgtctttgagaccctactttcaatgttttcttttagtagtttcatagtttcagatcttagagttaagtctttagttcatttagatttgatttttgtatatggtaaaagataaggggtctaatttcattcttctgcatgtggatccagttttcccaacattatttattgaagagactatcctttccccagtgtatgttcttggcatctttatcaaaaataagttcactgtgggtctgtggacttgtttctgggttctctgttcttttccattggttgtgcatctatgttcatgtcagtactgtgctgttttggttactgtagctctgtagtataatttaaagtcacataattgtgattcttccagtttttttttgtttgttttttttttgttttttttttttttttttgcttagatggctttgactattctgtgtcttttgtggttccatgtaaattttaggattattttttctgtttctgtgaaaaatgtcattggtattttgatagagattatgttgaatttgtagattgcgttgggcagtatggacattttaacaatattaattcttccaactcatgaacatggaatattttttcatatttttgtgtcgtccaatgttttatagctttcattatagagatctttcacttttttagataagtttattcctaggtattttattttactttatttgtagctattgtaaatgagattactttcttgatttttttagattattgttggtatatagaaatgctactgggttttgt

SEQ ID NO: 7525 - DNA, 1048 bp, Homo sapiens
gttgttcaaattcagtatattatatcctgtcactgtaccaagatgcataaaacttgatccaaattgaagacttatttcaattttccatttgtagttcctacagacgatccacttaggaagatggcagagtacttggattccagtcgagttgaggtctgggagaagacctcctgcagcaaacaagttacatttttggtataccaagaaggagatcaattgaatttctttcctgcagtagataggggagatggcactttaacaccgttatctgactcttcaaagaaaatagattttcatttgcatgtcctacggagaaaaggagaacatcgtatgaggtactccataaacttttgtttaccttgtgttgtcaaaataatctatatatattaacaaatgtcatgcatctcattcctgccccagcccccaatatataagtctgaaattgtccttcgtataattgatatgataaaactgaggtttttttagagtgggatgttttcataaaaagatttgtttctgttagtctgtgaaactctaagatgcctaatagattatagaatcctgtcataatagtgtgttattatacaaccttagcataatagaaagggttaaacctaaagttgatacctttttttctaaatttaactctgctccttaaaggcagataaatctctttacttctctggtcttgttttcctactctataaaagggagataaattgtaatattctaaaatcaggaggaaaaaccctacatatatttagctaagcaatagaagaattagagaattggacaaggcaacctctcagttagttgctgtgcattctgagttactatgatttttttatctcctttcacttcaagttattaagcattcactcactgaacttttatggccattcactgagcaaggcactgatgttgtaaagatgattattcctaccttcatggagcatgcagtctgctatgaagagtatcagtgatataatgttggtgatgttataaaaagatatcaagatctctgggagaatagatgacagggccttta

SEQ ID NO: 7526 - DNA, 1050 bp, Homo sapiens
gaagaataatagtatttatctcaaagggttgttctcaggattaaatgagttaaaggtgaagtgcttagcagagtgatcctcctgcctcagccttccaaagagctgggattacagacctgagccaccaggcccagccctcttcctttgtttatgtagatctgagtttctgacctacatcctgttttttgtgaagaatgtcttttaacatttcttgcaatatgggtccactggcaacaaattccacctcttgctttctttatgtagatcttagtttctgacctacatcattttttctgtgaataatgtcttttaacgtttcttgcaaaaaagccatcttttaacgtttcttgtttgtctgaaaaagtatttctccttcatttctgaaggataatatttcagggtatagaattctaagttggtattttttttctttcaacactaaatatttcactctagtcttttcttatttgcatgatttctgatgaaaactcccctgtagtaattatctttgcttctctttaggtaaggtgtttttttccctttcctggctgatttaagaattttgtctttgtctttgcttttctacagtttgatataatatgttgaaggtgtagattctttggtagttatcgtgtttggtattctctgagcttcttggatctgtggtttggtatgtttcattaattttggaaaatctgggccattatttaagtatttcttctgtctcattttttcttctgatattctagtggcaccttttgaaattgccacaacttttgaaattgtcccacagttaatagatgttgtttttgtgcattcttttttctcttaacagtccgttttgccaagtttattttcttttctttgtttcttttatttatttatttattttgagatgggatttcactatgttggccaggctggactcgacctcctggactcaaataatccttgtgcctcagcctttcaagtagctgggactacaagtgcataccactgtgccttgcctaggaagtttctgttgccatttttcttttttttttttttttt

SEQ ID NO: 7527 - DNA, 1071 bp, Homo sapiens
cagggcaaaaagcatacgcatgcttcccatggaccagagaaacctggcctgggttgtctcaaatcctgtccacaaggcaactccagaagaaagaagccctttacatttccataaaacactttagaatcagctagtcaatttccacaaaataaagtgctagaatttgattggatttaattgattatgtagaacaatttgggggccatttgacatcattaaaatattcaatcttcctattcattaacatggtatatctcttcactttaagtcttttgtatgtttctcagaactatttttgtggttttcagtaaagtgttcttgcacatccttcaatagatttattcttagacgttttatatttgtttatggctagtatatacagattctgttgctacaaaactatgttgaccttgttatccagtgagaggctttgtgacattcatttaaattgtaataatttgcagattatttttgtataatcatgtcctctgtgaatgacagttttatttcttcctttcttaatctttatgccttatttagctcttgccaaactgcagtggctgagcaattggacaagataaagaaataaaagtgatccagatcataaagaaagaagtaaaactatatctgcacatgacataatcttgtctatggaaaatcctaaggaatccacacacaaaaaaactactagagctaataagtttggcaaggttgcaagatataaaattggtatacaaattgcagtggctaggacctccagcagaatgctgactataagtagtgatagtgggtattcttgtctcatcctcaatctcaggggtggtgggtgtggcatgtggagagttgtcaatattcaccatgaagtttgatggttgttataggatttttaatgtactcattaacatatattctcaagctgttaaaaagatttttttaattacaaataaggttaaatttctctcaaatacttactctgcaccttttgaaataattttatttttctcctttattctttggatgtgatgacttatactaattgactgttgaatgtcaaaccaaacttaacattct

SEQ ID NO: 7528 - DNA, 1080 bp, Homo sapiens
atcaaggaggctccagcattttgtccagaccacaaataagtgggaagctggcatttcaacctagtcggctggagtgcagagcctgggtgctggctgcctgctgtagagagcaggatgccagaaagcctcagggtgtcctagggttgggatctttgtctctcagcttgttccaagtggccctggaggacttcagcccacacaccctgagagaagaggaagggagctcacactggctatgggctgcccttgccaggagtttggtacaatctggaggcagcagagactcagaggttcagcaacttacctaacaacacacagtggggctgggggcagcgcagcccacctccagggtaagctcatcgctggatgctgttgccaggtaggcctcagcgcattctacccactagatctgagttgtcttggttggggaggggggcataattaagactgaaggaagaggcagtccctaaggtcctggatcccagccctagccagggagctgttgtacacacagctcagagacaaagaccatccagagtgaagaggccaactgttaactgggttgcttgtgtgattggacagactcaggttgtcagctccccagccctgccctgagaaggcagtctcatgactgtctctgcactcccatccccaacaggccccacagctaaaaaccacccctgaggtggggtgggcattggcagggccagggcttcacctggagctcaatgtggcagtgcctgccggagccttctaatgggtggtgcctgcaggcctctagccatgtggggctcctgggtaggggtggagggcactctgcagagactggccagtctgactctgaagacacaggcagggaaaccatggctcagagcagagaaaacatgtgggcagcagaccctgcctgcccacctgagagaagcctgccggcccctggttggtgagagcttctgctgagcccttggcccctgctctttaacatggacagggctgctcagagctggcaggtccctgggccgtgggaatgccaggctctgttggtaggtggagggcagacattccttggcttgtgacaccctg

SEQ ID NO: 7529 - DNA, 1049 bp, Homo sapiens
gcagaagactgagactagaccccatctctcacatttctctgtacagaaatcaactacaaatgtattaaagacttacacataaaacatgaaagtatgaaactactggaagaaaacatagagggaaagactccaggatgttggtctagtcaaagactttatggctaaggcttctaaagcacaggcaacaaaaacaaaaatagctaagtgggactatattaaactaaaaaatcttctgcacagcaaaggaaacaatcggcagagtgaagagacaacccgttgaataggagaaaaatatttgcaaactgttcatctgacaagaaacgaatatccagaatatacaaggaactcagctggcaaaacaacccattaaaaagtgggcaaaggatcctatagacattccacaaaagaagacatacaaatggtgaagaggtatatgaaaaaaatgcagagaaatgcaagtcaaaaccacaatgagatatcatcttaccctagtttgaatgcctattataaaaaacacaaaaaaaatagacactggagaagatactgaaaaaagaaaactcttatacattgttggtgggaatgtaaattaacacagtcattatggaaaacagtatggagatttctcaaaaaacctaaaagtaaaaccaccatgtgatccagcaattccactgctggtatttatccaaaggaaaggaaatcagtatatcaaaggaattaacccatttatgccggaggttgcaaatttttgggggaaaaatcagaccttggcagtgaccttgagcagtaggatatgcataactcccacaagcttagcattccaataatggaacacttggcataaatacgttaatgtaccccaatgtttattgcagcactattcacaatagcaaagatatggaatcaacctacgtgtccatcagtggatgaatggataaagaaactgtggtatatatacaaaatgttatactattcggccatagaaaaggaatgaaatcgtgtcatttgcagcaatgaatggaaccagcatattaagtgaaataagctaggca

SEQ ID NO: 7530 - DNA, 1023 bp, Homo sapiens
ggctcaagcaatcctcccacctcagcctcccaaagtgctgggattacaggcgtgagccactgtgcctggtgcctggcctgtgacatgttaccacaaacttagtggcttaaacaatgcaaatttaccttatggttctgtaggtcagaagcctgacacaggtttcactgggcttaaatcaaggtgtcagtaggcctgaattccgttatggagggtctgagggcgagtccatttttcttgagctttccagtttctagaggttgcctgcattcatcagctcctggctcccttcctccaccttcaagactaaaaatgacagatcaggttcttctcacattttatcccttctgctgtagacacatctctctcttacactcctcttctgtcttcccctccacttttaaatacccttatgattaccttgagcccacttggataatctaggataatcttcctagtttaaagcagccagctgattagcaactttaattccatctgcaaccttaattcttcactgtgtaacctaacctaatcacaggttccagggacaggcatgtggatgtctttggggggctgttattctgctaccacactgtacaaagataaaacacacagagaaaaaaaatttaacaaaaacagagcatcagcgagctgcaggataaccttaagttgtgtaatatacatgtaactggaatctcaagcagggacaggggatggaaacacgtatttgaagtaccaatcgccaaaatattccaaatgttatgaaaactataagctcacaaatctaagaagttcagtgagttccaagtataggaaacctgaataaaattgcactgaggcacgtcataatcaaattacccataactagtgaaacagtaaaaaagacacaaaacatcaaaaaatgaggatgatggcaaaattctcatgagaaacaatgcaagtagagcaacatcttaacagttgtgaaagaaaaacatttccaaccttgaagactttatccagtgagaatatctttcaaaaatgaag

SEQ ID NO: 7531 - DNA, 1044 bp, Homo sapiens
ctagactagtacctggggacaccaggaagaacagtcatacattccttcataagtcgtacattcctttcacagagacaggcagtaaacacgtatgcagacaaacaagctgctttccaatcaggataagttctatagagaaagtcgtgtaagactaattgggtgggagggcgcagctccttgacgaaggctctcacccagggaaggattctgtaatgtacatttgagctgaggctttaaatgagagggagtcagccatgcaaggaggtgggagggcatttggagcacctgagagaatgcaaagtttctggtgggaagagggtgagcttgagggagagagggtgctagagtggctgacagcaggacatgggccgggggaggagaggtggtccgagggacctggaggcccacagtcacatcagagttgggttttattccaagaacagtaggccctctgaagggtttccagcagttgtgctttgcccttaaggggctgcttttctttgctggagaggtggacagatgggtggatggatagatgggtggatggatggacggacagatggatggatagatagatgggtagacaaatgagcagatggatagatgggcagatgaacaagtggacagatggatggagaaatgggggagatgggcagatgaacaggtggcatcggcacaggcgtagccccttgctctgtacttactgagcaaagtttggtgctcattgcctccctctgccctccagggctgcctgaggtgtgagctcctgaaaccacatcctgggaggggcgactgctgctggaggagaggagaccaggctaggtgaaggagctgcttcctgctccctttgtcccagaggcaagggagacaccataaaggcagcagctgactggcgcacagaatccacaacagctgagttcaaatcctggctgtgccatttcccagcgtggtgaccctgggccactgaaagctcacggagcgtcagcttctctgtctgtgacacagaccatgtgtctaccttagaggatacggaggtgcttacca

SEQ ID NO: 7532 - DNA, 1024 bp, Homo sapiens
gaacatctaatgtccttttatttttcctgaaggagtccctttaggatttcttgtaggtctgatcagctaggacgaaggactgaatattcttggtttttagttctctgagaatgtcttctccatttatgaatgatggttttgctggatatagaattcttggttgactgtcatttttttctctttcagtattttgaaaatgttgttctgttgccttctggtttccatggtttctgatgagaagtcaactgttaattttaatgagaatctcttgtattttctcttgtttctttcaagattctttgcctttggacagcttgactatgatgtgtctaggtgtaaatctctttttttcaacaaatttgggaagttctaaccatcattcctttaaatattctttctaccttttttctctcccctctccttctaggactctcattttgtgtattttggtgcactttatggtgtcccatcaatttctgaggttctgttcatttttcttcattattttttagtttctggacctcagactggctattctcaattaacctatcttcaagtttactgattttttttcttctataagctcaaatctgctgttagagcccaaatagtgatttatgtatttcagttattgtacttttaaattccagaatttatatttgtttctttttataatttttatttctttattgacattctgtaattggtgggacatcattgtcacactatgttttattatatagacatagtttcctttagttctttgaacatatttacagtagctgatttgaagactttatctagtaagtataacatctaggtcaaggacagtttatatggactgctattttgtgtgtgtatgggccatacttacctatttttcttgggtatcttacaatcttttgttgaaacctagacattgtaaataatataatgtggcaactctgcaaatcagatttaccttccctcctcaggttgctgttgtagctattttgtttagtgaatttcctgaattaaatctgtg

SEQ ID NO: 7533 - DNA, 1095 bp, Homo sapiens
ccggaggtccggcctcccgggggctggggcccggccgacttaacccttgactgactgaaatgatccctgttgatcgttgggaacatagtggtgcatccctttactgcagcgctccctaaactcacctgaccctaacactcacctgccgcgcttattaagcatgcagattcccaggccccaccctggcctgctggataggctctggggaaggccttgggaaactgtgtgtttaaggagttccccaagtgactcctatggccaggtgagtctgggaagccttgcctgtaaaccatatagggtaaggcaggctctgccagaatgagcactaggtcttccttcctccgaaaagtgtattctgcatccagatacagaaaaggtcaggcagccttcgaccttgtccaggtgagaatggtgccatcaatgtacaggctggtttcacaaagggtttgaagtagcttataacatatataatacttaactatttaaaaacctaaacaggaccccacatttacacaggacgtagagaggtcaagggaaaatggagcccagttaatctggctatgaggtatgatctgtggttgagcctctttgcaaccaaaaccaagtgaaaaatgtgagtgctgtagttgcaaggttctcattgtcccagagcaacagtttcctcagcttctgattgtagaaagaatgaaaaagaattttgcacatgaggcttcattcttggaagcaggggccgagagccctgtgtgtggtgtcttcactatgacaatagctagggctgcagtagggtttagagggcaaggtcttgctgcatgctccccgagggcaggtcagagcccaggatttcacccccgccagggcctggacgagcagctttagtctctcctgacccctcttcagtaaacatggtaaagagtgtcccaaaagcaagggtggatttacaaagtcttggttagagaggacatagactcattaagcagcctcagaagagagccaggggcacctcctcttgcttaggtctgtcctctggggctgtggacccccaaggccagctgctggcttcaccagtccaggtaaggaaaaagcctggtctgggag

SEQ ID NO: 7534 - DNA, 1011 bp, Homo sapiens
gtgccttgcagagaagccagtgtacatggcagggccggctctgctgtcagccagtgttttctttagcttggcctcccctagaagcagagcctgagacaaggatctggcatgaggaagggagtcagagaagggaagaaagccagcccagacatgctagtgagtgggttgctgctgcaggcatcctagctcagttcccacaggggcttctggacacagtgcagaacaggcttcagaggggtctcatccaagaagtgaggctggggctctacccacccactcccaccccccaagtccttgagaactgctttctggggagtaaccgacatttctagcctaccctcacatggacaaaactctgcagacagagacagccttcagggacagttgcagatgcttgaggaaggagaccactggcagcgtgatgggaacagtgagtgctgaggagtctgggaagggtaccaagagtgtcagctgaatttagacatcctgggaagtggtggctgtgaactgagtgtgctagggcctcactgtggcccagtgaaccagtaaatctatgattggtcgcaaagcagtaaagccaccccagccaccctgagaaatgatctattggctgtccactgagggagcaccccaggctcaggccatgagtagaggctctttgggaacaggtatgagaagatcctgcctgggataggggcatgtctacctttgtcctgtccataccagagttcgcaggggcacaggcaaaagttgaagtgcagaaacaccctttccaactatacgcgcctgtgcaaaattcaagtacctatggtttcacttgggtattccttttcatctaatgcaagaatctttgtggtaaaactgcacatcagaaggtggtaacaaagggatcctggggtatggagtagaaaacagaggttgactgtggaaccaggagaaaaggcctcagctattcagatagagaagaaatgcaagtagtgacgtaggcagggccctgccatctaggcgagg

SEQ ID NO: 7535 - DNA, 1031 bp, Homo sapiens
agaaaataccagataaagggcattctaaatatatttcttttctatagatgtggatctcctgttactggaaaacaggaattagcttgtctgcttgaggatgtggttggttctttataaaaaggatacagaagaaatttgcacagactgccagcttcattatgctgccgacagcttccagcaaaaggaggacgtttgcagccagatatttcagtaagaatttttttatgttctatgtgggaaatgattacctttgcatttgacttcttgcttgagggatggggtccccggaggctgtcttggtcttgtggctgagagcaccaggcggcatctgtggtcagggttctgacctccttcagctcctggaaatggctgatggcacaaaccccacccctgaactatggcagctgctctgtgtctgcctgaaaaacagagacttcagggtcctgggctctaatgactcagggctctgattgcattcagagtctgtaaggactcctatgtccaaggaccgctggggcagtaggcaagtccttcacaggggaacgctgtgtgcagctgaaggctactctgcatctctgcttggaaaggatccagccaaggggctagtagagaaatagtgaggacatctcagtaaccctcactaaagtgtctgggaggtaactattagaccaaatgggatggctgtgactgtctgtttgggtccctcagtaaagtgcctgggagataattgttagaccaagtgggatgactgtttgtttgggtcacaggcaggtgctcgctgggtgggctgtgcaggtgaggattgggtggattgtgcaggtgatggttgggtgggctgtgtaagtgatgatttggatgggttgtacaggtgctgattgggtgggttgtgcaggtgctggctgggtagactatgcaggtgatgattgggtggattgtgcaggtgctgactgggtgagctgtgcaggtgaggattcggcttgttgtgcaggtgctgactgggtggattgtgcaggtgctggctgggtggacta

SEQ ID NO: 7536 - DNA, 1048 bp, Homo sapiens
tggagcaaggttgtgagagccacttatgtttgtaagctgcttatagtttgcaaagtgtgttcctggtatattgtatttttcccctgaattcaacacatacatattttaagtactctctccgaggaaggaccaggagttggtctaatttcagcccattctaggacttcctagctatttaacgaaggcaggggcgtctcctgctgcctccttatacccagacaggcttaccccctcatgctcttcatccatatcaagttgcctttcatcctccagtgacaccacatcactgtctgccctgcaatctgtgatgttcagacaggctctgtgttttcttctgagtaactgtgtgactctgcagctcacacactgacatctcgaaacagagagaagtggagcttttaaacatgcacaaggccaagtcagacccatgcagaacagatgaccttgcatccaccctctgagcgctccagtacactgcatgtgcccctgccgggttgcccccactaggatacatgtttccctgtttttattttttgtttgtttgattgtggtaaaacttacataacatttaccattttaactgttttcaagtgtacagttcagtggcattaaatgcatcacattgctgttcaaccacctctgccatccatcccagaatttctccatcatcccaaactgaaactgtccccattaataactcctcatccccctctactcaccagcttctaggaaccaccactctgctttctgtttcttttttttaaaaaaatattttattttaagttctgggatacatgtgcaggatgtgcaggttcgttatacaggtaaacatgtgccatggtgctttgctgcacctgtcaacccatcacctaggtattaggccccgcatgcattagctatttatcctgatgctctccctcccgtgccccactgacaggcctcgttgtgtgttctcttccctgtgtccatgtgttctcattgttcaactcccacttatgagtgagaacatgtggtgtttggttttctgttcctgtgttagtttgctgag

SEQ ID NO: 7537 - DNA, 1030 bp, Homo sapiens
aatcttgccagttctagaaactgtaaattgctacacaaatgctctgtgttgacattcatgctaaagccagtctgcattttcaaaatgaaaatttcttcactatttaaggctttcattgcaataactttaaaaaccaaatatttgtccaccaacttagccctacagtaatgttcccaaagactcatgagagtttatggtttattggaaagggtccaaattggaagcagatattgattttctgggagcaaactggtctgcctttacaaagtggaagttcaccctctctggataacacctgtgtctcattcctccctctctgccagatctcgaaggcactgaataaaccatgcagcttttgaggaagaaagaaccatttggaagaactcactagaacttctttgagcatctctttgggaggggaggatatatggttagcacaccatttatataataattatcacagggatttttaattttatcatggcagtgttctgacagatgtatagtgttttgagggcagaggatgatctcctaatttgcccaaagagccttatgggtttgtggggctctgggggtgccaaatgggaaggagagggggcacatgaaaaggaaatggcgggaagagggcaacaggccagggggtaatatcttcccaggccccttaggcctctacagaacggaaatgaacttcattcacccccaaacccacccacttaaatccaaagagagcttagggttattatgcatggacaggaacacattctaccaagaacacatgctcttaagagctagtagctcccagttagagtcaaaccagtcattgttatattatagattgaatccagcctctttctcccaaactgtggtcatcactgcatgaatccacactaaggtgtgtgaatgggaacctgcagattatctcctcctactgaaaatgctgcccaggggaatcttggaagctatggacagcatccaggcagagctggtcccactgttatctccagaagcaaatgcccaagctgtgctcaga

SEQ ID NO: 7538 - DNA, 1102 bp, Homo sapiens
ggccaaaaaagaatctgtctcttatcagtagcagaaaaggactttgaagcacattagaaagcagtgatagaattctgagaggattttaataataacccaaatcccagcaaaattatttccagaggacatgcatttcaggtttcttgaaggatgtttataataagccagagaatttctcttgttgtcgttaatgtgctagaactggtttcagttaaattttacatgaaaaggatatattaacctgcataaaatatgttcataatctcgatttaaaattaaaaagaagaaaaaaagccacaaccacatgtacaatatattgccccaagtaaaagccttgggaaaaaaatacaaactttgcttgtaccacgctagtaccatttttgcagagataaaatttctatgctcccctaggtacacatgcacagcccattattgttgcggggagttatgtatgtcagctggagggaagaacggatgctgaggcttcagaagggatgggcgtgcggaaaacagaagccatttgctttcatggcttcctccagtctagagagagcaggtatctcggcgttcggtaagctggatgtgatcaagatcatatctctcccacactggaagtgagaatatcctgtatcaggaagtctgttaaccttgacacagggctgtcttttccctgcaggccacacagttagtgccaaggcccctctactgcctgcccctgccaacacttgcctagcaagaaccaggtcacgtgcttctcagctgtgtcagagaccaatagaaattcactggggctccaattttgttgaaggtgggctaagtgacacagttactttcaaggagtctttatttatttattattttttttgatatagagtcttgctctattgcccaggctggagtgcaatggcaaccgtagctcactatagcctcaaactcctgggctcaactgatcctcctgcctcagcctcccaagtagctggtaccacaggcatgtgccaccacatctaacttttttttttttttttttttttgtggagctgggatctcgctatgtgcccaggctggtctcaaactcctggcctcaagcaatcctctcactttg

SEQ ID NO: 7539 - DNA, 1030 bp, Homo sapiens
attaaaagagaatgaaaagaacacaatggatactagaaaacaaaaagtaatgtgtattcaacttatcaataataaatgttaatgaatttaatcaggcagagactatcagattggattaaaaatacattccaactctatgttatctatgctcccatagataacacactttaggctcaaagacacagatagattaaaaggatacaaaaagaaatagtgcaaacaattgccataagaaagctggactggctatactagtgtcagacaaagtagactttaagacaaaaatgctcctagagatagagacattttataatgataaaaaggttaacccatcaaaaagatataacagttgtaaacatatgtatgaacttaacagtatcaaaacacagaaagcaaaaactgacagaaatggaagaagaaaatggtcacaataataattggagactccataacctattttcagtaatggacaaaactagacacaaggttaacaatgaaatagaaaacttgaccaacgctgtaaaccaactagccctaacagacatctatagaacacttcacccaagcgctacagcatatacattatcaaatgctcatagaacattcttcaggataggccttatgctagaccatgaaacttcaatacgtttaaaaggatagaaataatgcaaagtgcattttgtgaacataatcacaggattaaattagaaataaaaaatgggaacatttgaagaactcacaattaggaaattgaacaacacactactaaatgaccaatagaccaaagaagaaaacaagaaggtaatcagcactttgaggctaatgaaaattaagacacaagtaaactgtacggatgcagctaaaaaagtgcttagaggaaatttataggtgtaaatgcctgtattaaggaagaaataaagcaataacctttcttccaccttaagtcactgaagaaagaagaacaaactaaacctaaagcaagcagaaggaaggaaataataaaattagagtagaaattaatgaaagaata

SEQ ID NO: 7540 - DNA, 1060 bp, Homo sapiens
gttatctgcatcacagtcttgtgtcttccgagaactattgagaaatctgtgcactttccatagaacttctggtggtgaaggaatttggaaactcaagccagaatactgctaaacaacattgcttcctaaactttcaagtccctttttctaacgggcatttctgattattaatttattattaataatcatgtttgtcaatggaagttggctgcacttgatgtttgtttgcatgatgtctacctcagaattaaaactttaaggaagaagaaactcttctctgaaagttaaaagttttaataatgctagctaaaggagaaaatacttggattgatttttttttttttggcaatctaattatattgtaaatcaggtacctaacagttactccttggagcacatttgttcctttacccaaaagatgctgtcagggagcacagttagaagtttgcagaacagaaatctcaatatttttttttattggtgctaaaaacaggtcttacattcagtcagacctgttcaataagttcatcaatatctgataacagcattattttgatgcttaaactttaaacatttatatttaccatttgccacccacaaaggtcaggtttgttatttgttgtttgataattatattaattttcttggaaagatcctcttttcaaggtactggtaaattggtgagtatttttattagtaaagcatgaaatagtatggtaataaatgataagacatgtatttgtggaaagctgtagggtattcagtttaccctggctttcctttaagcagagggcatctttttctctcctacagtcacaaaatgtgttatcattaaaaaaaatcaaattaaagccaaaagtaggtacataaaaaccacacacatgcatgcacacaaacatcactgcagcccacagcagacccagccgttgttaccatgaagtgacaccactccaggcctctcttgtctgcaggctggcaggctgtcttctctccagttgccttcgtcttgcgcctgcctttgcattccttgcgacgggctttcttgtttctgcggtttgga

SEQ ID NO: 7541 - DNA, 1076 bp, Homo sapiens
caccaagtccccaggctgcacacagcatggggaccatgggccaggcccgtgaaaccactttttccccctgggcctctgggcctgtgatgggaggggttgccatgaaggtctctgatatgccctgcagacattttcctcattgtcttggggattaacatttggctcctcgttacgtaatgcaaatttctgcagccagcttgaatttctcttgagaaaatggggttttctttcctatcacattgtaaggctgcaaattgtccaaacttttatgcactgcttcccttataaaactgaatgcctttaacaacacccatgtcacctgttgaatgctttgctgcttagaaatttcttccgccagataccctaaatcatctctctcaagttcaaagttccacagatctctagggcaggggcaaaatgccgcctgtctctttgctaaaacataacaagagtcacctttgctccaattcccaacaagttcctcatctccgtctgagaccacctcagtttggaccttactgttcatatcactatcaacatttttgtcaaagctattcaagaagtctctaggaagttgcaaaccttcccacattttcctctcgtcttctgagccctccaaactgttcccatctctacctgttacccagttccaaagttgcttccacattttgggatatcttttcaggagcgcacctccccactggtaccagttgcctttattagtgcatttttatgctgctgataaagacattacccaagactgggcaatttacaaaagaaagaggtttaatcaacttacagttctgtgtggctgtggaggcctcacagtcatgtcagaaggcaaggaggagcaagtcacatcttacatggacggcagcaggcaaagagagcttatgcaggaaaactcccatttttaaaaccatgagatctcatgaaactcattcactcatgagaacagtgtaggaaagacgcatcttcataattaatcacctcccactgggttcctcccatgtcacgtgggaattgtgggagttacaattcaagatgagatttgggtggggacacagctgaactat

SEQ ID NO: 7542 - DNA, 1097 bp, Homo sapiens
taattagcaaacttaataagcagcaaagttctcatttagagttttccttatgtaataggtaataatggaacagctagagtcaaacttctagaattgctttgcaaaatactgggagaaagttaattatgacgtatttactgagaggagattaaataaaaccagttaaatgagctgaagtccaaaatgagattttaggtagacatacctataggtaccagatagtaagtatttggacagcaaaacaacaaaactatcttcttttaaggtgggtagcccatcagccttgatattttctttgaaaaaaaaatgccttatcttgcatcatctttttatttatttattagagatggggtctcactctgttgcccagtttggaatccggtggtgcaatcatggttcattgcagcctcaacctccatggctcaagcaatcctctcaccttagcctcccaagtagctaggactacaggcacgtgccaccactcctggctaaattttttttttttttcttgtagagatgaggtcttactatgttgcccatgctggtcttgaactcctgggcttaaatgatcctcctgcctcggcttcccaaagtgctgggatttacaggcatgagccacctcatctaacctatcatcttttaattcaagtggtttttgctttagattttgtaacttgggatataatcttcataccattccctgttgttaagtgtttcttccactctccgaaaatttttttgtatttttccttttttaactttatttttaggttatagattaaacatatcattgatggagaaagaaaaatatcaacttctgttttttgcagggggaggggttaaggttaaattatttctctttgacccatattccttatttaaaatcttaatagctatgatcttttcgtacctttggtaaactccctgaatcaatttctgctttgaaatattaaaaagaccttttgtattgttgagtctttaaactgtgcttttttttgcatctgctagtaatatgacagaatcatctgttatgttctaattttgagagcagacctattattcagacttgtttatggccttaaaatttaattttttct

SEQ ID NO: 7543 - DNA, 1053 bp, Homo sapiens
agagggcggcatggcctgaggtcgctgcttgcatgggatgcgcttcttccgccccccgggagatgtgggagggggacggggtaatcccgaggccacagcaggctgcagtacgcattcgccgaaccggagagaccctttgacgcccctcggccacctggctcaagcaggccctagcagcccctccccagtgtcttggaacaggccccaactaaatagaattgcggtttgttgctgagcaaaagctcatctgcttctcagaaagtggggtcagagtagacctgctgctgagagaatccaggctctgctgctgcccagcttggagggccctctggggagaacccttcccggcctctgtttactgatctctgcaatgggtgcattagggagtagtcctcactagggcaccccagacagggttgtgtgtgtgggagtcttagtggccatggtgtcggcagttttctggggttgggttgaggttctgaggttgggttggggatgctatgtgaccttgtcctcagagaagagacccccaagagatacccagggcaactctgctggagtctggactgggcagggggttgcacagggcacctgactctcactccttgttgctgtccttgactgtatgggcaggaactagtagggctggcttgggctctggctctagatactgagccctcatgccctgctgggatgcaggtgggggtgggtggcaggctgccctcctgccaggctgggtcaaggtcacaacagtgcccagtggccaacccagactgtttagtgtttataaaacagtgttcctgcaccgggccattctggacacagccagactttgtccctatctggcccaaactgccccattcccctgtgggggtgggagtggcgctggcagagggagcagctctggctcagctgatgggaactgcatcgctaagagaaatctggcttacatattgactgcagtgatcagggcacagtcgctggaaccccacacagccctgtcactcaccagattagccagcttagcctcttgcacctcagtttctctgttta

SEQ ID NO: 7544 - DNA, 1050 bp, Homo sapiens
ggaaagatgaatgagggtaagttcagatctgagaagccccactgtcctgtttctcagacctgccagcgctcatccagtgtgcttgctacctcaggagcaaagtgtataacgagggctgccatgacagtgcataacgagggtgcatggacagtgtaccatggatagcctgttgttatcatgagcaaagaagttgtttctttaaagagtgttaaaaatcttgtttaatttatgttgggaaagcctttcaggcatatgaaattcatgctgtattttcaaaagccaagtctgagcatatgccatttagattaagataaaactggagtgttctttctaaggttttttcaattacatactttaatgtgcctctggtctgaccttttgctctccaggagatgtgtataagctgttgctacgatactacaatgaagaatgcagaaactgttccacccctggaccagacatcaagctttatccattcatataccatgctgtcgagtcctgtgcagagaccgctgaccattcagggcaaaggacagggacctgaggagccgagcgaatagcatctcctcccacctcccaccagagacgtcctgtttgagctgtcaggtgtaatatatgaattgacttaagttaatataaatgtgtacataatccacatttgtagtcaaggacgcaatctcttccacacatgtgcagttgtcagttggtacatctaaactccctccatcctgactcacgtggacttagatatgttttgtttctattttcttctatttcagtttttcattctttgatgtttatttcttttgtccatcagatctcttgtgaaatcccatggaaggttgtgctcagcctgtcgggtctctttcttcctgcccatatattataccagttgcttctgcagcccgcagatgccagcgatgccaggaaacaagttgaaatccaggaatctctttaactgattttgctaaaaatctccctgtgagccttccactcaactcttaatatgcttgcattgtttaagtttttaaattctgaaaattaataatt

SEQ ID NO: 7545 - DNA, 1052 bp, Homo sapiens
tttgcaaagatcttgggggtgttgtagacaaggaggcctgaagacagtgatgttttaaaataaacttttgtcagtgtttactgatgtatctaggatcgagattatctttctggaaatttcatttatgtatgtatagtctagcattcaatggagggaaaacaattataacagtgattatggatttctaaactctgacagaatcttcagggagcatctgatttaactccatggtgtagttgagaaaaatgaggcccagagagtaactggctagtcacagagctagatagctggcagaaggctgaagatagaacttggatctcctgcctgccagtcctaactagtctaacacgtgcttatggtacaatatgtactctaatagaaatgggtgtgaaatcaagaatgtaatgtgaattggttttactttttgattttctcttaatataaaataaattctataaagagataaattttaaatgttttttattaatacttcattttcacaaatggcaaatgactagagatctagtaggaaataggatgaaaaggactcttctttgggtctctgtcttttttaatagtaaatacttaaagctaaattttcattttcagtaaaaggtaagaaatggtacttcttggtggagaaagatgatgattcattcgttcccatttttatgtgtagtttaggttaattaagaaccttttgaaatagggtgtattgaaactttaatgtatggataagttggttgagcagttttaattaaaacttatctctattttgaagttaattactttcaatactctgagattaatgaggcatagtcatggcacctcccatgttgtgggtactcaataaatattagtttgggaattaggacatactttgatggtattttagggtcttacatatattatgtcatagattctttcccaaatctgggaaatactcaacgatatcaaattttactggttcaacttaaaattttttcttcctatgtaatttttaaaactttctatttaaaaataatttcaaatttataaaaataaaaatacac

SEQ ID NO: 7546 - DNA, 1050 bp, Homo sapiens
tggtaagcggaaaagagggatgaggaagggctttactggcccaatcaggaacagaaactaagaacccgtgactgtattctctcccttggacttccccgtatatgttacctgacctgtaaacaagtatgccattgccagtttactatcattaaaatgtgtcttgttgcattttttgcattttcttttctatccccattccctaccttcagtacctaaaagtgacttgcaaataaaatatgctcaatgaatttctatttaacaaatatattcagtagcttctgtgtgcctttaattaatcttgggctttgcccatttttctgtaactgtctgtctgtacctggctaattacttcggtcccttgtaagattctactccagtggtaactactccagaaagaccctccttcccttccaccagaaaagttctgtattaggattcttttggttgaaagagacactaatgtagcttataccttccacctaaaaggggactgttgcttgacgtggctgagaaaagcagggtagagttggcctcaggtatgagttgatcctagaatcaggctctccctctgtttgtgttggttcctctcctgcctgcttctttcaatataatggcctcattttcatctgtctccatcagattatctctgcctgacaggaaccaggaccaaatagttccagtcttgcaaccctgcagttgagtgacccaagaagaaaggaggactccttagttttaaaatgccacaaaaatactctaatttgaccaattgggattacttctcatcccttggaccaaattgtcatagccagggatcaagaaacacaagacacatccactaatgagatttaaaggatttctaatttatttccatgacatatgtatattaagtgaaatgtttctgagatatagaaactttttataaatttctttcagaccttatgtccatttatatcaaacttaaataatgtcttcactagttattttgtaattttggaatcaagatagttaaactccagaaagaccatttctctagaaaaagaatttagacag

SEQ ID NO: 7547 - DNA, 1100 bp, Homo sapiens
ctctcagatttttttgacctgaaagagattttcagaagctccatgcatctgactatgcaggtaatttgtgagcgcttgtgtaagctctataccacagtgttgaataatgatctggtaccaacttataattaatatctgtcaggatttacagtctaggagggtatggaaggaatagccttgttaatccatcgagacagtctgtaaaataaatttttatacctttgtggaaacttcaaagaacaatttaatatatttctatgtgtgggtttcatagaagcatctttctttatccttggtttttctctgggaacatttgtcaagatcattcttttaattgtatttgctattatatgtaagctatattttaggcttcgtttggaacttgagaacccaggggagttttgctttgctgctgtattaagcctgttacagtctgatcacttcagaaaataagaatttagaaagaaggcagaaagaccaactagctgacagcaaagaggtggaaatcaggaactctgggatcttacacaatggtcttctcatatagaaaatgagctgttcatttaattaatatttagccagcatcttcagaatatattgtacttttctcacattactggcaagtttttaaatattctagcttaaaacagagctgtgaaactagagaatcttagagccaaaaggcatcttaaaggttatttcataaccaggtataggaatcccttctatagatagttgcttgctctttgttaagtatgtcagtagcaggaagcacatttattaatctaatctccataactgagagagagaatgctgaggaggcataatagtgaccctttgcctgatgaaaaaaatagtgattaaagccttcaaagaaaaagaaaactgttctaacaagtccctttcctggtagtttttcctagtagtttataattgggatcctattagttcttgaaatatctgctattttcatttctgtttgtttgaagtggaaaaataaattgggacctgtattagtttaagggattttatgtgcttagcattcaaacaaataaatattagaatttatcatttcttagtctcttccttgcataatccca

SEQ ID NO: 7548 - DNA, 1098 bp, Homo sapiens
taggctggagtgcagtggcatgtgcgatcacagctcactgcagactctcaacttctctgggctcaggtgatcctcccatctcagcctcctgagtagctaggagtacaggtgtgcaccaccacacctggctaatttttcttttttagatacactgggtttcaccatattgcccaggccaatttcaaactcctgggctcaagtgatctcctccccgtcggcctcccaaagtgctgggattataggcatgagccacaatgccctgcctgaaaagtatcttttactagtaattggatacattttaaatgtaagcctattttcactgttccaaactcttgccttaaagcaattgtccccagtaccatgatgtttttaggatagagcatatcgagtagaataagacttgtctttaaattttcatgaggtgctacttacctaaacacgtatatgtgaatttgtcacacggtcaagaggacatttatgtaagcagtaggttgttggagagaaatatggaaaaggaaagtagaaccaaaatgtgtttagccacagttaatacatgaatacaaactgaaagcttcactattttatgaatgaactgtatactcccacatatacttttctatgagaactagatcattcacttttagaagttatcctcaattatgatcttttaagaaggtaactttgggcataagtcttttttaaaattgccaggtccagttgattctctctgcacttacttgtgtatcaccaaccttcagtttgcccatcctcaaagacaccagaaatttaaaagatatatgtgaataggttaagttagttgtaaatattggcaacatggaagaacatttatttatagaatatagagtcttaatgaggggcgttttatacaaagaatgagtcttcaagtaacctggcaacaggagttttatttcattaggagttggcggcagtcagtcacactgccttatggaagtgtctcaaaaatattttgttaaatgacttgactgataattaaataactttttttttttttttgagacggaatttcactcgttgccctggctggagtacaatggcgtggtctcagttcactgcaac

SEQ ID NO: 7549 - DNA, 1034 bp, Homo sapiens
tatgtttactcctaggtattttatggtttttgacattatgggtaatggatttttaaaaaatgtttattttcccattgtttgttgctagtacacagacatacccttgatctaagtttacttatatgctttttctttattttaatttcccctttcttttcttttcttttttttcttttgagactgaatctcgctctgtctcccatgctggagtgcagtggcacactcttggctcactgcaacctccgcctcccaggttcaagcagttctcctgcctcagcccccctagtagctgggattaaaggcacacaccaccaagcctggctaatttttacatttttagcagaggtggggtttcaccatgttggccaggctggtcttgaacttctgactttaggtaatccacccgcctctgggattacaggcatgagccactgcgcctggcctctctctttagttcagtgattccttaggatttgctatgtaaacaagcatgatatctacaaatagggacagtttgacttatttttttacattctttatgcctttttgtttattttcttgccttattgcactggctggagagaccttcagtacagtgctaaacagaagttattcttgccatgttatgaaaggtggaatgtttttgccatcaagtgtgaagttaatagtgacagattgtttgtttcaggtactgagcagtacagtgaatacacaggctatgctgagacatatcgttggtcccggagccacgaagatgggagtgaaaggtgagtctgtttctgtcttcagtattccatggctaaaagcaaaggaatttgggcttgaccctcacacactctcattctgtctacttgtatttcagcaagtgaacttaaaaagaaaaaagaaaagaaatcagcattacaggttcattggcattgaaaacactattaccatcttcctgtaccaaagggaagaacagagaagataaaaccaaaagtctaaagcaaagacaaagaggggcagaattctctacagttctttacctctgagct

SEQ ID NO: 7550 - DNA, 1050 bp, Homo sapiens
gaatgtactgttttccatttgcaagtgtttttactttattgtgaatgttgtgtgagggatatttgatatttgggatacttacattttttttcagagggcattaaggtgaattgccttaatgccaaatatacatttggaaatgaatttggaagtttatttgtatacacctgttgatgcatttgtacatgtgtttggtgatgctgatagggtgccactttatggggttccatgaaaagcagatatgtaatttaatttcataacaaacatattcattagttattatatttactggttattgttattcacataacttattttattggttttcaggtacttgaagaagcagaagctcaacatttatatcagtccatcttgcctgatatggtgaaaattgcactctgtctgccaaatatttgcacccaggttagtggatgtagcttcctcagtagcttccctgagactgccaattgaatttcccttaaactcgaatggccagggtcacacagagagagagagagagacagagagacagagagagagagagagagagagagaggaagagaagagaagaaatgggaaacagtttttgccaaagagtatagtaattttgctgtattaaggaaaaggttagagggtagagagtactacaaaaggacattaaaaatgcagcattccattcctcagcttctgtttacactgttgaagcttgtttactttgacttttttctctctttgtttaaataacctctaacttaaaaaagtattcattatttcaaaacatactagtggatttggaatagcgtattttcaaaatggcttaatacgacccactccttcctcaccctcccccaaattctacaacaaatgagttaatgatactttcttaactttttttgagacagagtcttgctctgtcacccaggctggagtgcagtggcataatcttggctcactgcatcctccacctcctggattcaagcaattctcctgcctcagccacccaagtagctgggattataggcatgtaccaccatacccggctaagtttct

SEQ ID NO: 7551 - DNA, 1082 bp, Homo sapiens
taacatttcatatttaaccctggaaggactattgtagtatttttatctgaaggtaaaaataatgagtaaataaaaacagaacgttagatctgtttttcaaatttatatattgtttcagtgtgtagcctatctaaacaagcggtaaacttgctcatcaaagactaaataggtccattggtccttttatatgagggggtgctgttagtgctgtggtttaccaaagactaagccaatggtctttctccttattttactattagtactagtagagaaaaatactcatcctcgatttattgtgatgataatgacaggtaatgatttactacaagagtctgtcagattctaagctggctaaataatttttctttatagtgtgttaatgaagtttttagtaagctgagtgacatagtgccttgtcaccacaaatgctctttgattacatgaaaagtgttacaaaaagacattttctgccacaagggccatttccagcataatgaaatatggaatattttcaaatgaactccaaagtgatatgtattgaagtcttgctcttggtctaatctgcctcagtcctgagaagcctagctctaagataaacaaagggcatcttccactgggagtgcaatgttggaactgctcactgccttaagtaaccatatgcatagcctctttcctgatagttggctcctgtctccctttgtaatcctttccttcttccatgcctgctgcttaagttgcagactattccagcctcacttctcttggacacttctatctgttgcaggcataggcctgtctcatcccagactcacctcttctacaagatcctccctgtaaatatctcctttgtgtttgctggatcatcttatttggttatctttggcgatggaggtggtagtgcttattactgagagttttctatgtaccaactatagtgtcagcagtatgctttatctgatttaattctaacaaccacctcatgagttagatgctattaatatttctgttttacaaatgaagaatggaaaaccaaggtttagggagtttaagtaactaagtgacatctcatttttatctatgga

SEQ ID NO: 7552 - DNA, 1036 bp, Homo sapiens
ctgttttaaatcacaacagatttcgttattcagtaactgaaggaatgtggcctccttccatgatagccttttggtggtcattttttgttttgttttggtttggttttttgataacactgaagtaagtttctgaatgtatataaacacattattacttagcttgatttaacattcttcgtagataatctgttttctgggattttcttcaaagcttaaaaaatatcaagtatctttgttatatttgtcacaaagagcctgtaccaaactcctaatcaaatgaaagcagccttaaatgtttcataagactacagctaatgtctttatctctctagctttcgaacctctgatttggagttcagtggaaatttaacctttttggacctcttcccttggtgactcacagtctctggaatcataaggtctgcattactttacagctcaatttaattcatgagaactataggagccaaaagggaactaatcagaatcactaaaatattgaaacagatcaattgtgacttttatatttgtatggaatatgtggaatttctctccctggtttggttaatgagtgcttttgaattgggacatatgttgatggtctcatatttatgatttatgatttctaaatagtgcatatcccaaaggacagattactccaattggaactaggcactttgcttttataaacttgatgagttaccatggaatatcagtcttagttgagccctctatgcactagatcactgatgaagttagagttgttattttgtgtttgcaaaacactatctggattgtatttatttatgtggtggacaaagaggttagaagttatagatactgaaaagtgaaaattcattcagtagactttctcttatattctaataatgaaattaagctagtacttagtttgtcctataactctaacccttcatttgggtcaaatagcagtagaagttattccttttaaatgttgctgtggtgttgatttcattatccaaaaatctactgttagaggagtgaagataattctgtg

SEQ ID NO: 7553 - DNA, 1049 bp, Homo sapiens
agaggttgcagtgagccgagatcatgccactgcactccagcctgggcaacaaagagcgaaactccatatttgaagaaaaaaaaaagaataactatagtgttttaacttacacagtctgcttacttctctagcaattccttagtgcaccatgattatttcaggaaggggtaattgctttaatctgaatttcctttttgcgtttcccttatggtagattcaatagaacagagtaatccatcgagatatttttctatctgcttatggtaattgtttcctttgctgaaagaatgctttgagagaggaagagggaaacattaaatccctctaattgaatataatgatctttttgctgttcatataccatttgatgttggatttagagggattagagacattcagaattttaaaaagtaatagtgtcctcaaaagttgatttacacagtagtacttatataaataatgtgtgtgataatttgcacagaaagaattttttgtgcttattgtgaattatgaaccataaagaacttattcagtcgttgataactcaagagtacagagtagtatccagtttttctaatgacaagcaatctcatggtggactacttttgagacttgaagactgaagtaaaaataaatacaagctaaagcttaatgctaattataaaacactaaaataatcagagaattacagtgaagaattagaatgcaattgctacttaaaatttttttccttaccaactttgaggaataataacatatggataagaaagtttatccttttaaagtgtgtcatttgatgagttttgacatttacacatacccatgaagctcccattataatcaagatacagaatgtttgtatcatccccaaagattcctctccccactttgcagtccattccattttctgctctggccccagacaactactaatctgttctttttcactatagtttacattctgcatgaattgaatcatagtgggtatgtctggcttcattcactcaaaatgaagataattttgagattcatccatgttgttcaatata

SEQ ID NO: 7554 - DNA, 1153 bp, Homo sapiens
cctcggcctcccaagtgctgggattacaggcgtgagccaccatgcccttcttatttccctttcttgcctaattgccctgctctagaaccttcagtataagattgaataaaagtggtgagactggacatccttgtcttattcctgactgtagaaggaaaccattaggtataacgttaaccgtggggtttttatagataaccattatcaggttgaggagcttcccttctattcctattttagtggggtttctttttaatcatgaaggggtgtgaattttgtcaaatgctttcttcagtgtctattgaaatcatcatgtgattttctttcctcttttattcatatattacattaatttttgtgtgtcaaatcaaccttgcattactgggataaatcccatttggacatagtacgtaacctttacatatgttgatggatttggtctggaagtatttcctcaggatctctgtgtctataatcataagagatgatctgtagttttctttatgtctgtctggatttggtatcagggtaatattggccttataggatgagttgggaagtgtttctgacatgggtaaatgtttagatgtatttcaggataggcaaagcctcagagtgggagaaggatatcagtaagtaaacctaagtgaacagaaagtgaacactatgaaagtgcaagcgtcagagaaatgtgccatacataattttttttacaattttttctaccaaaggatatatcactgaactcactacaatataagcatgtttaaagaagcagttatttttaaagatggtggttttgttagtaatctccactccataagcatgatattccagaggcctctgaaatccaatgtactcaaaacttataatttttcccacaaacctcctgctttcctgtagtccccatcttggtaaagagatgcctttcatgccatcactcaaaatgatctgtcaatcattttggatttcccccaaccccatgacacctagaaatgaccaattctagacaatatgacttcttaatattgttttttgtttgtttttgaaacgcagtctcgctttgtcacccaggttggagtgcagtggcacgatctgggctcactgcaacctccacctcccaggttcaagcgattctcctgcctcagcctcc

SEQ ID NO: 7555 - DNA, 1035 bp, Homo sapiens
ttttgaactaagaatcacagagtgagaaatgccgtatccttctatgctttgttaggtgaggagaagatgtgcacgtgttaatgtgaataatttactaggtgattgtttcttgccttatctgttgtcttccacgtttgtttttaattcctggacaggcctaaattattttagggtctgattttgccatagttatcactttgcaactgattttctgtcagagtagtaaatatgtagctttaaatcttgtaggttatttttccttaggaatcctcaaatgcagctgtgctttctcctggttttttgaattctttgtcatataccttatttcaaccagagtgacctcttcacggaagccccccaggattggcaagctggagcctctgttaaggagggtaagctggggttgggcagctgtgtctctgtgtgcagagttccaaaactgtcttcctcactaggagatggaacaaggttgttcccaagccttgtttctgtgttaagcaggaagctattgtttttactgtggtccagttgaaagtaattcatcttcactaattcatgtcttggaaaacacagtaccatctgtaaacccataccacagtcttgcctctttcttaggagagaactcataaaaagtcaaacaagaaaagtaccctagagcactgttgaggatgattttcattgaatgaagtttaatttaaagaaacatttttaacattctgtatataagttggagaccagtaattccccaacccagtgtgcattaaaatcatctgtgcaggttttgtttttgtttttgtttttgtatttttagtagagacggtgtttcaccgtgttggacagttggacaggctggtcttaaactcctatcctcaagtgatcacccgcctaggcctggcaaaatgctaggaatacaggcatgagccaccgcacctgtcccattggtgcagtttttaaaaaacacaaatataaatatgttttttaacctacaaatgttactccataggtttgtggcagttcttgggacttgggaattag

SEQ ID NO: 7556 - DNA, 1050 bp, Homo sapiens
actgcttagtccttgtattaggctctgtgggccaaaaggtattgatttttgtgtagagcatcaaccccaaattagctagaggtaaatttaaatgtcaatggacagtttttaaaaacgaaacatgatgcattaacctgtccttatttgattagcctcatcttttaaactctatttatgattgtatgaatcaagtaagaaccaaatatgaattactatcactagtataatcacatcataaaaagctgtttctgttctaaccttggttacagataaatgacagcccttagattcactagatctgttttcagaagggaagactcaaggtaattggattcagaagcattagtagaggcatagttgggtgcccttaatgtcatttgaataatgggactattgcaaatctctccccctttcagattcccctcggcgactctggtggtatcactggatttgctggcttctcagcgtagttggaatcttctgtattctcttagcgcatgaccactacactgtggacgtggtggtggcatattacatcaccacgagactcttctggtggtatcacactatggccaatcagcaagtgagtttccccgcttttgattttagcttctgttgtttctggcttgatgttgctggcttggacagggtgcaaagaacctgtggatgtctgaagtttctctttcttaagtagtaatcaactaagattgtattgtttttttgtgacattgattctcttcagaattaagaataaaaagtttattaatataatgatgtgaggaattacttccttctagaataaggaacgcactttcattgtccttgaaaaatgaaaaatattttctaagcttgtgtccctccttgcttgatttgctttcctatcctcttctccctacccggggcacatcacaagcttaatatttaacatttaattaagtgttaacatttttagcatagaagaggaatacctaaaaagctaactgaggtgtttatttataagcaagagatgagtgagccataagttctccttgccctcccagaattggcgtt

SEQ ID NO: 7557 - DNA, 1035 bp, Homo sapiens
taagtgtggaatgggccctactcactactaatctgataaagcttcctttgctaccaacttcagtcacgtttctgcacttaagaccactgactaggcatgcccaaccttattcttttactttctgtttctagtacgttttctctcttcccttgattctgacctattatctatctaggctcagagcctgagctgagatcccattttctttcctttcctggggaccttctctgacccttctcttcccagatcatctggatctcctagcctcttgcaggcctcgctgtgcctcctctgtcttctttttgtttaccgagggcagtttttttggagtggggaaggacactctaaaggctagatgatggattcagtcccagattgtgcctcacctttcattctcatgttggtgaactggtggtcttctttgcttctaccttttctaatttacaattttaggtctcatgacctaaataatggactgagccataggaattatagggaaattgtagatttttctctaaagttagtaatcccagcaatttgacttgtaggcagattagaagataaggataaacaaaaagacaaaccaaattatcatctcaccagagataaatgatgctcatatttgggttcatataacttttgatatttttctgcatgtgctcataaatgagtactctgtgtacatgtgtatttctaaatggtatcattttggccttctcttttacagcatgcccagggattgtctatttccctcctctcaacaaaccatcatggatgtctaattactcatgatctgatttagaagtcaccacatctgtgtcccaccagcctgtcggtgccatgactgtggtggtgaagcatgtggttatactcagtcttacactggaagatcattcttgatttagatccctacagctgcctgctgactgagtgactttggccaagttacttgactattgtagtagcattgtttccttacctacaaaatgaaaattatagtttctataatgctgtcttgaggattgaacgagatga

SEQ ID NO: 7558 - DNA, 1025 bp, Homo sapiens
tctgttcctttggttttaagaggctaataaataggaataggctttagaaatacaagatacttggagtttattaaatgcattatttttgctgccaaactttagttctgcttttgcctttttgacttttaaacttttttcctaaaatcccactggaacaaaataccagtactgtacaaaggcaaggtcaactcaaattatgcttcctgagttttccctgatatttgttgttttgtttttgtaagtttgctccttttccggtttttcatcaaaatttttaaattcaggcaaataatttactaccccacaatataactttgagtaagtcttaacagttacgaatcagaatctttcacagaactgtgacttttaagtaattttattcttataaagtatcctcttaaccataaaactaattttcttaaagtatattaataattacaattttcccaacaggaaattttcctcaaatctatttctctttaagctttatgattttgcgttttcctggtacttattgacaatactgtagtcatttatatatttaaattgctcaaagcaagaaaccagttgatttgacaaaattaactcagtgctggaatgaggcctcaggtgtgtccaacttgctgagtggtttgggtggatccttacatctcaggagcctcgtttttctcacaaacggaataatgacgtctcagtctagatgatttctgttgtcatatatatatacaactacattttattagattctaacataattggatgggccaattatattgaattttattagcttcagagcgtttgtgtccagaatgcatccaactaagtcctctctgattttcacctctggcgggatagggatgtgggaaatgaaagcagagtcgtcatgatcttcctaagcatcgtccaccctgtccttctactggggtccatcgctggtttcctgtctctctccctgtgacctctcttcagtgtatctggcccaccagacaggtaggaggtaggaagaaagatacagatgacacatc

SEQ ID NO: 7559 - DNA, 1035 bp, Homo sapiens
taaagtctaccagccaaagtggacaaaaaggcaaaatacatacactccagcaagcccttcttcttgtatcttagcaaagtaggtcagcacacacttacttagttcaaggggccatttcataggggatgattttatttgctaaccagagttggactgtggaattctgagcacagcatgtaatagcaatttaaaataagggacaatttaaaggttaaggcatcaaaagtaatcttctaaaattttctcaacagtagactgaaataaatgtgtaggtccttcagctgaaactatgtggctgttactttaaccatttttgttcttcaaatctataccattttatgaactcttctatttaactcttcaaatgctaaataacaaatctataccttattagatttgtttggagtaaagctatccaaattgaattagagaataattgaacacctatctcatgagtatttcagtgggctacattgccttaaaagatctgttaggttattatttactttttttgagacaaagtcttgctctgttgctcaggctggaggctggagtgcagtgacaggatctcggcttactgcagcctctgcctcccaggttctagcaattctcatgcctcagcttcctgagtatctgggattgcaggcatgagctaccacgcccagttaagttttgtatttttagtagacacaggttttgcccaggctggtctcaaactcctggccttaagttatccacctgcctcagcctcccaaaatgtgtgagccactgtacctgttctggttattattttatggaaagttccacaagatgtaaaaacttttatctgaacttgaagcttttacaaagaggcacttggtctgtttcataataaaataatatcaattcttgatttgtattgccctttaacaaggtaccccacaggtagttttgtgttataaagtttgagctaaatgctacatgtccgcaagattttgatcttcctttaagtcaactgtaagctttcagagtaaagtcatgtatatactccatgtt

SEQ ID NO: 7560 - DNA, 1116 bp, Homo sapiens
tatatggtttcagtgtaagatgatcagtatccttaagtcttttttcttaaaatcttgggtatttctagaaaaaaattcatctgatcattaacctgcaagttattctgggtgcctaagaaggtaaaaggcaagggcagatcctacttaatctttttgcaactttcactttgtcccttgtttttagtcagataccactgctttcaactgtgtttaatgtccactactctagaaactctccatgtctcttttccagaggataaacttcagtattctatggtgtggggaagaggcagttgctcagctgtacaaagtgagaatctagagaaacttattaagtggtcttttaactccactttcacaccatttccaaggtacttgatgccaccaattcctcatacttttaaggctagaggaaatatttagtgttatgtaaatcagaatgcttctttcccctttgctggcttagggctccttgttttgggcctgccagatccgtcaccactgattcatgtgcttcccaacttccgaaatcgtgtccctgttttctcctcttctgttctcttctcttctgttctcttcgactgttttgatttcttgtccctttttttaaaaaagaaaatctttttactaccatttcagaggagtttttggagacagtgagatagaatgtatatgtccagtgaaatacctttttggaaatctgattcatctttcaattaactggattcagttttttatttcccttttcaccccccaaaaaagatgtgggtgctagattgttgagatccttggggcttgacaaaatttgtcagttgtctttatatttatatactttatttttttgctgatttcacttcctcttttgatctgcttttaacatgttgctctctcttctttcctcctgaagtatcagtgggtcacaggccagaggagagaacctagggtttctccgtaccttctttaaacacatctatctttaagaaaaaaatcatgtcttgtttttacattgtggtttcaattctttatttcatagcctcttcaaacctgttttatatgatcaaattcatggtttggtaaacttcctgtttgtcacacctggcaaatctccctcatggt

SEQ ID NO: 7561 - DNA, 1084 bp, Homo sapiens
atactttaaattagttgctttttttttttttttttttttttggtgagatggagtctcactccgtcgcccaggctggagtgcagtagcacgacctcggctcactgcaatctccacctcccgggttcaagagattctcaacgtcctgagtagctgggactacatgctccaccatgcctggctaatttttgtatttttagtagaaatggggtttcgccatgttggccaggctggtcttgagctcctgacctcaggtgatctgcctgccttggcctcctaaagtgctgggattacaggtgtgagccaccatgctcagcctagttgcttttgattatctttgttaggcgtggtgactgggtgccccagtcagccttccaaagtcctcaggttatttatagtggccatgcttctgagtaaaaatcgtcagcacatatctgatcaagaatttgtaactactactgggtagcagaaacatgctaagagagaagtcatttagaaactgaaatattgcatcctctaggacattttgatggtgtatgagagaagggaaaaatatgtttgaaatctgaattgccttagaaaagctggagggaacgattattttacataacatgtatgtaaagtttatggtgttattgttctcatcacttctttagtgttaaggaggcactattgcccattacaaggttgtgattggaagtacaatcaaaactctacttttggatatcaggaacattgtccttgtgctttaggtcctcagtagctcttctggttagggacaaaagtcctaataaggaaggtcaaggatggagactagcccttctggttggggtgagatggagggaagtacaaccagaaagtgaaaagcaggatggggctggagcattcttcaagatcttcttatcctttttaaaaaaattaattagtgtggaatggtaataacagaaagtgtactttcagccattgtttttggacatttgatgaactttcagtctgccaactcatgtctcctttagttctgataatttttttaaattttctctttttagatttaaaatatttctaaatctttgtttgtttttttctt

SEQ ID NO: 7562 - DNA, 1030 bp, Homo sapiens
aagctgcctccttaaatattttaagttcagtgtaaaggtttctctgtatatagtgaactgtacctaaatgcaggtgtaaacagactgtaacctactcttgtgccaatcaccaatttttggtcaatcaaagggggccaattgttcaaactgtattcaaataaggcaaacactaagctgtaaccactccagctgtttctgtacctcacttccactttctgtacatcactttcctttttctctctataaatcttccaccatgtggctgtgctggagtctctgagcctaccgtggcttgggaggctgcttgattcatgaatcgttctttgctcaattaacctctgttaaatttaatttagctaaggattttcttttagcatatacaatacctatgaatctgccgccttgcttttttcatttgacaattagatttgtcctgaaggatatatacctgttagcactggttatctctgaaagataagatggaggaggcttggcttgcggtgtctgtttatctgtctgtctatgtatttaactttctgtatttctgtattgcctgaatcttcttacagggagaatattgccttttcgataaagagggaaagtcctttttgaaaaaagagatagcgtaaggtaattaaatccacacaaacacatataaatcggatctttgatttttctaatagctccctccatggtggaagttttggaggaagtgggtgtatgtgtttgtggaaggctttttgacctgggatagggagtgagcaggggaagtctctgaaagaacccccaaggaatgcttttataactttgccttaatggttaaggaaagtgaaactacatggatttccccctttaggcagcatttgtctccaggtgtggtaactcattttaaggaactgaaaacacattccagaatcttctatcagcatcatcgatggtatccccagttggaggtgcactactcagttggggagcacacaggctttggagcctattgttgggactcctccgctcaacatgtgaccctttg

SEQ ID NO: 7563 - DNA, 1066 bp, Homo sapiens
tctctccgctatgactttggtttctacctctccactgctaccccagacccaggctgtgaccattaccagggatttttatttgggtatgctggtgacttttgtgacagagtggaatttatttgagcctaaagtgtctggaatttttcctggagactcaagatacttgatacagtaaagaaattgttctcagattcctctatccttgtagacattttggttcaagcacttaattgcccaatttctttcaaagggagtaattccaaaaaagatttttaaagtatctagacatgaacattctaattgttagatattaatttttttttcttaagaggcagggtcttgttccattacctaggcaggagtgcagtggcacgatcacagctcactgcagcttccaactcctgggttcaagccatcctcctgttccagccttccacagagctaggactacagactacaggtgtgtgctaccacgcccagctgacatgaacattctattgacttaaattcctctggggaatagagtaatgcttcagggtttatgctttattcaaaaccaaagttctagttttaacaaataaaacaaagttcagctttattcagtaaagcataaaagaaaataaatttctataccagcaatctaaacatttgtgtactttgtttctcccaaagagaaacatcagttaaaattgatttcctgctcaaatgtcttgtctgctgcaggtgtatttcctaaaacatgatttatgcatttgatttagtgacgttacatgtatttgtagtaccgaatagtttgaataataattgaacataatttcattgcagatattttaaccatcggttattattcaatgaattatttatataaaataggttaatataatttcaaatatgaagttgctttggaaaaagtaaaggaacaccagctaaaatcaggagtaatgggtattatggaatattttcaacaataggcagtgctgttttcaaacacgtaaagtattcaaagtcattggttaactaaatgttgtgaaaccaaagttctggttttaacaaataaaacaaatct

SEQ ID NO: 7564 - DNA, 1066 bp, Homo sapiens
tttcccctacttagttctggggaaagaggggcagtattttaagacaaatcccagacatcataccatttcactcccatactttgttgtcatgttcgtttttcaattatttaccttttgtctgttgacttttctttctcttgtttctgaaataacacttggactgtgccctggtgatgttatgaaggtacactttctggtagtgttgtcctttgcatggcgcttgctgggctggtcttcatggatcctgaggaagacagctctgctggtatgcagttcacgtctcagtagaacctagtcaccagtagaacccagaggtatcactgctacctcgcgaccttgtacagttaggtgaaagactgtgcacttgtatactatgtttagaagaaatggactcaaatctaagtcatgatgatgtttattattttttaaacccataaagaaaccatggctttgattaagactctctaaatggatatagctagattctattttgtttttctaattacatagacagaaaacttttgacattacaaattaatcatttataagtttgccatcttttgagtacagtaataatttatttgtgcaacatttcagtttttttttttttaacttttactttaggttcagagtacatgtgcaggtttgttatataggtaaattgcgtgtcatggggatttggcgtacagaccatttcatcaaccaggtaataagtatagtactcgacaggtagtttttcaagcctgaccttcctcccaccctccaccctcaagtaggccctggtgtctgttgttcccttctttctgtccgtgtgtactcagtgtttagcttccacttataagtgagagcatgcactatttggttttctgctcctgcattacttcacttacgataatgacctccagctccatccatgttgctgcaaaggacatgatctcattcttttttttttttttttttaatgattgcataatgttccatggcatatatatacaccacattttccttatcccgtctatcattgatggacatttaggttggttccacatctttgccattgtgaata

SEQ ID NO: 7565 - DNA, 1325 bp, Homo sapiens
tgtacatggtaggatttttctttcatttgtgagggtgtttctttactgcttttcatgaattgggatagttcttccagaagagcttttcaaagatttttcttctcagttgttttccacattctacaactgtaaactgctaattttttgtggcttcttgctctatacaccatgcaatgcataatttatcagtttgtttaaaacattagaaagggagaaatactcagccttgtccttgaacctgagttgatactcgatctatctccatctgcattgccccctttttctctactttgtctcttattttgctgtattttttcttcctcagaactctcctgaaaagcctttgatttggtaaatatattttgggattttcagatgttgaggtttattataaatgctttaaattttctggttttattttttttaattaggttttgttgaggaacagagtgtaaaagaaaggatatggttaaaatatgaaaataagtaaaaatggtgcatgtacatcgttagtatacaaatgatatcaaatagtttagaaagagatgtcaaaggctcctctcactgtaactgttattacatttcttgtgatttgttccaggaaaaaaaaatacatattttggcacatatctgcgtctatcttgcttttggctttttacatttttaataaagggattaatatacataccgttccttagctttttctttgtactttacctatttttgagatatattcctgtcaacacatacagatcttctttattcactttaatgatggtacaatattttattttatgggtgtataataattgattttatttttgccttttttctggatgttttaatagttgccattggggggattgtgtttagctattggatttattgcagtctgcctttctgtaaatattttcgtataaatatcttgctgacatacctgtagggtaaattcctgtgagtgggattgctacatcagtgggaaaatacatttcaaattttgataaacatcaccaaattcttctctggaaaggtcactgattgtttgttttttcgagacagggtctcgctcttcacccagactgcaatgcagtggcacaatcatagcttattgcaacctcaaactcgtgggctcaagcaatgctcgctcctcccaagtagctaggaccacaggcatgcaccacgatgcccacctagttttttgtattttctatagagatgggggtctcactgtgtttctcaagctggtcacatactcttggcctcaggcagttctcccacatcagactctcaaagcactgggcttacagctgtgagcctggcctttt

SEQ ID NO: 7566 - DNA, 1060 bp, Homo sapiens
gccattcaggtggggaatggaatttgaaactgtcaagggtgactgagccctgattctgagaaagttaaacctatatttaaagtggatgtcaaggcaacataaaatggtaagcactcactatccctaggtatggtggtagtaatgtgccctcagctttaggggaacaaggagtggaccagcgggttatttggcagagggtttttaagatcggggttgcagaggtagaggcaaggctttgagtgcctataaatgtcatggcactggacccgtagtttcaccgtcacttttttttgataactatatgttgagaatccgtgtactttaaattttaattttagacaacaaaggcatcctagaaccagttatcctgttctcttgtgggaatgttctaaccacattggtcattgtgttgttcttatttctgaagcataaggattattggaaacatctttcaagtgctttgagttatgattgcagccaaacatatttatgaagccttccttcttcctggagagaacacctactctgaatgttaagcttggctggatcctaaacaatactaacaaactagatcatctctctttcctgtctgtgctgcctttccctttctccatcatagatctcaaagtatctctctgtgtccacacacacacaaacacaattgtattttttagactgcagtgttaagtttatggagttgttcatatacacttaagctttatgtagtcttctcatgtaaaagagctgctgtccttgatataatagccaacatattatcagttcagccagtatagctcattgtaacaattacataaatataaaatatcagtgctcttaaaaatacacattaatttacatgaatgtttgaggaaagctgcccgtaaagcaaattgtgttccttttgatctctactataaaattatttaattgactgagaggaaaaggtttatgacatgatggcatgctcgactttgacatttgtcatgtgatgatgatgatgatgtgttgagaggcatagagggaggggcccgcctgctggaacagcggctagaagacactc

SEQ ID NO: 7567 - DNA, 1027 bp, Homo sapiens
actctcatcttatttttaccctttcagtgttgtcatagggtcaccattgacattctgggccttttgcctggaagtacctattatgctgttaatttttcaactaactatgtttcatgctgtttgtaatgaaaagcctatgagctctgtggctccagcactccccagctgcgtgacattgggacgctgtgtagtctttcttcatgtttgctcatctgtaaatgggctgataataataaatatcacctactttacagacttagtagtagcactaaataagatcatacatgttaagtgcccatccatgcttagcatatcaaaagcactcagtgaagtttatttattataaaggtgagcatagggctggggcactaacccagctttgaatggttagcatgaaaaaattttcacagtcaagagaagaaaggaggaaaagggtatttcatgaaggggaatagctacaagtttttcactagtgatggagcataaagtgttaggagacgaaatggtaagggggactgggagcagttcatggaggtcttgttttatcaagcccagaggctcagactgcatttctgggaaatgggttgcacagaagaatttgtacctcattagggtgctggacacatgcagacttgaggaaacagaattcaacaagatctacaggagacattgtgatctgtgaaaagactgttctaagagccccaagaatattaggaatgcctggacagtgaggggtacaaaaggacaataaagcattttgtttacatcagatgctcacttttaagatctaggggacctgaagtagaaccaaagaaaggtataacttgtcatgcattgattccttttgagaaaatgaattagatgagctgaaatgtggatttctaatatgaagaaattctgcccaagaagtagcaagagggtgtcccacatttcagtctgcaaactgtgtttggaatgctgcgtgtgtgtgtgcgcatgtgcacacgtgtgccttgagcacaaatctactggcttgtgcagggaaaga

SEQ ID NO: 7568 - DNA, 1048 bp, Homo sapiens
tggcaagatgacctggcaagctgagctaggtgtttgccattcacacaggaagggggccttcagggaagagctcgagtcatcatgaagacagagcctggatggtaaaattaatgcccctcatacagatgttgagtcacatgatgtattagatagtcaatgaaagatgaaattatgttggtataccatacaaggcagtaatgtacagtactccttaagaaacattttcaataggagttttatggttgcttgaattaagttgctttgagaggtaaaaagttgcagtaagtgctataatttagaaaaccagagacttacatggtaacatctctactggattaagtcttcatgagtataacagcataagtattataaaacttaactagaatcggaaaatagaagataaagaattagtgttttgtttggatcttacctttttctgtgcctgaaacccccacattttcaaaagtcctttcccaaggtctccaacgctggttggtcctgttgccttgtggagtttctaattgaatgtatctgaagcacttcaatcagagctgaatcttggtcttccatgctgtcatcccctgtattctttcccaaaccaagtttctgttgattctgcctccaaaaagtatctcaaatccaccctcctggtccagtcacctgggtgactgcagttgctattcatactcactgtgactcttttccaccctctttatgaaatggaaatctggtaattcacctccttcccctaaaagccaaaacaaaaaacaaacaaacctgcaggactcaacttttccatgacttcccatgatcttaagttgaaatcataatttcataaccttagtgactcgcatgacctggcagttgcccactaatccccagccctccgtgttccccctcttcaatccagtcatggtggcttagttttggtttctctgagatagcattcacttccactttcctctctcttttttcaaattgttgactttaattatttctttagttcccccttaaatctcattttgtcagagaaagccttaggttagaa

SEQ ID NO: 7569 - DNA, 1044 bp, Homo sapiens
ttaaaatagttttttctagttctatgaagaatatcaatggtagtctcaggtatatccttatagcagtgtgagaatggactaatacacttgtcttgtgccatttttcaagaggaatgcttccagcttttgcccattcagtatgatattggctgtgggtttgtcatgttattttgaggtatgttcctttagtacctagtttgttgagagtttttaacatgaagagatgttgaattttatcaaaggcctttcctgtatctgttgaaataattatgtggtttttgtcttcagttctgtttatgtgatgaattgcatttattgatttgcatatgttgaaccaaacttgcatcccaggaatgaaactgacttgattatcatggataagctttttgatgtgttgctggatttggtttgccggtattttcttgaggatttttgcatcaatgttcatcaaggattttggcctgaaggtttctttttttgttgtatctctgccaggtgttggtatcaggatgatgttgacctcatagaatgagttagggaggcgtccctccttttcagtttttggaatagtttcagtagaaatagtaccagctcttctttgtatatctggtagaattcagctgtgaatctatatggtactgggctttttttggttgctaggctatttattactgcctcaatttcagaactcattattggtctattcagggattcaatttcttcctggttaagttttgggagagtatatgtatctaggaatttatccatttattctagattttctagtttatatgcacagaggtggtttttagtattccccgatggttgtttgtatttttgtggggtcagtggtgatatcccccttatctgattgtgtttatttgcttttactctcttttatcttcttttttatgctagctagtggtctatatggtctgaatttttaaaataatccctttactcttgaaattattttggacacaaaaccactgattctggagtggagtccttttttgttatttaattcctcaaatgttgtgattt

SEQ ID NO: 7570 - DNA, 1106 bp, Homo sapiens
gtgagacgagatcgcgccactgcactccagcctgggcgacagagcgagactccgtctcaaaaaaagagtgtggagacaatatttagcctgtgatttaaaagagatgtaactttcctcttacagcatctgcaatagtgtttttcaaacatggtctaccaaccacctgtgtcagagaggtggtggggggaaggtgattgtggtagtgggtgcgtgtaagagtgcgcatgcgcgcccgtgtgtgagtgtgtgtgtgtgcgcgcgcgcacacacacacacacacactcagagagtgtttgtcagaaatgtaaattcctgagtcctgtagcagatacaccaaaccataatctataggtgtggaggccaggaatctgcattttaatcacataaccatttttgtgcatagttgaatcctagaatctctgatctagagtggtagtttcattcattcattttggtgaaggttgagttggactgtggagaaactgggacttttaaagaagaaagaaaagaaagcgtaggcctgagacatatttgctgatttgagaaaaagaaatacacatgaactagggtggattttttcatactctcctggaagagtctcaaatttcaactcacctgttttgtaaaatgttctgaacccagatgaagatatgctctctggtggctcggagatgtcattgcaacccctccttccttccttgccttgtctgggagtggggtagtgggtgtacttttggggtcctctgtggggagaggtccacttgaaatattagtgagtagagatcagctggtgagccttgaagctggctgtggttaatttccagtctcagttattccaaaagcaaaatatttctctgtcttgcttccttccacctttcagttcagttaacttagttctcctacatcaattgagaattggataaacaagaagcattgcaagcaccacatggatttctagttcattttaagttgacctttcattaaagtgagtgtctgtaatcggtgtctgtggtagctgctttaaatctttcagtatttataaagattaaggatttgttacttgcgaaggtcattgagcaacttcaagaaattggcatcaatgtgac

SEQ ID NO: 7571 - DNA, 1030 bp, Homo sapiens
ctatagccattcatgtcttctactttttgtgtttaaaatgttttaaagaattcagtcatattctttttagtgattctatatggatagttgtttagaggaaaaacaagaattgagaaggctgagaaaataaatatcatagttgttttcttacaaagttggaaactgtaggcttagttcttttgattaaaaatgaaattttctgaaacaaattttttgataggccagattccttgttctgtggcattggaaaaatgaagtctgttctacataatgtggagttatcttgtcaggaagtccagcctcagaagtgttgctttgtcaagactagccaattaaaattcacttgaatagtcttcaagttttatttttagagaggggaaagtactgaaagtataggtaaatttagttgatagaacagagtgccttggttgcaagtgacagaaaactcatttcaaactgtctcaagtgaaaaagtctatggccttaagtaattgcaaatctaaggactggatctgccttcaggaggggctagactaaggatcaaaatgatgtcatgaggattcatcttggctacatgtttttgggctctgaatggagacttctagcagcttcaggtttgcttagttacaaacaaacttcctggtcatgatgagtcatgtgcctcatgctggaccagtggctgtggccaggtatattggcctattcctattggatagccagatcatgtgcttcactccagggcctgaggtcagcacatcttctgcagaaggtgaagcatgaactgatgatagctgggaatggttccctccaagggtgaatcagggcagttaccaagaggattgggggtgctgggaggtacactaattattataatgattattattaatgtatcttttaatggtttgaaaagcattttcagatgtattcttgtttgacctttaggagatattggggaggcaggataaagaagtgattaaaaacatggattctggggctagactaggttcagttattagcttgcatgagcttt

SEQ ID NO: 7572 - DNA, 1034 bp, Homo sapiens
gtctattgtatttcaggcataaaatggtgaaaatcagatatggttcttggtcttgaggagtttaaaagaagctcctctatcacttcttggccttttggctaagatcaagtatagtaaaagagtctcctatgaatttgaaattccattccatgattgtgctttctataaatcaaaaatatgacatcgtggtgtaggggcatcccctgtcagctcttctagttatgcaggtagcgcatttccgtgtgcaccaaccacatggggcttattctcagcatagctgcttttagaataaaaagtataatatggaagtggaactaaaaatcctcaatttaaaactattatgtcagctatctttattaattttataaacttgataaacacttaccctacataatttgattttttgcttccgtaatgaggagtatgtaatgtgatgtttgcacaattactgtagttttaaatgtcctaattgtttacatgtggtaatgccagactgtttgaaggtagccatgtctggagaagggatgagttttgaagtgcttactaaagcaagccaagcatatggtcagtcttgtgctactttaataataaacctcaatagaaacaacagccaaccaagataatagagtttggataataaagtttggaatgcagcataacaaattaatctatctctgtttgtgtgcttatctatttgcttatcaaagtcataaaagtttgtttcttcttaatagaaaatatagaagtatttttttacattaaggaatttgaaacttgtttttaacatcttttacacctgtgtagcattttcatatgtgcttgtatatatattatgggtggacactggggctgtgagtgactgcccattcaccacccctacactgtcctcagaccaatgtaaaggaagcaagtcaaaccatatcagtgaaccatcttcagccatgatgtctgcatcattgccttctttcagcctgagaggtctttcaggaagtgggaatttgtttggatgttatagttgcagttatttagctatg

SEQ ID NO: 7573 - DNA, 1041 bp, Homo sapiens
gtaatctacccatccccgccatggctgatgtttcatggttaggtcagtggatctgatcaccagcctcaccttctccctgatcaagattcacaaatagaccagggctgggcctggtggctcatgcctgtaatcccagcactttgggaggccgaggcaggtggatcatttgaagtcaggagtttaagacctgcctggccaacatagtgaaaccctgtctctactaaaaatacaaaagttagctgagcggtagtgacatgtgccagtaatcccagctactcgggaggctgaggcaggagaatcacttgagcctgggaggcagaggttgcggtgagccgagatcacgcctctgcactccagtctaagtgacagagtgggaccctgtctcaaaaaaaaaaaaaaaaaaaaaaaaaattagatcagtctctgtgctctgatgtgatcaaaggtcttagctgattttttaaacctaaacttataggagaatgtggaaagaatatgactggtactgtgaagttgatgttatataggttaatgtattaaaatcagcattagagagattaaaaatgattcccagcctcataatttgactacctacattgaaactttacttaaaatctcaaagacatgttcagctatgattacagttgtagatctttacacattatagccaattacaccatcagttatctgtggttcttgcaagatggctgtcgactgttctgctttccaatctcagttactatttatttacggtatcttcctcaagtcgtccctgtgtatctaagcattgttttacagacatttgtgtctataaggttgcctatttagagcatattttaaagaaagtctatttaagtgagccatttagggcagcagtggcttcttatactctcatttctgatttagaacaaaaggtcagtgatagcagtaaaggttcttcaaaagatactggcattcagaaggagttgtgtctggaatcacgggtagctcagaatgattgagttttgcttttttattctttggcctctgtatggttatgct

SEQ ID NO: 7574 - DNA, 1060 bp, Homo sapiens
ttattgtgtctacaagagaagtataattactaatagtaattatagtaattggtaataatgattatagtattaatggtactattaagaaagattgtgaatatatgctttcagggagcacactgcagtgcccggctgcctccctggtgtgatgtgttgtttggccatttggctgtggggttggttttaaggaaggcatcatgttcgggagcaggagggtggaggtgatctgtatagtgagacaagcccagggcttggggtcagaagacaaataggagtttaatctctggtgctttctagttgaatatccttgtcagatatcatctctgacgcttagctgccttctctggaaaatgggatccataaaccctgcttacctcacagggctgtgatcaaatgtgatgggtaatgccaaaacagaaggtatcgtcatggcaacaggagtatgactttcaggccatgataccactttgccgcaaacttgtgtgtattgtagttgagtatactgtagattggatctgaatacctttgctggaaaggatttgaggaggttcagcaattcctgtgtggttctaggtgggtacgtggatgccttctaagtgtggtctcagaaatccaaggtcagagtaaatctcaagtcattgaagctccagtttttgttagagtggatgtttgggctacatcactgccctgaaattgctgtgattcgacaggaactgaggcaaaccttcagctataagatgaagacctaatgcatggtgactatagggaataataatgtatatttgaatttgctaagacagtagaccttatgtgttctcaccacacacacacaaatggtaactacactgtaaggctcttttagaatttatctagcaagttttcttgtttttaccagaaaactcctcaaaaaaaagggaattgtatgaggtgatagatatgttaagtagtttgtggcaatcatttcacaatgtatacatatataaaaccatcaccttgtacactttaaatatatgtaatttttatttgtcaatcatacttcaataaagttggagggaaaaaa

SEQ ID NO: 7575 - DNA, 1411 bp, Homo sapiens
cttttctctcccagcactgtgggaggctgaggtgtaagggtggggtggcttcagcacagtgtttgaggagtgggcactgagtagcgtcccctgaaatcttgtggtgtacagcctgtgctgaccgcccaaggctgctctgcactagccttttagccagatgggttttctttcaaggacaacttttctttttcttatttctcttcctcctcttctcttacccttttccttctctttcccctcttgctcttcctcctttatttagaaaatgtataagttaaaataatagtaataaccctattacacatagataactgctgttatcattttggtgtatatctctctgatctattttctataaatattagatgttcaccaaatgcacattttgatcaaatgctgaaaggtggaatgctgaaaggaatagtattgccaaagctaaatcttgctgtcctagaatggacttctgggatacaagtacaagtttgacattttataaacattattacagttttgttattaaaatagaatttggcattgtggtacagggacttgatttcttagcatatacgatcagtgctgttaatgtttgtgatactgggtggatgttgactttgatctgagttggaggagggaggagcaaggcctttacttatttgtttagtttgtttttatattattatttttgctggctctgtccatgtaatacaatatgagtggtagtttctttccaacttattaatcttttgtcatataactgacttgtcttctctgtgactcctggacctgaagattttcttggcaatgatgatgtggtttcattttagtatttcctaaccccagctttgtgcactgtttgaaggagaatatatctggataatctcagaagcagaagtgaaattgttgtccttctacacatttttccctgatatttttgtactcacttgctgcttcacacaaccagttgagagaaaaatgcatccttaagctttggctctaaaagtgtggctgtagagaaatgaaattggctttcaagataacagagctgttttggaatctccatctgcatcttagctttcactgcctgcacactaatttcaatatcttccctggagaagaatgacagaagaatctttgcagaggtaatatgtgacaaatgtttgccctctcaaggtaccctcagttttcaacaattgactgctttccctgcaagcaaccattgactgttagtaagcatgctctttaatattgttagtagacttgccatgtcaatgctgttatacacaaagtacaatgctaggccaggtacagtggctcatacatgtaatcctagcactttgggaggccgaggtgggtggatcgtttgagcccaggagtttgagaccagccttgacaagatagcagaaccatatct

SEQ ID NO: 7576 - DNA, 1030 bp, Homo sapiens
ataaaagtctcattcaattaatataaatatttagttttggtttaaaagaaattatttgattcagagtcatctcaagaatgcatccagatatgggctggaagttgactatcatgtgtatagtcatctaacagaaacacaacgtattcctccaaagaagtggtccacaaaataagccttacattgctaacttctattggctgggatctggtaaggatctagatccacagccgattagacatggtgattgtgactgattaataggaaaacctaatgtgcttagaaagcgggaacatgaaataaggccaagagcagagaaagaagtctgaattttcacttgggccttctgaagtaattaacaattaatatctaattcataccaagttcttctttggaaaaactttttttccttatcattagtgtttttgttctgcatcggccaccttgactctctgaacgttaatgtagaaatattgaaagtgttttctcctcaactgggcagcagtaaaatggttatctcttgggactctgtttctattttaaactaagtatgtaaatgtggtctgtggctcattttgtctgctaattacatgatagactcttccattaagcttgtacctaatatttgttctaaagtatgtgcttgcactttcatattttttacaaaataattgtcagttgccttattagaaagtgacctttttcttgtaactcaatctacacgcgtacatgtactttggaaacctgtataggcaattcctgcatcagttacttcttcatgattgattttgctgcattacagatgctccttttactcatttaaagaattgacgcagatgtatattcccacacattctgtgaaatcactcagaaatatctacagtactgctggcctctgattaaacaaatttaagtattaataaaatatttgccacattaagtaattacaaaaatgtgaacattttgattatgtttttaaaatctatccttattcataataaaatcatatggagttacagttattatgatgcat

SEQ ID NO: 7577 - DNA, 1028 bp, Homo sapiens
aattatgaagcaaaattatggaaaagcacttcatactattagaaacattactgataatcactgcattaaatgttgacagtactacaaatattaattattatcatggtaagttgaagaaatttgcagtatgagaagttcttgaattttcatcatgaatttgcaatatgaaaagtccttgcaaacttgaattaactttgggtactgtaggattttcagactgcctacgcaggaactgccagttattccttttggcaatatataaaagagataagaagggattttaaggagaaaaataaaccatgaagtagaggatatatcctcaatgtagaggatatgccaatacagctttggaataaatacagggaaataaagctcataggacagcgttttgctttcttttgatgcacttttagctaaatgtatcacaaagaatgttaataataattactgaactgtattggacattttatatacaaggtactttgttattatattaaaacatctcataggacacaagctcataggacagtgttttgttttgttttgatgcacttttacctaaatttatcatagagaatgttaatagtgattactgaaatatattggacatttaatgtacaaggtactttgttattatattaaaacatctaattagatacaattattagtgtcattaaggttactaacccataatgtataataaagttggccaaaatctcatagcttgcaagtggctaaactgagaatcaaacccaggacttctaaccctgaaagctcaggaaaaactgttatatttttttctatatgggttaaacaatacatccatgcattggagaataattgttgataaatattttcaaatggacataatgttccccttcaattgtaccaaactgaatagactacataaaatctatctaaatattttgtttcccatacttccaggtaaacatatttgtaactatgttggaaaatagatcaacaattgcaaaatatacattcaaaaggccattgaaatttccaattaa

SEQ ID NO: 7578 - DNA, 1050 bp, Homo sapiens
gcaacagagcaagactctgtctcaaaaaaaaaaaaaaaaaaaaaaaaaagaaagaaaagaaaaagctttataacttgccttataatgtttctggggagaccagggaaggctcccaaacaggtctgaaaatggcttgagacagcagagaaaggaaactagcttcgtttttattgtgtttagggagtggagctggggacaggattcttgtctgtatgtgtgttggggctttcatggtttgaaattagcatgaggtccaaaaaatggaggccctgactttcttatctgcttacttagatgtaaggcagaggcgaagatggagtggtggggcttgataaaagttagcagataaacaccagaaatagagtcagatccgttgttatccctctgatcatattatttataattcttattatgatactagttgagttctttaagatgatagactcaaattacacaattcatattaatctattatgaaatttaaattaggaagctgcaaaaaaagaaactcaatggttgtttaatatgatgattgtcttttcaaattatcaaaaataacaaaaggccaaatttcctgatggcgcttatataggagtgatcacataaacaactgttgtttaaaactaagatcttgttctttaagtaatgttatgttgaagctcatttttattaagttttctgaaggggctagtaaacacaccaaatctatcttactgaagattctaaatttttgtttcaagaatcatacctggagaaatcctatctgtggccttgtcaacaaaagttatactttaagaaggattagtctaaaattaaaattgatcacagacataaacactcaatcgctgctgagctgatcatggaaaactcacatgaactgttgagattaagtcccacccaacagttttaaagttctcacaaaacgtaaatatgatatcaaatgataacctacctaatgctaccttttaattagatttccaatcagaaaacaaaagacaacaaaaaccagaagataaaattgtatttgcaaaattctactaatcctaatta

SEQ ID NO: 7579 - DNA, 1048 bp, Homo sapiens
atgtatatggaaaggcaatggaactaacacagctgaaacaattttgtaaaataataaagtggaagatagcattctactaacttcgtctaattttctagtcacgataatcaagacagtgctgttttggctgaaggatagacatatagttcaataaaacagaacagagaactcagacagttccatgcaaatttccaactgctttttgacaaaagtgcaaaagcaattcaatgtaggaaagatagcctttttaataaattttgctggagcaattgaacatccatatataataaaatgaatttcaacagaagtctcaaaagttagtaaaacattaactcaaactggatcatggactaaaatgtaaaattataaaacttttagaataaaaacttagaaaacatcctttaggcaatagagcaaagcaaagtgttcttagacttgatatcaaaagtataatttataaaaggaaaaattgataattgggcttcatcaagattaaaagttttgctgtacaaacgatactgttaaaaggatgaaagaatttgaagactgggagaaaatatttgcaaaccacacatacaataaggggctaacatctagaatataattttcaatgtgcaactttaaaaaagaaaaaaaaaacaattagaaaatggggcaaaaatacagaaataggtaatttgccaaagaagtcataagcaattaagcacatgaaaatacattaaatgtcattagccattaaggaaatgcaagtgaaaaccataaggaggcatcgcttcacacctatcagaatggatacaataagtaacaattataacagcaaacactgggaaggattcagagaaatttactcacagtacattgctggtgggaatgtaaaattgcattaccaacttggaaaacactttgaacagtttgttgccaaattaaacatacaactatcatatgatacattacagcactcctgtgcacttatcctagagaaataaaaatttatgttaatgcaaaagcctgttcacaaatgtttgtttatggtagctttatacataat

SEQ ID NO: 7580 - DNA, 1166 bp, Homo sapiens
aatctagatggaagttcccaaatctcaatttttgatttctctgcacctgcatgcccaatgccacatgtaagctgccaagacttggaaactgcaccctttgaaacttgagcttgaactcaagcctgagcttcaagttggccccttttagcaatggcttgagctgaagcagctgggacacagggcgacttgtctggagtctgcatagagcaggagtccctgggcccagtccataaaaccatttttcccttctaagcctgatggcaggggctgccttgaaggtctctgacatgccccagagacattttccctattaccttggtgattaacatttgaatgcttgttacttatgcaaatttctgcaacttgcttgaatttctccccccccattttttttttctgttgcatcatcaggctgcaaattttccaattctttatgctctgcttcctcttgaaccctttgaccttctgccagataccctaaattatctctcacacgttcaaagttccacagatctctagggtaggggcaacatgtgaccattccctttgcatggcaatagtgttctttactccagttcaacaagttcctcatctccatctaaggccacctcagcctggactttattatctatatcactatcagcattttgggcaaagccattcagcaagtctccaggaagttctaaacattcccacatttttctatcttcttctgagccctccaaactgttccagcctctgcctgttacccagttccaaatgtgcttccacatttttggatatctttacagcagtgccccactacccagtaccaacttactgttttagtctattcccattctgctaataaagacatacccaagactgggtaatttataaaggaaagaggtttaatggacttacagttccacatggctggggaggcctcacaataatggtgtaaggcaaaagaaaagcaaaggcacctcttacatggtagcaggcaagagatcatgggtaggggagttcgcatttataaaaccatcagacctcatgatacttattcactaccccaagaacagtgtgggggatacccctcccatgattcaattatctatacctggccttgcccttgacacatgaggattattacaattcgaggtgagacttgggtggggactcagaca

SEQ ID NO: 7581 - DNA, 1033 bp, Homo sapiens
ttgtgtgattaaaatttttaaaaatactcatggaaatttttgtattatttgtaataattgccctacattatcaaaaattccaagcagacttcaaagaccttgttttgacttaggcttacaattcaattgtatgatataagaaattataatattataaataaaaggttcaagttttagctgatgagaatcaaataaaaataaaaagaaatataacattttgattttcaaattgcaaaacatgtattaaacaattatttctataatgactcctgcccaggcagctctctagttgacctgtgggcacagacttaaataattttgtttaaaatatataaaacaaagactttgacccttcaatttcatgtgtagaaattcaccaatgaaataatcagattcaggttaaatgtgttttcaatgaagctattatttataacaatgcaaccctgggagcattctcaatgccctagggtaattaatttacatgaaatagaaatgactgcctcctattgctgaagtacatgtgtagaactaaaccactaatttttgtcctaaaaagaattaaatatacaatgaaaaatagtatgtatttatttgtgtgtgtataatttatggttgcttaagccattgataattagttttattgtacttatttatgtgtttcaggaggctttaatgttaataactatattagcttaggttaattatttctgtttgaagtaaaaaccaacagttcactagctcttgacttcctaaggattacctcagcatattttatagctttgcatttaagtaaactgccttcccctttatgtaaaaaaacttccactatactctttttcttaaattttttatttatttattttttatttgccagtctccctctatttcccaggctggagtgcagttgcacgatctcatctcactacaacctccagctcctaggttcaagcaatcctcccagcacagcctcccaagtagctgggactacaggtatgtgccaccacgcctggctaattttttttattttttgtag

SEQ ID NO: 7582 - DNA, 1025 bp, Homo sapiens
atttgtctcctgataaacctgtctggtaggtttgttgctgtctctatggctttggttcttgctggactaagaattctttcaggtcagtcatttttaattattttttgaatcttaatgtctagctcagcactagactcacaaaggctacaacctcctaaaaatatcatggtgtattaaattagctgcatttatttatcaatttttttcttgttgatatcctttagaaataaatagaatgtaataaatagaatgtttttacgtggatatatgtttactcattatgttccaacttggtttaaatccattgcttgtctagtactctcaaagtcttgggagaagactatgtattacagaaatgatgtgtcagaagggcatcttcataagaggccctggtgatatgagagaagtggttgaagattttggaaggagagctgcatgagcacaggtataatgacacattatcaatttggcttaagtttggctttgcctcatcatgagggatttggaatttggatgaagcatgtgaaaagcctcctcttgctctgattctacttagcatcattctctagaatacatacagctttgactattttccctcatgcacactgttcatacatgtctatgtgtctaaatattactgacctaactgggttgtaataatcttgaagatatcctttggttttttgatttttaagggattataaagtagtttttgtatatatttccagtttaatattttctacaaaagagtgaaagattttaccccatatttctcctatgcaaaaactaagttcttagcatggtgcctgccatatgggtgggtgtgcaggtggaaacaagaggaagaaaacttgaattaaaatgagaaatgtgtggtttcagagcttggacatttaagagctagagaatcttgagtaaatgcatttctctataagtgtagaaaaataataaatatgtgccctatacattttccaggtttgttatgaagatcaaatgggagcatggatgggatgattatattaagt

SEQ ID NO: 7583 - DNA, 1033 bp, Homo sapiens
acgtggtgtgataaacaatcacatgacctttagtggcttaaagtaagttttatttttcactcctataacttgtccatcacattttggtggcagagacttgaaggggaaattcctggtctgtgtagtcactcagccaacatcacaatagtttacattcatcatgccagagcaaagcaagctgtaggaggactccattccaacaaataagagctatagcctgcaagtggccagaattaatcacatacccttatccaaccccaagatgaccaggtttggggtcatactatgtgtctgaaaacaggatgaggtgtgcatgtaacaagaaaatcagaaatatttgctgaagttttaaagattgaacacatagattgttaataaattatacccaaacaatattgaataaccacctgggagtttccatcactaattttgaagatctcatgttgaaaagttggaagaatgatattaaggaaggatcagaaactcaaaatgccaaaataataatatgtggggctttgttttgaatgtgtttgtataggttattttaagctatattgtggaattatatttttatattacataaaaccaaactgaatttttctcataagaaaaatagactggaactaaaggattttactttaagccttttactcccaccgatatgatgaagaatcaattttatgattttgcttttgcccttgaacagcacaagagaccccctctcatatatcagaccttcttcagacagcctcaatccattttcttgattccactaaatcaagtatgcattgtgaagtgagtaatctaagatttattattgtcagtgggttcaaaaactcctgctgctctgattctcacaccttctagggattgaagcagaatttgtcatgtggagagtgcttagtgcctagtcgtcattatttcctggtcttcaaaaaactgttggtgtttttgttaattttaaaataaaatgtttcaatttgctggatggaaaatattcgcacacattttattttttatttaaagatttggt

SEQ ID NO: 7584 - DNA, 1043 bp, Homo sapiens
attcagaaattgaagagatttctgagattaaaaagtgtgttaagatgcaatccaacacttgcttataaagacacattttaacctgaaaaatgctttgtatatcatttaatatccaaaatttactatagcatttttgtgagaaacaaaaggaaatactgtaaaatgtatcgtttatttgaataactgagtctcttttgtttaaagttgaaaaaaatacatagatagatatataaatccaaatatatagaatttttactagtataagtccccttctattttagagcagacttcgtctattccctttaaatgtaaaagttgtctatcatagaccttttagaaaagtctacacttggaacatagaagcatcctaataaaattcacttatatagtcctttaaaatatgctaaacattttatttaaaatatttaaaatatgctaaatattttatttctacagcataaagtccatgaaaagaggaatctttatccctttttttttattgccaggatttgaaaatgtggaacaaacaataagtgctcaacaaatatgtgaataaatgaataaatgtaaattaattttaattcctatcagatttataataattggtagaaggcatttatattcttaataaatatttttaatcttctgctgggtaagaattatataaatagtggtattaacatataccctatatgtgttttacaaactaaactagtttttcataagatttagtttattcattaatgatgcatatgttagatgacggtcatcatttataataatgtatgaatctcctgcagcttcagggtaactagtggttttgtttattctttcaattatacagacacagttgcagttcaatttgccgtgtgtgtgtgtgtgtgtgtgtgtgtgtgtgtgtgtgtgtgattattgttgaattaatcttttgtcaggaatgaaacttagagagatgtatgcagcaacgtgtactcccaaagtaaatatggctgaaattttctcaaacaatactgaaaatttcaggaacatctcgtattattctg

SEQ ID NO: 7585 - DNA, 1032 bp, Homo sapiens
gcggagaattggccgggcgtggtggctcacgcctgtaatcccagcactttgggaggccaaggagggcggatcacgaggtcaggagatcgagaccagtgaaaccccgtctctactaaaaatacaaaaaaaaattagctgggcgtggcggcaggcgcctgtagggaggctgaggcaggagaatggcgtgaacccgggaggcggagcttgcagtgagcctagagggcgccactgcactccagcctgggcgacagagagagacaccatctcaaaaaaaaaaaaaaaaaaaaagaaaagaaaagaaaaagcggagaatttgttttccttatgttatgatttatcaaacttcagtaaataatgctttgaatatgttaaatatagaaaaagagcattagaaaagattatggagcccagaaataaaccacacatatatgaggacttcatatacaacagatagggcactacttctcaacaggagaaaaaaggattgatcaataaacagtgcagtgacaggggttgtacatatgagcaaaataaacaagtatccctgccttacaccaggcacgaagatacatcccaagtgaattgaaatcatagaaataataatataaatatttacaagaacgtttagggaaatgcaattatgttattggggaagaagaggatataaaaattataaatcataaaaatgaatgatacattggattatattaaaattaaaaatgtttgttaatcaaaagattacacaaaacagaaaatgtctcttttagttatttatttttattttttaacttttattttaggttcagggatatatgggctggtttgttatatagctaaattgcatgtcatcgggatttggtgttcagattattttgtcacccaggtaataagcatagtacccaataggtagttttttgatgctctccctcctctcatgctctgcccttaagtgggccatggtcgctgttgttactttctttgtgtccatgtgtattcaatgtttagctaccacttacgagtgaaaacatgcag

SEQ ID NO: 7586 - DNA, 1047 bp, Homo sapiens
agaggtgggtaaaactaatcttacagtcagagctggttgtttcagtagctattagataaaactgcttttaggtaagaacaggcagtttcagaaattagacttgtagagaattacattcttagagtaatgttttatgccctgatatggtttggctgtgtccccacccaaatctcatcttgaattgtggatcctgtaattcccatatgttgtgtggagggacccagtgggaaataattgaatcatggggggcagttgccctatactgttctcatggtagccaataagtctcatcagatctaatggttttatatggggaaaccccttttgcttggtcctcattctctcttgtctggaaccttgtgagatgtgccttttgtcttccgccatggctgtgaggcttccccagctgcttggtactgtgagtccattaaaccactttttctttataaattacccagtctcaggtatgtctttatcagcagtgtgaaaacggactgatacatgcccggagtgctttttactcctggcctcttgactctgttacagttagttatgtaaagaaagacccaatcatatgatcaatttttacagtaccaattatttatttccccttattagtttgggtgtgtgtgtacatttctgacttcttttctgaatttagatatttttcaaagaagcagcatatttattggcctcagtgtttttctctattaaaacataccattttgcttatgtctttctctcattttgtttactttgccacttttctgaattgttagttatatatccactaaaaatccacaataactacctcattaatttgatcagttggcttttctatattcttatgcatttctcgtccacatgatttgttttgcactaagagaaatgtgtcaaggttgcatataactagtgcatttctgttctccttttatttattttaattgtttgacattatgaagagtattcctcacagctgtgttgtttggtgtcgtactttgttccattttattatttgatgtaaattataacttgtcagatatccct

SEQ ID NO: 7587 - DNA, 1049 bp, Homo sapiens
actacaggctcatgccaccacacctggctaattttttgtattcttagtagagatggggtttcactgtgttagccaggatggcctcgatctcctgacctcgtgatccacccaccttggcctcccaaagtgctgggattacaggtgtgagccaccacgcttggccccaaactgttttattttagaggaagagggaatgcgacacacataggccagggcagtgtggcataatgaaaagagcatgggctctaggttcagaaaacccatatttagacccgagttgtgctcattcctgagaacttcctggcctatcatgccattgtagctctctgaaatctcctttgcaattctctatgtaaatgttagagttagcttatatggtatgtcaggatcatactatatatatatatatatatatatatatatagttcttaccccttcttccatgtatctaattcttaaaatataattttcacatgttttattcatatttgagagacctggaagaacatttgtgtgtcagaggattagaggtgataggtgatatgggagattgcttagctggataatcggaaccagtctcttttttagtgtcaatagcattgatgtgagctcacacaagacaaaaatagattctacagtaacacatataccttatcaaacaactaggaaagtgccagtgcttgaaaagaaaacctggtagcagaaagtgtgtacttcttttaagtgaccatatcaagactatacaatagaactactgaaaattgcaatgaatttgaacaatgtaccagtaaaaaaaaattgtacaacatttgatgtctttgataatttgcctttagtaccaaaagagttctgatcatttaactctgtaggtaaatgccggagagggctcaactacactggtattaggctattaggtgcgttcctgaagatttcagggctgtcaaactcagcagatgcctgtagcctatttctaactttgctctacttgttgtcttaagccatctcctaagagtgagtgtaatctgttatccaaagtgacagtgcctctc

SEQ ID NO: 7588 - DNA, 1042 bp, Homo sapiens
tttggatttagtataacatataccctttgcatttactgcagttggcaaactcagcaaccttcaaggcttattaaatttgttgaaacctaaggaaaaggacaaaaatattgttgtattgatcacacaaggctgctgatgtaattaagtttgacccaattgaaaaaaagtaatgctggagttaagactaaataggcacaatatatataggaacatggctttctcgaacagtttaattttcagtgttacatacatttcctttggattcatactgtttagcaacctgtgaggacaattttactaatgaacataactatgaatgctttaaagcaacaatggaaacattgatactccttgccatactcagaagaagttataaaatttcctggccagaaaaatgtcttatgctccaattctctttaagttgttactttctaaaatgagtgaaaggaatttgaaagttttatttgtgcattgtatgtgtataatgtactatgagaaaaatccagaaggacctgtggtttatttgaccaaaaggatattaagttccctgaattaaggaaaactgaatgtgatttgtaacccaagtttggtcatataaatgaatacatcgtaacgacatgaacatatatgtcatagattattacaaaaattcactgaatttggaaatatatatgaaactctgtactatatattttatgtccataaaaatgcattatacttatcaattagtaagtggttagacctgtgggagtcaagctaggtaaactaatatctatttacccttgtctcatattgtaaaaaaaccccacaaaaccacgactctttcacagccataatgaaggtggtcttgaccattaatgggtgtgaccgaattctctaaagttggtagtggcatagtaaggatgtttctatggtaaaatagtgaatgcttcattagagacaaacagtaatttcaaccagatgaatgataatcacaatataattttgattatatttttgacattgtctggtgggttttctgttatttgtgtaagtgagaaat

SEQ ID NO: 7589 - DNA, 1048 bp, Homo sapiens
tttgggaggccgagtcgggtggatcacgaggtcaggagatggaggccatcctggctaacacggtgaaaccccgtctctactaaaaacacaaaaaattagccgggcgtggtggcgggcgcctgtagtcacagctactagggaggatgaggcaggagaatggcgtgaacccggtaggtggagcttgcagttagcgcagaccgcgccactgcactccagcctgggcgacagagcgagactccgtctcaaaacaaacaacaaaaaaaagttcatgtgttttttctccttttcaaatgtatatgttggattctacctattattagagtcaggattctggtagccattcaaaaaaaaaaaaaaaaaaaaaagctaattcaaaactatgattctgaagaactctcttccaaatagcatagcattaacatacataaaatgaaaattgaaattaaaaactaggagaaatgtgaagaaacataatcataatggaaaaacttattattctcaacatgttcctgattaagttgaaagcataattggcactgtagagaaatctgaaaaaaatatttaatttaaatgggatataagcaaatttaatagatacatgccttagatgaggttcctttaaaagcagagattaaaaaattacttggctatagttaatttatttcagagatgatctcagaaagcacaaagagagagggaaagtaagagaatggagacaaacagtaggttgtactaacgagcaagttaccactatgaaaatctggaattcaaatgaactgagaacactctgagaaaccctattgtagcctgcttcagaatatctcaccagacgatggggaaactgggcataaaaccaccatcctccttccatattggccgtgagtcacctttcacttttcccagggcataaacacatctaactttagtttggctcatttgaaatgggcaagatccccaggttacagcaaaaatagtcctgcatataaggggagaggcaaagatttaagtagaagttgtgaacttggggaaactgtatctcacagttgca

SEQ ID NO: 7590 - DNA, 1049 bp, Homo sapiens
ataccaattttaaaatggtgggtgggatgtttgtgagttggagaaaattacaatgtatttaaaatctaagcataaattggcagtgttttatttggaaatgttacctttaccttgatattagccaccataaaataaattgcacattagatttgatcattcctgcaggactgaacctaactatattttaaataaatctgaaggctaaccattctctctctaaaattaaatatcttattgattatgactttgaatttattaaaatcttatgttcacctctttttaacttgagtataggcttaattatatacagtcatgaagacaagtgtcataattaaaattacaatgtgataggtatagtcattatcacagaacagactctaaaagacatgtaggctctggcaatagatgctatacatgtgtgttttcaatactcaaatatatgctattggtgatttataggaaaatctaataagtagccaactgaaattaaatattgcatgttattgtgccatcaaatttcatagtagcactctagcagtaatcaaaagtggaatgacagctggatttaagcaggctattgtcagagtatattcagcagtgagacaaataagaaagttgtgactgctggctataaaatgcttaaatagatgtgcctcagatagatgctatgagaggtagagaatgaaggaaggaaaggaaataaacacacaaaggaaatgggtggattctttgagtgttgttatatacttgataaatggatgtgcgagagttttagaattcagggagatggtaagaaagaaaaatggtgactgtaaatgaagttgaaagaatctgatgatgacaaacctcagttgtgcttatgagattgtgccccagaagtgggtgaaagtggaagatatcaaagctgatgtaaataaaagctgtcagctaagtttcaatgctctgaatgtgggtgaataagtattccactgaagcaataatgaggacccataaatatcagaataattggtcaaacaatgtaatcataaatgtagaaggcatttggctta

SEQ ID NO: 7591 - DNA, 1041 bp, Homo sapiens
acataggttagactgatattatccacatcaacttaattgttttcaatgtacgttttttagctttctaaagtaaagtctagagtagcctttactctagggctaagtagctccactacaaatatgtggctcttctgaggtccctaggacaatccgcatatattcaatgatgtcactttactggctagtggatactcaaaagatttgcagcactttgtgagaaaataaaattatttagcttatacattcatggtgaattttctttatcaattgttccttgcccagactcatggagttttgtgtgcagattgttactcaaccatagactcatggctgtgtgtctgaagctctttgtggaactctgtctctttatagcttcctcttcttcatttctccgtcttgcaaattctaggaaccttagtgtccctcaactctgatctctgcctcctaagtgtggcaaaacctttgattcagttagtgttttctttctgaattgtagttgctaaattgcctcctgacagaaaactaggattatatagaacactttctgtttatttccctttttacatgcatgacagtcctctgctgcttgttgtccaatgtctgtaaattgttgctttgtttatttttcaaatttttttttctgtttgttttgggtggacaagttttataacagttaaaacttcatgggtaaaagcaggtctttaggtagaaaaacaatttttgagttttcggtaaacttttagtttatttttaaacttggacacttctttctaagttcctttgctttaatttcttttacattggggagtcattaattttccacatttcacataaagtgttggttttttaaaattgtttacttgtttgagccattatttgtgtatattgaaattgataccagaataacctaatgcattgcataatatttactacccaagccagtataatattttgatgctttagaggtggcagaaaaatagaagaccatgtgtttgctgtctgtgtttaaatatgagctttaggaattcttacagcaatact

SEQ ID NO: 7592 - DNA, 1087 bp, Homo sapiens
gctctcttcccatgctaatttcattgaaccaaaggatagcacagtccttacagaatgcaggcatgtatgcatttctgttattttcttaagtcatgctaaaatttatggtagagccaaaacatgtaaaatgtatcccactttaattgtggtctaccccaccaagtcataataaaatctaattttaaaaaattttcaaaaaataaaatcctaaataagtgtccgggatgttttttctaaaataagtagggtaacatttgtccagtttgattatcaaaatcactcaagttacaagttctgatattatacctcagtttatacatgtagatataccttaggttatttttatctctgaaaagtggcacaatgattacatgtttttttaattagccagaataattttaatttggatctcttaaattgatcatggttaagaaaaacacctcagctattgctcatgtctaaatctgaaggattccacacaacgaaccattatcttttctgtgactaagctttagtatttagatatttgtggaccctgagttattaagatgtcaaattatacgaatcattcaaattcataaagacccaaattggtcactttctggaccagtttttcccaattatgctatatgaaagtgtttatattcaaatgggagatcacgccattgcactccagcttgggcgacaagagtgaaactccatctcaaattttaaaaaaattaaaaaattaaaaagaaaagaaaagaaaactcaagttacttgggtttctttatttttatttttgtaacattgattttatagcttagattataatactttaagaaaggatatagaatccagtggtttccaaacatatctgcactcagctagtttatgtgtgtgtatgtgtgcgtgtgtgtgtttgtgtatgtgtatgtgtgtgtgcatatgtgtgtgtatgtgcatgttcatgcagatgtagatgacagccacttacctcccaagaattactgtgcattatattatctaaaagtagccacatattttatgattgtgatagaaattaatacttgttgaatgtttatttgcctgatacatggcaaatgct

SEQ ID NO: 7593 - DNA, 2137 bp, Homo sapiens
tacataaattttaaaagctaaattaccagaacaaacaaggaaacacctgaatctatacttagcagaagttagttcatcaaatcttccagtaagaagatggacttttaagattaggacacaagttattgaaatatttgaggtttagaaacttttttttaaacaataaagggagaaaaacacgttagctagtgactttacactattgcttttctgaaattattctttgtaaattccacactcccacattccatactttcacaatccctttataaatttacctgaaatattaaataactaaattcgggggaaaaaagtactaataatttggttttgactttaggagtatgttattccaaatcaatatgtgattctaccgtatgaagaaaaaatttgtctttttcccatccaaatattcaaaaaacatattgcagttattaaaacactatcaacattgtgataacttactataagagaaaaccaacattttttagagttaatatattcagttcagtagaaccttttaacacatatctagcagaccacaatacaaaaaaaagtctctgttgttaatctgttatatattatgagaagcaaaagtcatagtggaagatagtggtgaagttttcattttggagtcaggagactcgagttctaatcctgccttcactattaaactgcaaagccatttgtcaatttcttgatctctagttagctatttcttcatgaataaaacggttagattgtctccaaggttccttccagctgggagtttcaatagctctatgatttgtgactcaaagtcacagttgtttcttaagaatcataaataatgctttgttgctgacgtataacttacacgtttagaacccaattttctgcaagtttaaaattaaatgtagattgctgccaaagtccttatcaaactgaatgtggggaaatttgagaaggtatgtagggaaaaacaaaaggtaatatatatcatgacatattaatttcgatgatggttccgtaaaacatttgtgtaaattgttctcaattggtacaattaatttaatgggacagccgtataaatcacatgtacattgctaagtggaggattctcccctaattgaaaaacagaatatatgtagactaaggaatttgattagtaactataaccttgaattcttttttgagttataccccagatattcctctgaatatctggatacaggagaatgctgtaagtctgagagcatcattttccttccacatctgcttggtttcgatttcgtttttaggttttggttttggacacccagtgtttattgtttttaacagcgaactatgtgctgtaatatttgttacagtcttcacctttcaacactgtattgcagcagggaattttatacatttactatttactatatcctaaaatcttctgagggcatttcagatcattgttcttgatccttgattttatttccgaatcagcccagacgtttggatgtgtgcatacctcgacagattggttggacttatctctctttgccttactccaatttcttaagtaattgctttctctgactgtctgtcatgtatttgcatcaaggttactaacacaatagtatattaagtgtattttatgtattttcagcttttgtgttatgaaataaaaatatttttttttgttttgttttgttttgctttgctttgctttggttatttggacctgacatttgaacttgtaatattcagctacctttatgtaggaaaatttgacagcagttttgcttcctagcttttatcctgatcacataatacaatacaatacaacttctcactttacctgatttctttattatagttattaattttattatactaccctgtatacagtatagtgcagtacctaatattcttttgaaataaagtaaaatattcaatataaataacttttgaataaaagttcaatacaattttccccaaccagtttagaaagctcacaactttggaaattctatgtcaacttttaaaatctgaagttatgttcaaagaagttacatagaaaagtaactcaaagttatgtgtatggttaatctcatctgcaggtttatacattctatgtctaattgaagcccacataaaactgtgagtt

SEQ ID NO: 7594 - DNA, 1027 bp, Homo sapiens
tttcctattcgtaacatgaacatttttgtctatgaaaaactctatttagtctggatggggaggagtgattccaataaatctgtaaatgtatagtgaatatttatttgataacaaaaatagttctattactaagtattcaaataaaactgataaacgcattgtgacttaacttagaagtttctgactgtaaagttgaatcctaggatacaaggtaaggagaatgtcatctgtgatcctgcaggctgatatcaaaaggcttgaactgtgcagctctttagagcaaacgattatctgatcctggatgtctatcatttctcaagccatcattctatgtaatgagttctaatttagaactgaagtattaatagttcattcaagtgtgattttatcattgtgaaggcttgaggcctcagatttgcttaattcttaaattatatttaaagctagaattgtatattttatagatagaacaaatcgataaataaaaaacaaatatgtgatatcttcacatctgttgaaggtttgtgatgtcacaggtgtaaaatctctgaaaggttgttttaataaatagtattttattacagggtcaggagagacatcagcaacaaagaaaacacatagttataaatagcaggtgtggccgggcatggtggctcatgcctgtatcccagcactttggcaggccgacgggggtggatcatgaggtcaggagttcaagaccagcctgaccaagatggtgaaaccccgtctgtactaaaaatacaaaaattagccaggtgtgatggcacgtgcctgtaatcccagctactggggaggctgaggcaggagaattgcttaaacccaggaggcggagcttgcagtgagccaggatcacgccactgcactccagcctgggcaacaaagcgagactctgtctcaaaataaataaataaatacatacatacatacatacatacataaatacataaataaaataaaataaataaagtaaatagcaggtgttcagtattggtgtgtaactatatag

SEQ ID NO: 7595 - DNA, 1046 bp, Homo sapiens
tggcatagtcattttatctacttggttgtctagtgccctctccatggtgaatattatttagttagcattaacacgagattaaagagtcttcataacttattgatatttctataagtccatcaaataggttttccccaatgctctttctctcccctttaatctctgtatacccagaccactaagtaaacctccaaactctttaccacttccatatgtcagtgtattttcttacctcggttctttcctcttttcagaaaacatgaatgaagtagtgagtgtccatggggaaaatttttctgacttctgtccttcgggatcactattgatttggctttaagatagcagcaatccttcattactctgaaacccatattaagcaaacccatctattaagctagctgggccttttttttcacctccattacttggtcataaggtaaccctaatgaatgaaagcctgagatgaggcaaaagccatagtaagataatgagagatgacaagggggctatcgtctcatgcagtttatttgtgttctctgattctacttctgcatgatcttgaattcatcacttctggcttataatggaattcacttctggcttataatggcagccctacatttaacttgttgattttgaccaaatccagtttatggtaaccagttctgatcacatagcctaatatcacaatattttccagaaaagtaaaaattagtgaataatctaaaacaaactctacaagtctaatagtcttattatgttatgaaaatatgataaaagaagtttacagatcaatctgcttatgggtgttcactcaataaacttaaatgtttcagcaaatcaaatcaaagatgtataaaaatatattgcaactaggtttgtattttagtgctaaatattgcagattaaaagcagaagacattaaaagatagataagtttggctatattaaaactggtacaattgtgaacaggaatgctaaagaatgtgtttgcacaaaatgtaagcagcagagagatagtcaccagaatatacagagaactcata

SEQ ID NO: 7596 - DNA, 1070 bp, Homo sapiens
aagtccattcacaatgttggaaaaaacatcaagcattcccagtctaagaatactggattgtaaaatattgtgcatatcaagtgctgctttgtgttctggccatcttcctgcattttttccttcattatgtcctctactggctgaggggaaaatcactatacattttttcctggacctaaattattacagaaatttaattcaaatttctaaatgtggcaggccattttacaaatgatacgacatgtttgtctgtaaacatttgaaggaggagagtagaaagttcacatgaatttattttaatataactcttaaatgcattggaaaatggtttgtccttaatggcctacagtgttgtatgagtctaggcgtataatcactgcctgtttaatagttttcctatggtggcatttggagacctttttagtgatcattggaaagtacagtgtttgtaagagtcttttggtactttgaaatattatgtaaagagaactctacaggatgttgaaaaacatttttctttattaggaaaaattctgtcattactgaagaaagctgtgttgagaggagatgcacactttcacatctacatgtgtaagactgaattctgctggcagaaattttggttcagttaactttctccatgaaaaaaaagaaaattcaactctaggatttttttttctagtgagaattatttgtattgcattaacatggaacacaatttttacatttcaatatcagtggtctactttaaaactagtaaaaacaaacctattaactatctttacttgtgataaagtaaataatgctccgatactattctccatgacatcattttattcatttctcacatatgacatgctaatattccgcagctagccttatagtgcttgtcatttataatggccacatatgatttgcttttgaaaatagtttatcattgtctctacatattatccttctttaaaaataaaactctactacactgtattttgattatattaatgtaacaaaagttgttatacaacacttcttttcaaaattaaaaagctgttattcaatgtgaagtttga

SEQ ID NO: 7597 - DNA, 1050 bp, Homo sapiens
cttttttctattctccccaaaatgaatccaaattcaagaaatttgaaaagtgtcagttattggcctcttggaaaaacaggctgctctcctctttccacaggtttactctggtatttccttgaaatacttagttttaaaatgtaccaggtaagatgtttgtcttaaggcaaacatgtggtactctcttcatgtaatctatttatgtactaagtggattaagaggcctatttgggaacaggaacatcttatcatcagccctcacatcatactattttggaattgtactctttcaaagactatagttaagacacctgaaaaaatattattatcattcataaacaatttttattgtcctatcatgttcaaaagtttaaatacagacaacttttggataaatacattctagctattccagctaattcttaagcacttatgatgacaaagttttgtttgctgtgatagtagaaaaacagactaattttcctaaaaatccaagggtttcacattaatctagttttgaaaactgtagcctgtatgtttctaatctggctataataaaataagtttatataaaatgtttagtgatgtgaaaagttgttaacttcccagttttcaaaggtctttttagacatgtacttttacctgaatttctttctgaagattaatttcttaacctttgttctgtgaaagtatttttcaggttactccctagataacacctgagttatttttaaaatatatattctcttttgtctccagaacatttctaaataaccttcccagagtatcttaaatgaattattgaatttgttttgaaaataattttcaccaaagaaggcatatttcttaatacttaaaataaaattgtgaaatttgacttgcatttgtgaaatttttgcaacaaaagttactctttattttcctgtttcccttatttatatgttatatttcccttatttatatttacatgttagtctttatctattaatagcccaaaaatctaacatcattggctaaaaaggatatattaattaatggcactggaataca

SEQ ID NO: 7598 - DNA, 1027 bp, Homo sapiens
ccgtaggggtgtggtcgagcaaagtgttttgagctgcgtttatgcgtgcttgatacctccttcttttgaaccaggtgatctggagggcattctcactggggcggggatgcttgtatgtgtaattttactgagaattcataaaaaggccaggaccaaacttctatgtttatggggttttgcggacccatctaggcattttcagtgccttgctttaaataattaagctacattaactggatgaaaaacatttgagtggtattttgaaatactagggggatgtcagggtagaatcttgttgggtataaatctgaagtggtcatttgcagtcctggaagtttagggcctttaaaaaagttgaattagcagaggttttggctaaggtgacatttgtagttgaagttatatttgatttaggactataatatctgggatacacacttttcagagagggatgcttgaagtattatataagtattaagacagaaatttagttaacatataaataggagattttatttggttggagaatattgggattttttagaaaattacgttaatcgaggggctagtgttggagtgttcatggttaaattatgatttttagggttctgactaggttcaatttaagtatcttgtttctgggggtcggcaagggtacctcttacctaatttaacaataaagtcagagatggagggagggtggattttcggatttaatcagaagtagtcctttaaattatgcgtgaacgtatctgcgtgaacgtacgtgtgcgtgaacgtacgtatgtgcgtgaacgtacttgtgtgcgtgaacgtgtattgattgttatgcccttcaagcatgaatgaattagcaccttatggttgggtatgttgactcagaatattcaagataagtccagccacaatcgattccgcagggatcaggctcccgccatggtaagtggcagcatctcgaaaattaaaaaatacgaaatgcatgacaatgctcccgtgactagttattagggtgatagtcactagtaca

SEQ ID NO: 7599 - DNA, 1091 bp, Homo sapiens
cgaacatctctgttttaggtaatgtcggttcagagattgagtttactacacgcttcctgactgttaagtgatatatatctcacttttcaaacctaaagtaaaatttaaatcataaaaaaagaggaaaagagttttgttacttttctttttttttttttgagatggagtctggctctgttgcccgggctggattgcagtggcacgatctcagctcactgcaagctccgtctccccggttcaagccattctcccacctcagcctcccgagtagctgggactacaggcacccaccaccatgcccggctaatttttgtttttgtattttttagtagagacgggttttcaccatgttagccagtatggtctcgatctcctgaccttgtgttccacccgcctcggcatcccaaagtgctgggattaccgacattacttttcttttagttttaaatggctaaaaatgtattcagtaattgaaagctgcatcaacccttgtcctacgaatgatttgcatcttttctatttggctttgagctacgaggctatgactttctagagagtaagaaaaaaataatactagggacttagatgaactttcacagattcatttaatacacttagtttgtaggacatttgcaaattcataagagcagaaaaagaaatagggatcattgtcaccattatcacaaatgattatccttatgtgtgaactttcccttgcatctttttgttttcccggtgtcctttcaatgaaagggaaggaggatgttgatgtttaatacagagcataactgtttgaaagttgaatgtctagaagtgaataatcagttcacatattataaggtggggcatgtatttgaaagtctaaaagtggtgtatatcccaattatgttttttgttggtgctgcctctatggagtccaggtaacctaatgtgaatattcacagatacctaggaagcctggatcacaaggcggcaggtaaagataggctatagtgtcaccagttcccttcaaagaatttggataattgagccaagaataataactttcattttggggcttaagattgaaggtaaagagaaggtggttaggg

SEQ ID NO: 7600 - DNA, 1054 bp, Homo sapiens
ctaaagagaaagtgttttttttttttttctttctaaaaaccaggtgttgagctccttggtaacccaatactgggtgcgcgcgcgcagagtggccagacccctctccacgcagctctggctctttttaattcggcaagtgcactcacagcagaactgccaccagtataacgtcttgacgatgggctccagggtttgacactccgcagcgccaccagctctgttttctccccaagtaagccactctacctcgcgagcagcagatcgccctgtgcgcgctacaatccgtggggcggggagacctggcgctcacccagcgagctcgactggtgctgacgtccattcaggcctttaaatgtctctgtccctgcgcaggagggaacggactttgtagcagtcactttgcccgaagggcgacgcgtctctgcttttgcaggcggcagctcggactcccctcactcttcccagcgttgcgtttgcctctgtctttgcctcgagttccccgcagcctctccagcgggaggcgcttttggtattcgtaccctgggcatgaaccaacaggactccccatgccctgtgctttttcagtgggttcgaagatcagagattgcgaggtgctctgggtgatcgctcaaggagcagggagcttcctccccctgattttggtagggggtgattttttttttaccccgaaaagcgtcctccccgctcctgaagctgcaacttgttttggtttcttctcagtcctgtgtgtggttacaacatcaaagtttttctcccttacccttccaaaaatctatccttttaatccaccctcctccccccgcgctatctccgccaggccttctcgctgtgcggtgagtggatagcgggcgcgcagtgtggcagtggcggcgaagattggcgctatcaggaggagcaaaagggaaggatctgctgctgggggctcgctgggtgaccctttgccagacgaaaagagctgggtaaggcgcagaagaggagccggaaccttctgggaccctggtgcctgacactggattttgatcaccatccttgt

SEQ ID NO: 7601 - DNA, 1050 bp, Homo sapiens
ttcctggcccatgcatgcccctttcctccatcttcaaacccagagatatcaatactaggttgattccttaccacacagcatcattctgacctcctcttctgcctctcttttccagattttaggcctgctccaataatctaggataatctccctattttaaggtcagctgattgggaatcttaattctattggcaaccttgattcttttttgccaatataactttaaaaattcacgggtcccagggattaagatgtagatgtctttgagagaccattattttgtttatcacaatcacatcctgaactccagactttgatcagcatattgcctctccagctcttggaatctgtccacagtattacaacctttgaaagcttcagtttccttatttacaaatggggataatcatcctgacttcacggatttgttgttaggaaataatgtggccatgtgcataaaaagtttcatgtagaactaaacaaacaagaaatagtcaataaatgttagttatagtatttctgacaaatacaactgaaggaatgggacaaacaattaaaaatgtacatctttttatctattcctcctaaattttcttaacttgttcattggctatagttagtgtaagggtaattgggaaatgtttaaatataatttgaagaggcatatcattaagatcattgttatattttagtactgttgccataattagtaatcataaaacatcgggttgtttaacagtatctctactactgctgcagagcttgacacagcacgagtgggcccacaaaatgctaatcactgtccagacagactctgtggacattttaaggatgctagtaccatcctggcatctgccatggaagcagatgctatttgcatctgtttgctatgacaatcactgatgatggcagaaaaaaacatctacattttaagacaatctgttcaaatattcaagaacatacttggcttgtcaaggcactttttaaaagttgttgtaagaaatgagatttataggaaatataaattattaagctaccaatacatttttt

SEQ ID NO: 7602 - DNA, 1034 bp, Homo sapiens
ttattttgggataatttgttatgcaggaattgacgaataatataaatacttttgaaatgtaacttttttatcttaataagcatttaacaaataatttgaagatggataatcacagatacctcaatttttaccaacataaccaggacccttcttgtaactttgactaataaatgatcttttgaacattaccattttgtaactgcattttagactatgatttagttgaatcacccaaagtgtgtaatgtcttttaatgtgcactgtcaattctgttctgccataatgacctcactttcagttcttaactatattcatctcagtcttgtggggtgactgtctcaagaagaatgactggtaataccaagaacttctgttgtttccataaataacagccagattacagccagaacctcaaggctgagcacaaccgctcatgtttggaatcccagccctttgggaggcctagaccagaggatcactttgaggacaggagtttgagaccagattgggaaacaatgcaagattttgtctctgaaaaaaaataaaataaaataagctgggcatggtgtcacatgcctttaatcttagctactcagaagctgagcctggaggattgcttgagcccagcagttcaaggttacagtaagctaccataacaccaccacatcccagcctgggtgacagaatgagacactgccaaaaaaaaaaaaagaaaaaaaaaagccagacctcaggatttccatacattttgcaaaattccatgcaaactgcatgcaaattttgggcttatacaaattttaaaatttaaaattcatggatcctgccagacattctcaaatattaaggaccagagcttaagaagactaagaaatcaaagcaaggggctggacacggtgactcacgcctgcaatcccagcactttgagaggccgaggcaggcggatcacgaggccaggagtttgagaccagcctggccaacgtggtgaaatcccatctctactaaaaatataaaaattagttggtgtggtggcatgt

SEQ ID NO: 7603 - DNA, 1029 bp, Homo sapiens
actctttaagattatttttgacttgaaccatattgaaaatgatgttgactctgtctgaagacttttgaggacaaagctcattttataacacatattttaattgcattgcctggcatgatgctgtgtgtctgctcagtcctgttctcagccccccttctgaaaaaaaaaattctttttggactacatagaactggctatgattgtaaaccgtatcactcaatctgaatttctagcttctctttcttttaatatctgctgtataaaatggtgacaaaatatttcgtagtcatttattatgtgttgaatggcattccttccgaaaaaaagatatgcctaactcctaacacctggtacctgtgaatgtaatcttatttgaaaataggatctttgcagatactcttcttcagataagatcatcttggattgatggcctctaaattcaaaatgagatccttatatgagaacacagtgggatgtttgagacatatacatacagaagagtgagacagagtggaagatcatgtgaggacagtggcagagattagttactcagctacaagccaaggaacaccaaggaatgccagcagcaaccagaagctaggaaagagtcgaggaaccttgccttttagagcctgcagaggaaccaacctgccaatgccttgatgttagacttccagcttccagaagtgtgagagaataaatttttgttgttagaagctaccatgttttggcaatttgttacaacagtcctgggaaacgacaggtaataaaacctcattctctgttaagtctacaccatcactcttggtatttaattttgctcttacaacctaaactttcatctccatatagctaaatgccacttgtgtatctatatctgaatccatttgagtagtactacaatcctaccaaactcaacttgcccagcactccctttaactctctctcatcattttacatttatttccattataatgtttttgttaaaatagtataatatgtatcttatttgaagggagaggagggtca

SEQ ID NO: 7604 - DNA, 1327 bp, Homo sapiens
agctgagaacaaaatcaagaactcacccctaactatggaaatgctgttacactgttggtgggagtgtaaattagttcaaccattgtggaaaccagtgtggtgattccttagggatctagaaccagaaataccatttgacccagcaatcccattactaggtatatacccaaaggattataaatcattccactataaagacacatgtacacgtatgtttattgcagcactgttcacaatagcaaatacttggaaccaacccaaatgcccatcaatgatagactggataaagaaaatgtggcatatatacaccagggaatactgtgcagccataaaaaaggatgagttcatgacctttgcagggacatggatgaagctagaaacatcattctcagcaaactaacacagcaacagaaaaccaaacaccgcatgttctcactcataagtgggagtttaacaatgagaacacatggacacgaggaagggaacatcacacaccagagcctgtcaggggtggggggactaagggagggatagcattaggagaaatacctaatgtagatggctggttgatgggtgtagcaaaccaccacggcatgtgtatgcttatgtaacaaacctgcacattctgcacatgtatcctagaactagagtataataaaaaaactcaatcctatttataatagccacaaaataaaataaaatgcataggaatacatttaaccaaggaaatgaaagagctcttcaatgtgtaccacaaaacactgctgaaattgtagatgacacaaatgaaaaaaacatcccacgctcactttttaaaaggatatattattaaaatgaccatactgcttaaagcaatttacagattcaaggcaattcctatcaaattaccaatgctattgttcatagaattagaaaaaaaaatcctaaaattcatatggaaccaaaaaagaacgtaaagagccagagaaatcataagcaaaaagaacaaagctggatgcatcacgttagctaactttaaattatattacaaggctattgtaaccaaaacagcattgtactgatatgagcatagacacatagatcaatgtaacagaatagagaatccagaaataaagccacatacctacaaccaactgactttcgtcaaaaaaaaaaaaaatgtacagtgggaaaggataccatatgtagtaaacggtgctgggaaaactgaatagccatgtgtggcagaattaaactggatctctaattcttaccatatgcagaattaactcacagtggattaaaggcttaaatgtaagacctgaaactataaaaatccccaaaggaa

SEQ ID NO: 7605 - DNA, 1105 bp, Homo sapiens
ctttctttcagttttggccagtaacttacaagccaagtaatgccctgtccttaccaatactcaaacatcagtattggaaagatggattcgtttcttaaagcatcaaaattaaattaattaattaaatgataattcctcacagtgtatatagttcatagtttttaaaatgctttcacatattctattcctttaaattttatgataaccctctatggtagaacgcatgagcacaattgtttgcagcatgtgaatatgagtgtaacctgtttttacatcagaatgtcagtatgtctggatgtgtctggtacactgatgaaacagacactagaagtctatttatattaagggacaaagaagctcctggggaaaaaatatttagaaggaaaataagcaaaagctgccaaggttattttaaggacaatggatcaggattaaaggagtagaatatttaaatgcatagtattgcacttatatctgaaattgattacagtacgaatttataaaaatatgtccaggtcagagggaaaaaaagttacaattaaacttagtctttattgtaagtctctgtgagatgcagagatcacagaatattagaagcattgtcagtttcactgacaaagtcagctatctgaattgaaattattatgagaaaattaatcctctccacttacagcattacctaaatatatttctgaaattattccaaatcttacagtgtattaataacttaacagaagctccattttaattgtttcttcacattttattctaccattcctttatctcagtgtactcttaggttgattcctgtcatttaaaagctatcatagcaccattgtcagtaagaggagtatatttaacaacagcgtctactttgctgaacagccattttattcacaggcctaactgaaagataatcatcattagtgtgttaattttaattcagaagccccaaaactcctgtcgacgacttatactgtattagcaatcacaaattgtttacaagttgtggcaaaaagactaggcttattatgaactagctcttaaagaaatctttaaaaatcactagagaggccgggcgcggtggctcacgcctgtaatccca

SEQ ID NO: 7606 - DNA, 1073 bp, Homo sapiens
atttaaagaagtgttttaattgtgtgaaaaaattaaaactgataacaatatactagaaaaattacttattcagataaacatcaacagttcacttttgagagacaatatgggactatatacaaagaatgactattggctttttgatgtttagatattcaaaatgacaatattatattttttgtaaagtatagatatattatttaaatatttatatttataaaaataatttttgaatattatttaattattctaacaatataataaatctgtattaaaattatataagtattttaaagcaatagttattttaattatttttagggcactactactttatatttgagttgactttgcttgggtaaaaagttactttatctccctaatgaaaggcatccatgttaagacataaatcaaaaatttagacttaaaaaaaattaagcaatagcaactactacaaatgtgatttatcttaaccagtggtatccagaaattcaaacaaattacaggaaaaatttacgaaatttttcattgtactattactttttgtgaattataaaaagtagactgtggattagaattggttggttaaacccatagcagtgtagagcaaagatgaaatctgaattatagataaacattttgcctttataatttaggtagtcaaaaggaggccaaatttaaccaaaatgtagtaattaaaagatcactgaatatgccttaaaatgtcttttaaattaaattttcctaaaggtttaaaatatatgtatatataaaagagactattttaatgaatcttaatacccacatcatcaagattgaatgatgtttaacatgcaccatgtttaatttgtttatttttgatttaccaaagtatttgaatcaagaactgtcatcatggatcgtcagtatgcagctttttaaagaaagaattttttttcaataatggaaatttgaaagtttcttaattttatctaatgctcaactcactttcacattgacaggtaaaacaaaatagtatttttatcatttgtttaattgaaacaataagacaagttccggggtacatgtgcaga

SEQ ID NO: 7607 - DNA, 1032 bp, Homo sapiens
tagtttttagaaacaaatttttattctatagtacatccttttgaaataataagtttaaaatgaaactttaggtactgcaatttaaatactaaaaaatgtggtgattaaagtataatttgaataaaattttcattgacatttaaatcctcattggggcttttgtgattatagtgcacagaaaccaagaaaatccagaggataaatccactgaagaagcaccaatatccacatcaaaggtcaaatatttagaacactgtgcttgtaagcagtggaaacacattgagctacaaaacattagtttacctattactgtaagaagtctaactttccattgacataaaaataaaaattgaccattcttgtgctgaaatgtaagtgaaatgatatctttaatgttttagcaccattagcagaagaacaatgccaatgttgaaattatatttatcatcagtagcaatagatgtttctagtaaaaaatcaggttatctatcattcctcgcgctggacaaacagactcagataaatccaactgtagagtcaacaggaaacaagatttctccatggaatattctgcagctgtaaagtgtcccaacaactcttttctttgagtgattaccattttattactcaagaatgatttcatattctaaaataggccataaaattttttttgaaattatattagtaaataaaacatcttactctcttctagaagatttaagtcaccttgacatagcaaagcagtctaatttccaacacagatacagaacatcaaacaagtggcttcctgatgtaatattccacatttagcttaactttgtaattcccgaggaagaaagaccctgtgtcagcttggttatttggaactgatattgactcctttatatacagccctgctttgctttgtgtctgttaaaaattttcttggcataaattttacctaaactcaatccttgtccatgactctattaaaatgtcatataccttttttggttctaatgtttgttgactaatttttgtcttctgccaggt

SEQ ID NO: 7608 - DNA, 1048 bp, Homo sapiens
catagtccagatatcttttaaaaaaaagtgcagtggtcagaacacagaatgaaaataaagtagtgatgtgaggttatgttggaaaggtagtaatggctagtatatgtagactgtagtcttctaaggaatgctgactttatcctatgtgcaataaaaacctattgaaggaaaatgaaattgtttaagggtaaagagtgtgtgtgtgtgtgtgtgtgtgtgtgcatgcacgtgcatgtaggcaggtgagctggtgacaatatgattcaatttgcattttaaaaagttgggtacatctatgttatgaggaatagattggagggagcacagcctgatggaggtagactaattaggaagctacacctgtagattatgaaagagatgagtgtaacttagataagagtggtggtagtcaagatagtgaggagtaattgaattccttaggaggtaaaattgataggagtttttatattcaaagtgctgtgaagtatattatgtataggaataaataggacagaattaaactataggcaggaggatttctgcttagcaggttcaagtgatagtgaaggcatgatgaatatatatttctctaaagcaggaagaatggaatataagaggctgaaatgaaacatttctaacttgcaaatatttgaaaatagaaaatttctccaactcagctttataatatttatgtaaatggttaccagatccactgaatcagactcttgaggaggagacctatgaattttgtatttaataagccctagagaagaatctcagagagccagattgccactgacctacaaagactttgaaacacagccctacataatcattattattccttgaagataagaaatacttaataattactacattgaaatacatattatagaagaaaatatttaaaagataaaatataaaaatacagtgcaaaacaccatttatacacctgtacttaatatttgggcctttaaattttaatatttatatatattaagccatttcctctgtattctgacagtgcttatatttaaagtaatgaaaa

SEQ ID NO: 7609 - DNA, 1035 bp, Homo sapiens
tgatgtttgcaaatagatataattatatattttgcctttccagtctgtatgtcttttatttctttactggctttattgcatttgttaggacctcctgtatgatactatgcaggaattgtgatagttgatatccttggttttttccaaacttagagagagaaaacccagtttttcagcaatatgtagaaacattatgtagaactgtgtgtgagctacagtttttgatttgtttgtctaagatatactttctcagactgaaaacatgttcctctgtttttggttttctgaaagttctatatcataattggatgttagattttgtcaagtgcttttactacatctattaagattatctttttttttcctttagtgtgctgatatggtgagttacattggatgattttccaattttgaatcaatgtttaataaccagataaaacaaaattggtcaagatatattatcaatttcatatgtccctggatttgatttaccaataatttgttaaagttggttgcatctatgttcatgagaaataattatctatagttttcttttaatgtaatatccatattgagtttcagaggtgtattaattatgctgtcataaaagtgagtgattttgaaggtggtcccttcattctttattggagaactgattgtgtaggattgatataacttcttcactaagtatttagtataattatgcaagaagctccatgaatattgagatttctttggctatattttttaacaacaaatgcaatttttttaacagatataaagttactcactctatttcttcttggaaaatttttggtagtttatttacttaaaaaatgtttccaattaatctaattggtcaaatttaacgacagagagttttgttaaagtatttatttaatagccttttaatattcctttaatagccttttcttttctctttttttctttttgtattttttgtcagtctaactagaagtctataaattttattgatattttcaaataactatcttcattacagattgatttttc

SEQ ID NO: 7610 - DNA, 1040 bp, Homo sapiens
tatgtaaaatgtgtttatgtacaagtgtgtactgtgtatgcatgaaaagctaaacaacaaatagtttaacatggatggcaccactccttttccttgccattgcatgatccaaggattgcatattgtagatctcacagtgcttatcttgttcagactgattacctctcacaattgagggggaaaaaattaaattgttacttacttatctttataaactttcttgtgcttagcgaaatccctggacaaaaataagtgcctagaattagtttaaccagattatgacagtgactcaaaataaataatgagacccctgccccttttctttcctttctgtacttaccttcttactaattgaattgtttctcttcttgggatactatgtggttcctacatgtacaaacaataaaaatataatacataataaataacatgtatctcaaaagaatctgaggggagtagataaatagttcacataagggattcttgggtattgaaactggtaagtatcttgactgtcatgttagaacctacgcggatgataacactgcacatagaatttgcatgcacccacaaatgcatacaactgaataaaagtaaaactggatatatctgagtggatatattgcataaatgttaatattccaattgtgatattatactgtagttttacaaaatgctagtgtcaggaaaaatgggtaaattttaccaaggatctgtcgatattatttatttatttatattttattgacgtataatattaacagatgtatgcagtttcagggtatatgtgataaatttaaaacagtccaataatttgtaaagatcacatcagtgtacttcagatatccatcatcttaaatatttgttttttctttatgctagaaccatttgaattcttctcttttagctattttaatatatacaacagattattgcaaactatagttaccctactgatctgtgtaacactaggtcttaacttcatttatttaagagtatatgtgtgcccattaatcatcttgtctttaaccctccccttc

SEQ ID NO: 7611 - DNA, 1062 bp, Homo sapiens
gatttgtaaaacacacatggcgtgactttgatttctccactatgaatggtgtttcagcaactaggcatcatgtagtttcctttacaagtctctacattttgttatagtcacacattgtcattacttcaaaatgttcacttgtataattcttgcctctgaactgaaacattttactcttattgtcaataagctctgcttttgtggtgaaaagattataatgctggcacatgagttttacaataattttgtataactaactggttgagattggacagcattgctggagaccaacggaagcagagctatttatggaggtagacagaaaaatagaagcatccactgttggatttccaggacagatcccagcaataggcagaaggtaagcactgaataaatatttgtttaataactgaatggttggataaatgtcaagtgcctggtagagacaagaacaattaggactatgaataggagagttttaaatgaagcaatgtgttatgacttaaaataatattaaatgaggaattgaaaactgggagtcaaaattactttcaagaagcttggttgtaaagagagcaaatcaaagttactacaagtaaaatcatgagttttaagactcacttgtacataagtataacatagtgttacacttaaggctaccctcttagcaaatttcaagtaaatgatacagtattattaactatagttctgacttctttaaaacttaaaatctttctcttatggcagatttttgatatgactagattttcttgtaaaaaattaaaaaaaaatctcccaaccttcaaacacagagaactaaagttctaaagtagtattgtctagaatcatgcttatgacaaagatgtgttaatgtgttgtatagaagtgtcagaatctattttacttatagtcatatttcttgtaaaatttatcttgggctgtacttcataccataagcttcgattaatacatgcaagactgattccttcactctgagaccaacaattgatcaaatggaatttaggtttataataggataaacagtattatgaaaagatagaa

SEQ ID NO: 7612 - DNA, 1035 bp, Homo sapiens
catcatccacataaaagaatcaattattgaggaagttgtcaaacttgtgtatttatattcacgcacacacagttaacacacatgcatgatttatagaactaaaaggagcaataggtacatcttcaatcatgaagactttaatataccttttttgatacctgatagcaaaaaggatacaaaatatcaataataatacagaaatttaaagcagtaagattaaatactttgacataaaaactgtacccaaaaatagcaaaacacacatttattgtagtgtatttggaacatgtttcaaaatttaccgtagatgtcaatagatatctctgtctatctaggtagagagatgatagatagataggaaaacagatagatagatagatagatagatagatagatagatagatagatagatagatataggctgaggttaggccccaaacaacaatctataaataccaaaaatttgaaatctttgacagtgtttttgtacaacaattttattgacctggaaatctatggcaagactttgaaagtgtacaaatgtttggaaattaagcatcatatttctaagttattcatggatcaaaaaagtaattacaatgaatattaaaatatattttgaatttaataataacaaaagtaaaaatactgcttgttaaaagttgggagacttaggcaaaccacagtttggagataaatatatatggttacataaatatgttaaaaaaagtaaagcttgaaaattaataatctaatcatcaatctaaaaaatttaaaatgtaatgtcaaattaaatccaaagaattagaaaagagaagatacataagaagcaggagaaaaggaaacaatcacaaaataaatgaaatcaacaaaagccaaagttactacgaaaagacagataaaaatataccatgattacacaagaaattaaaaaaagagtatacacaaattccaaatatgaataataacaaggaaatcattatggattctatagtcatgagagagaaaaagagaattcagtaagtaatgttaagt

SEQ ID NO: 7613 - DNA, 1068 bp, Homo sapiens
attataagtgaaaggccatatattagttttatattagggttcactcttggcattatacatttcataggtttggacaaatgcatatgtcatgtatccactactacggtattataagaatagttttactttcttaaatatttctgtgcttgatttattcatccctcccttggagactactggaaattctgatctttttacagattttcgcctttttaagaatgttgtatcattggaattatacagtatacagcctcttcagattagcttctttcactaagttatatgcattctaggttcttgcatattttgtatggcttgatagcttattcttttatcactgaatatcccattttatagatatgccagtttattgaaccatcactcacgtgttgggggcatcttggtagctaccaagttttgttatgagaaaagctgttttaaggagtcatgtgacatttttgtgtagaaatatttttgactcatttggataggagtgaagttactggtccatgtggtaagactacatttaactttgtaggaaactgcaaagctatcctctgacgtggctgtgccattttgcattcccacaagcaataaatgagtttcccttgctctttatccttaacatgatttagtgttgtctgtgttttagattttagccattttagtaggcatgcagtggtatcttgttctagtgagcaattgtctaataatatataatgttgagcatatttcatttgcttatttgccatcaatatgttttccttggtgaaatgtctgttcagatctcctgcccactttttaactggattatttatcttttttttctttttgagttttaagagttctgtgtaatgctcataccagttcttaattggatacatgttttgtaaatattgtctcccagtcttggcttgttttttaaatataaactatgtctctcttagagcagaagtactaatttttataaaattcaatttataacattcttctatagtctcgcatttttatatttaaatctattatccattcttgtatattgtgtaaacacagtgtctagattctttt

SEQ ID NO: 7614 - DNA, 1489 bp, Homo sapiens
acgctagcttcctgaccttggacaaaattcttaacctctttgtgtctcattttcaataactgtgaattaaagataataattatatatttctcaagggattattgtgtgaattaaataaaataatcctctaaaatacttagtacagattctggaacataataagtagaaaaaattaataactattattatttttatttactatattatatgacatactttttctttatgatcttcaggagaatttctactcatcttaaaaccatatatagatatttatctgcggagaaacttatctctgttatttcaaggtctgtggattacataatggtcaactctgatttactgattgactaaacaaaattttaaaacaaaaataaaaatattgcagctatgttggttttaaccattctaaactgatgaaatttgctttctgtttggtttgtgactaggaagctaaacattatttattaggaccaaaaatttctggtgtctaaaaaaattcaagaggaaaactgttagattctattacaaatgggtatatttgaactgttaagatttaactgcgagtatgtagataatgcaaatatatcttagggtaaaacttttgttcttattaagttacccattttacattttgagaacactaatagaaattcttgtcaaagagaagatctaagatggtttaaagaaaatattaaatgaaatcaaagttacttgtcaagctccatagcacaacttacaagtcataaatcacactctgtatgacagctacaggagggatctgggtagtaaaacaaaatgatgcattttatctttcccgtttttgagttattaagaaccagttgaactatagaatgatgtgaaagactcacatcagagatgggaggttatttgcagaaactcttgttttctttaccacattaatgtcaatatttgacatttccatatgactaattgttgaactaacttttgatttcttatgccaactattaataatcctcttttcatctagaaaacaatcactttttgtctatctgtaaattaatatttgttatgttaattcatttttgcttattacaaagattaccttttatttacagaaaaagcagtcatagatttgtcttcaatcaaatctcttaaatgttaattgaattattgaaaggaatttgtaaattattgttttttctaaaatagtaacatcagcgtgtatattacattaattttttactgttttttcttcacattaactatatttaactgattttaacaatcttagataattccaaaacatcaattattttacttggatttattaattcattcaaaaaatatatgacgagaatctattatttgccaggcactaggctaggcaaaggtaagagtgaagggcaaaatcatgttctctctgttttcctgtaatatattgtctggctaaaggctgtgaagaaagagtaatgtgaaggaagggtattcgaaggatataagaaaa

SEQ ID NO: 7615 - DNA, 1028 bp, Homo sapiens
tataattatccatgaggtaattttagtaataacaatgcataaaattaactctcatccacaaatgcgggtgataaagcactgctagaaatttgactatgaatatttcagtatcactttcccttgctaattttctcttccttgtatttgatataaatgatacattaactgtggagtctctagtagattagagtttcttataaaagacacttcatttatctcgatgatcatactttcttttctaatctatttgcccttgcctagatcctctcctgaccctcactttcaatgacaaactctattccccaatgcacttgatgtcattgtcttcactatttacagccctgactgagtaatctcgctctttgtactgctgatgcaaagtattacatgtaatggatatcataaattacatcttagcatagacagatagaaccaatgctttttgaattttctagaataattacagaaattgacattcgtctgccactgctgcagataaatagtgcttcagctgttgtctccatagtcaaattatttctgcctgcacaagatctgacaagaggtcctcaataaatatacagtgggaggaaaatgtactgttatttgccggtgtgtttgttttatattttaccaaataatcaacacttctttatctttttattctacatctcaatcatataaacaatcattaactccttaatcaacacaatgattattgcctttcttcagaatgtagcccagccctgaatgaatcctacaatattttgcatgacactgcgcaaaatgatatgaaattttatagcaaacagaaaaattcaagaaataatgtggtacacataagcatattcttatgtgcatgtgcatatacaccagaacatgtgaatttcaaaagccacttgtttttctttaaatttgtttcatacatctaaataattactgaacctaacactatgtttaaggaaatatctcagatataatttaggatatttgcatatatattaataattttcaattgtgagttaatttta

SEQ ID NO: 7616 - DNA, 1047 bp, Homo sapiens
tataaagcaaagaggtttaatttactcacagttctgcctagctggggaggcttcagaaaacttacaatcatggcagaaagtgaaggggaagcaaggcaacttcttcacaaagtggcaggaaggagaagtgacgagcaaagcgggaagagccccttgtaaaactatcagatcttgtgagaacttactcaccaacaggagaacaacatggggaaccacccctatgattcaattacctccacctggtctcccccttgacaagtgggaattatggagattatgttgatataattcaagaagagatctgtgtggagacacaaagcctaaccatatcaatgttcgaatgattttggccaagactccaagaatattaagtgtagtagaggacagtgtttctcacaaatgatgctaaaatcttttatatttttatgggggagggaaatggacttgagcataacctgccatatgaaaacttaactggggaaatggatcatggcatattcaaacataaaagtgaaactaagacatttgttaaaggactatgagaatatctacataacattgaaggaagagaaagatcagaagaagcatgaacaataagaatattcattttgccaaatcgaaaactttttgttcttaaagagaaacaaggggaaaaagactcttcagactttggataacatattgaaaacagatgtttctgacttgtataaaaataaattaaaactcttataacttaatagtaataggacaacaaccaaataaaatggtcaaaagttttgaacaatttacataattaaataaatttccaatgaacatgtaaaataagctcaaaaattattcttctgaaaaatacaaattaaaattagcataacacatagctatatatacactatgatatctaacagtaaaaacattgagataaccaagcagtggtgtggatttggataaccagaacactcatgtagctttggtaggagagggagtttaagatagtgaaattatttcggaaaacgtttgaactcatttacattacttataaagttatgc

SEQ ID NO: 7617 - DNA, 1051 bp, Homo sapiens
cttcccaacagtctgccaaagtcttaaattattccagcattgaccaaaaagtccaagtcccaagtttcatctgagacaagtcaagtccattctgcctatgagcctgtaaaatcaaaagcaagttagttacttcctagatacagtgggggtgcaggcattgggtaaatacacccattccaaatgggagaaattggccaaaacaaaggggctacaggccttatgcaaatccaaaatcctgtgggaccgtcaaatcttaaagctctgaagtaatcacctttgattcaatgtctcacattcaggtcacgcttcctgatgcaagaaatggcttcccatggccttgggaagctctgtccctgtggctttgcagggtacattccccttcttggctgatttcatgggctggcattgagtgtctgccacatttccagcagcatggtgcaaactgccagtggatctaccattctgggatctgtaggatggtggtcctcttctcacacttcactaggcagtgccccagtggggactatgtgtggggcctctgaccccacatttcctttctgcacttccctagcagaggttctccataaggacataaggactccacccctgctgcaaacttctgcctggacatgcaagcatttccatacatcctctgaaatctagacagaggttcccaaacctcactcttgacttctgtgcacctgtaggcccaataccatgtgtaagctgtcaaggcttagggcttgaatcttctgaaacaatggcttgagctgtatgttgaccccttttagccacaactagaatgcagggcaccgagtcccaagactacacaaagtagcaaggccctgggcctggaccaggaaactattttttcctcctaggcctctgggcctgtgatgggaggggctgccatgaagacctctgacatgtcttggagatattttccccattatctttgcaattaacatttgacaactaattacatatgcaaatttctgcatccagcttgaatttctcctcagaaaatgggtttttcttttctatcacattg

SEQ ID NO: 7618 - DNA, 1039 bp, Homo sapiens
gtgctcatgacatctcttttggaacaattcggaaaatttagccaatcttattaaaatgtcagtggaataaaataataacatgaactcagaactattattcatgtcactgtgtgattgtttccagaaacacatacacacacaggcatacacaaaaatgaaattatatggatatttatgaaggttaaggaaatttagtttttttagatgatatattacatgatcggaaagaatgagctattctttatatatctctcttactgatgtttatagcccatatctgcttctcagactcatcagcttctgtgattcttttattgcctctaagctcctagcatatgggccttctatttatttttacttcagatatgtccacttcattcctgctgtggtacctttgcactatttattcttcctggctgcatatcttcaaattaatgttttcttttttgtcatttaaatctcagcttatatatcacttattttgtaattgctcatcattctgccataatcctccatcaaaattctctgtgcaatacctatcaatgccatctaattccccaaattctggactattgttttataaactttcaagtaaataacatataataagttgtacttatttgttatgtagttatttacagaatatgaggtccacaatgatggaaattttctcagctttattcaatgatatatcctaagcagaataagtgctaaataaatatttcttgaatatgactaaaatagttgataattttcttataacactttttattaggttattacatgcccaacactcgtaagttgaggattagttctatgaaaaatgttgtttttctcttcattcttcacaaaattcactgtaatgttcaaacagtacttggcaaacataaaagtactcagatatatttaattatgtgattcgtttgccatggaagacaaatgaatcatataattatttttaaagtctactttcagaatttatacttttctggcctcacataaacattaaaaaccttaaattaatcactacatatctgat

SEQ ID NO: 7619 - DNA, 1030 bp, Homo sapiens
aagaaacaaaacagaaaatagcaagagttagcaaagatgtggaaaaataggaactctcatagatttctgctaaaaatgttaatttgtgcagctactgtgaaatattaatataatttagaagttcctcaaaattgaaatatagaattaccatatgacccagtaattctattcccaggcatatactttacataaaatgattgaaaagtgactccaacaaatagttagataacaatgttcattgggtattcacagtagccaaaaagtagaaagaatccaagtgtccatcaatagataaatggataaataaatgtgacatatacctgcaatggcatatcagtcactcataagaaggaatgaagcctatatacatgctgaaaacatacatgaaatttgacaccattgtgctaagtgaaatgaagcacaaaataaaggagaaatattttgattcaacttatatgaaatatctagaacagtgaaattcagaaatattaaagttcaccagtgacttgggcaagagaaaaatggagttattacacaatggctgtagagtttgtttagtatgatgaaaaattttggaaactaatagttgcgatgaccacataacatagtaaataaaactaatgtcactaactttatacataaaaatggttaaataggaaattgtatgtgatatgtcttactatgataaaaaagactttaaaaagaaaattgttagtggagataaagaaaaactttttgtaatgataaaaaggccaaccaatcagaagaaaacaaatcaaattggcttaaataaaacattatattatagggacccagattccccaaaaatgtatccagacatttatgtgcaacattaaactatttattcgtcctctcagtacatttttcaaagcaaactatttactttcaaatcactttttcctcggcttaaagtctttaagacaaagtaataagatatggtgaatgaaacacactgtgtcaaatgatgagatctttaacaatgaagcacttaatgaatacagtgcactgc

SEQ ID NO: 7620 - DNA, 1037 bp, Homo sapiens
ttgctactaagtgataaggaaacattgtaagatgatgggcctgaaggagaagagaatatatgtggtttacaaagactatttgaatttttttatgtttgctcattttttttctaattttgaggtaagattatgttttgttttttctttgtctattaattttaaacaagaagaaattaaaataattatcaaatgaactctttggaataaacgaattttataaattaatttgcaagaaaaggcaatctatgaagaattgaagaaaatatgctaccttgagtcaacaaatagcaggaaaaaaattagtgcatgccatttagattattcacataataattgtagcagtattttgattattggattttttattttcccttgtttattaggcaatacaaaagctaaaaaatgtatttacatgatttttttttcttttacactatctcataatctgaatcttattattatcctgattttcttacacctatgtagttttggttaacaaacccaagaataatattgcctatactctgttaactgttcttcagtagaaatcattaaaatcaaattgacattatacttacacatagccaaaaagaggaatggttcaggatagccatctattccgcatctaaggcagagtaagtcaataagagatccctccttagcatactagcttcattggatggatataaatacattatgcaatcagaaaccataggaattctgaagtggctcttctaatatcagaaaaaaaaaaacttcaaagagtaacagcagaataatggtagagtaggcagacccaaactcttgccctcccacagaaatattgagaaagcaagagacagcatcagaaccaactttgtcataactcttagacacaaaggttcccagcaaccaagtgaatgctggaacaagaaaatagcagctttaaatggtaggaaagcttagtggcatttacttacccttactcaactttcttcccatcacatcagcaaacttgaagggagacgctcacattcccagtctgagaccctggtgcc

SEQ ID NO: 7621 - DNA, 1074 bp, Homo sapiens
cagtttcattttttgcctggtagtaaaaattcaccaccccagactggcttgcatatagaacaggtcatgagacacagttctggtcaaggagatgtaaggagttacaaggtggggctccaagctgaaaaagtaaggaattggtcctgttgacttgctcctgttatcctttcttttccccatcagcctcagccttctcctatcttaattaaaagcttgatgtctaatggagccagagcactcttgtaagcttgagggaaagtcctatacattaaggatggcagagtataaagttgaaggaacctgactgtcggtaaggattgtgggatctctgttctgaattggaccactgaactctaaagtgaggaaaataaactgattatttagtggagccaaagcttgttggggttgaagtttttcacagccaaacatttacatcttaaatatactaagcaatcagcaaaagcgagaaaatgatctattgaacagaagtttcatgcattcattcaagtctcgatatggagcgtccaccttttgccaaataattgccctaggaactgaacttgggtccttgagggagactgacactttgccttcaaagatgttcattcagagaatcaggattcatgcataagtgcagttcaaagcaggctgatgaaagtttccataaaaaatgatattatactaaagatataggaatgttttcatctccttaacatacatctagtgaaaaagaaaacatttgttcaacatttggccagggaattggacaaagctcagtttatggtgagtttatgtgccatattaaagtgttttagtgactgatttccctgatactactgaaaaaaatttgtttaatttcaccaaattatctattaactgctaaatactatatttgtgtaaataataaagccaaaataagtatttctgacatgacatttgccatctcttaatttataaattgtttttaaaaaattattgaatatctgttttcactaagattcatgtatgtcttatttagctgtttgcttttcttgtttgtttgcttgtttattcatttatttatttaaataccag

SEQ ID NO: 7622 - DNA, 1021 bp, Homo sapiens
cccactgacctgcgcccagtgtctggcactccctagtgagatgaacccggtacctcagatggaaatgcagaaatcacccgtcttctgcatcgctcacgctgggagctgtagaccggagttgttcctattcagccatcttggctcctcccgaaagaaggtatttctaagacagaaatatttatcacatatggcttttttttcttgctatttcatttttactatttccttgctgcagtgtagacataatgccagaagttttatcaaatatctagaaccagctacaaaatttgcattacccagtacaaataaaaatgtgggactcttgtttaaaaatcaggggaaaatgtttagataaatataaaatatttcgtgaaaatactttgttactttaaaatttgatatgggggtaaagtaatatataagtaacaatataatgacagaaaatcatattacaaaggacaaaaaaattatgtcattcataacttttataacaataaataataatggtctgttaatgtgacatttgattgattatatgattctttggactaaattttctgcaaatcaatttactttgtcttctaaatatatactttagcaatttcatttttaagcagtatagttgaaagtgatgccagtttctttggacaaatgcaagatccagataatatttataatttctaattttggaaaggatttttatgctaatgcaattggtactgtaactcttaagtgtattttatagaatgtaaaaatttgtggataaggttctggtaaattagcttaaaatatatattttagcatatctggagatgatgacactaatagaactttttttttctaaaaatatttaagtcttcaaataaattattttggggtaattgtaaatttaattttaaatattagtttataaaatggcattttattgttttctttgctattttctgtaactttctagctagtgtaactgttttgtttacaagttgctcattgccctctgtgcctagggtctgagcctctg

SEQ ID NO: 7623 - DNA, 1046 bp, Homo sapiens
gaaaccccgtctctacgaaaaatacaaaaatttgactagttgtggtggcacatgcctgtaatcccagctactcgggagactgaggtaggagaatcacttgaaccctggaggcggaggttgcagtgagccgagatcacgccattgcactccagcctgggcaacaagagcaaaaactccgtctcaaaaaaaagaaaaaaaaaaaagaaagaaagaaatccaattctgctaaatctatgcatgcatgggttctacttcctaggaatattggcagtgtcaactattttaagatatatttccccagctagagactgaaataagtttttatgttccaatctatagttatttgtaaggtaagaggtaagtggaaaagtgataaaagtttgatgaaagccaatgtagtgtgctttgtttagcaatttacaactctaatcaattgagatttttgaatttggattttgtagtcactttcagccaaatgtaattttaactaatagaatctgttgtttgctctcaagagctctgactgctcaggtacatttattgagttttttttttttttttgtgacaggcactgtgctaagatatttatatacactgttatttgatcccttaatagttcaatggaagtgctgttatctgccttttacagaatatgaatttgaagctcagaggattgcctcaggttccttaggttacacatttgttaagtgacactaccacatcttgaattcatatctgtctgagtaaaaaaagtcataccttgaatactatagcagctggtatgtgatttttacaataaaaaaaattcatgcttttattgagatgaaatctgtattgctctagcttagattctttgtgtacatacaataccatttactattgtacctctctctcacctgaaaagcttatcaaatactagattgtagattgtaaaaattatatcccctaactcatcactgtcattctacaggcaaacgaattatttagtttctctgtttattgttgttgttatctaaatataagcatgctttaaattgtgtcttcta

SEQ ID NO: 7624 - DNA, 1737 bp, Homo sapiens
gtccagctgagattcctttccttcacacttacctcctctttgtaggtatcagaccttcctccagcttctgtataccctgcagggtaagctgttgttccctgaggctgaggctgaggcagagaatcttccagatgataaaccccagcagccgactcgaccccaggagcagagtacaggagacaccatggggagagaccctggtgtgtccttcaaggtaaatgagagatggaacaggtgggcatgggctggcaggtggagacagaagctgggagattggccttacccactgtctatactgtatttctccaaggctgttggtctacaacctgctggagatgtaaatttgccatgacttcctggaggacagcagcatggagaaagatcctagaaaaggtcagacccaactcaggccttggtgtccctggactgcaagtgtggaaggagggaaagcctggtttacctctctctgcatctgagctctgctacccatggagcagatggatggtgggaacaggaaagagcttatgttacacctcattcccatgcttagcccacccagagctaacccctgtcttcttccccaggcctctgacttccctcacctcccaaccatcattacaggaaagactgtgaactcctgagttcagcttgatttctgactacatcccagcaagctctggcatctgtggattaaaatccctggatctctctcagttgtgtatttgttcatcttcatatgctggcaggaacaactattaatacagatactcagaagccaataacatgacaggagctgggactggtttgaacacagggtgtgcagatggggagggggtactggccttgggcctcctatgatgcagacatggtgaatttaattcaaggaggaggagaatgttttaggcaggtggttatatgtgggaagataattttattcatggatccaaatgtttgttgagtcctttctttgtgctaaggttcttgcggtgaaccagaattataacagtgagctcatctgactgttttaggatgtacagcctagtgttaacattcttggtatctttttgtgccttatctaaaacatttctcgatcactggtttcagatgttcatttattatattcttttcaaagattcagagattggcttttgtcatccactattgtatgttttgtttcattgacctctagtgataccttgatctttcccactttctgttttcggattggagaagatgtaccttttttgtcaactcttacttttatcagatgatcaactcacgtatttggatctttatttgttttctcaaataaatatttaaggttatacatttcttctgacttcctttattttcacaatcattcaattcatagcatttcctatattctgttataattatttcattgattcataaatttctttgaaaaataatttggtcttctattgattgtgagaagataatctaagtttaatttggtcagagaatatcatctgtttaataaactttgaaatttggtgagtgaattatcttttttactgataaagagtgatgtcatcttttttaatgtttcacataggtttggaaagaatgcattttagattgtgtgtagtattttctattagattatgtttgcaatttttgtttcaatttatatcttatatacttaattttttgttgtctgtcacctgagaggtgtgttcaaatctccaactatgatagtggatttgtgcatttgtc

SEQ ID NO: 7625 - DNA, 1119 bp, Homo sapiens
ttttggcacgtattaccaccgtgtgccctccatgcacgccattcctggttgcaggctgtggacccttcaggcccttgtgtaaactctggtcaaggcaagactctcaatactatatatactgatatacacatccacatttgtttgtgtacacacacgaactgtagaactagcaccacaagaaactgcaatttcctgtgtttccttgcccctccagggtcctggctgaggtggcaggcatcttggaacctgtaggcctgcaggaggaggcagaactgccagccaagatcctggttgagtttgtggtggtatgtacaagatgagagcgagcctttcagaagccagggtctggtcctggctcctcttactgagatacagggcagcactggcagagagcagacttaaggaaacctgtaaggaggtaaggatgttccctgtctctgccctccctctgagcaggactctcagaagaaagacaagctgctctgcagccagcttcaggtagcggatttcctgcagaacatcctggctcaggaggacactgctaagggtctcgaccccttggcttctgaagacacgagccgtgagtaggcaggggattgtagtagcagctgacctgagtggggaaggaaggaggatttcagttaggtctcccatttggctgatgggaaggaggcccagtgttgcagggaggcaggctagcaggccaccctcactcatgtactcattcctggtggctcatctcaggacagaaggcaattgcagctaaggaacaatggaaagagctgaaggccacctacagggagcacgtagaggccatcaaaattggcctcaccaaggccctgactcagatggaggaagcccagaggaaacggacacaactccgggaagcctttgagcagctccaggccaaggtacacccaggggtcttgagtacagggagggaagggcagttagaaaggaagagggaaagagtgagcaagctgagttgtgccagcttgcaatctcccaaaattctagccagaaaaaatagacttctcttggtctttctcccttgcttatctgtagaaacaaatggccatggagaaacgcagagcagtccagaaccagtggcagctacaa

SEQ ID NO: 7626 - DNA, 1026 bp, Homo sapiens
tggagatgggaggagaaaatctgaaggtaaatgtcctgtgcttctttcttctctcataccatccatggttatcttttagacacagaagcttgggtgtattccaactccttgatcaggatatttccacttgtcccattagttttcacagacagcagtttcatatctctgtcaagatcttttgttttctcttatcctgaaattgtctgtctgggaaaacccttctttcaagtgtggaaggctccttgggtgtgtcagtgcttctcccttggactgcagtaacttttttgtcatatttgggcttaacttcacttagttctacagagttataaccctgctctcttcttctttgactaaagcataaaaagtatctcttgtcctttgaaggagaagatttattccttttaaatctgaggggcttaaaaatttttcaagccctaactgggttctcacttttgtttgagcataaacttctttattgtaattcagcagctatgctagtcttggtggaatggggataatgaaaggacatcagagagtaaggcttctcttaccccggtactcttttatttaattcagagaaaataaacaccttctctaaccttatttgtcatgttcactgatagtaatcttttctgtgtttgaggagaaatacttcttgttacattcctaactaaaaaatgagtcatgatctcattcagaactttgagatgattctttttttttttttttttttttgagatggagttttgctcttgttgcccaggctggagtgcaatggcgcgatctcggctcaccacaacctctgcctcccaggttcaagccattctcctgcctcagcctcccgagtagttgggattacaggcacctgccaccatgcctggctaattttgtattattagtagagacggggtttctccatgttggtcaggctggtctcaaactctcgccctcaggtgatccacctgcctcggcctcccaaagtgctgggattacaggcgtgaggtacctcacctggccgagacggtt

SEQ ID NO: 7627 - DNA, 1026 bp, Homo sapiens
gtattttcatgatctttacctcagaaaaattaaggcactatagaaattctttatatactttctataaattaataagtgataggttattagccatagcctcttaaatgtagctttatttctaaacatagttacctcttgaaatgaactccacatatttatgaagagtagatatccttttatttattatacaagtaccagcactaagctttacagactctctgtcttagatctggggtttacaagtgccagtccttagacttctgcaggactcacttcataagagtcctaaatagagtttccagagttataaaagtaaatctagttaattgtgctatctttatgatacacacacgtctatgagaggtatatagatatgtaaaattaagctctattctaatattcaaaattctgcctttacttgtaaactacatcatgtgaaatactcataattattttacaagatattttccaatcatcatattaatatagcctaatttatattcttgaccttgaacagagtgaacttaaactattccagatagaacacatctatcttaccaggcacattggctctcacctgtaatcccagcactttgggaggcgaaggtaggaggattgcttaaggcaggagttcaagaccagcctgggcaacataacaagactctatatctacaataaattttaaaaattaggccaggtgcagtggctaatgcctgtaatcccagcactttaggaggctgaggcgggtggatcacctgaggtcaggagttcaagactagcctggccaacatggtgaaaccctgtctctactaaaaatacaaaaattagctgggcatggtggtaggcacctgtagtcccagctactcaggaggctgaggcagcagaattgcttgaacccaggaggtggaggttgcagtgagccaagatcacaccactgcactccagcctgggcgacagagagagaccctgtttcaaaaataaaataaagagaaaagaaaagaaaaaaaataaaaattagctgggtgt

SEQ ID NO: 7628 - DNA, 1027 bp, Homo sapiens
aagacacacaatatgaaaagatatgttcatggattggaagaattaatattaaaatgttcgtactacccaaagcagtctacagagtcaatgtaatccctatcaaatcaccaaagacattcatcagagaaatagaaaaaagtcctaaatttgtatggaaccacaaaagacctcaaatacccaaagaaatgctgagcaaaaagaataaagctggaggcatcatactacctggcttcaaaatttaccacatagctgtaatatccaaaacaccatggcactgacataaaaacagacacatagtctaatggaacgtaatagtgaactggaaataaattcactggtttccagccaactgatttttggcaaaggtgctaagccacatacattggggaagggatggtgtcttcaataagtggggtgggaaaactggatatccataagcagaaaaatgaaactagatctgtatcccttaccatatataaaaaaccaatatgtatttgattggattggatgtaaaacataaaactactagaataaaatactgaagaaatgctttgggacaatggtctgggcaaagattttctgggcaagacctcagaaggacaggcaacaaaagcagacatacaaatggggttacatcaagccaaaaagcttatgcactacaaaggaaacaatcaacagagtgacagcctatagaatgggagaaaatatctgtagactatccttgtgagaacagattaataagcagaatgtataaagaaccaactcaacagcaaaaataatccaattaaaactgggcaaagaatctgaatagatatctctcaaaagtggacatacaaatgaccagttggggtatgaaaaagtgctcaacatcactaatcataagagaaaagcaagtataaaaaacaatgagatattatctcatgctagttaaaatggctattattaaaacgtcaaactgagcatggtggcttatgcttataatcccagccctgggaggctggggtgggaggattgcttgagccctgag

SEQ ID NO: 7629 - DNA, 1032 bp, Homo sapiens
aaccacccccatgatttaattatctccacctggctttgcccttgacatgtgaggattactacaattcaaggtaagatttgggtggggacacagccaaaccatgtcagactgctagagagagttcttcagtctgaaggaaatggatgctaagatgtaacaagaaaacatctgaagttaaaaacctcatggatgtggccgggcacagtggctcatgcctgtaatcctagcactatgggaggtcgaggtgggtggatcacctgaagtcaggagtttgcgaccagcctggccaacatggtgaaaccccatctctactaaaaatacaaaaattacccaggcgggtggtgggtgcctgtaatcccacctattcaggcagtcgaggcaggagaatcacttgaacccggaaggtggaggttgcagtgagtagagattgcaccattacagtgcagcctgggtgacagaaggtgactccatctcaaaaaaaaaaaaaaaaaaagaaaagaaaactcttggataaaagtagaacaacttaactatttggtattatgtttattatctgtgtgatgaaataatctgtacaccagacttccatgacatataatttacctacagaacaaacatgcacatggaccgctgaacctaaaagtaaaccttaaaaaaaaaaaaaaaaacagtcaaattcagaatactctaatactgtaattatggtaagtaaaaccacttatatcttaaagatgaagactaaaagacaaaactcttaataactccaacaattggttaagaggcaatataaaaaggtataaattgaaacagtcaaagtaccgggggtgatatggtgttaaagtatagagtttgtttttgatacttgacagtccacattgagttgttatcagtttaaaataacctgttgtaactacaagatgttttttataagcctcgtggtaaccacaaaccaaaaactgtaagagagacactaaaaataaatggcatagaatcaaaacatactgctagaaaaaaatccttaactacaaagga

SEQ ID NO: 7630 - DNA, 1052 bp, Homo sapiens
actcatagtcaatacaagtatttttaaaaatgtctaatattttatcaaatctaaataacatagctaggacacttgttagggaaagtttatttagtatccaaagactgtttatgttgatgtatggaaaagagcatgattttaaaaaatcaatcataggaggaaaagaaattcgcttttcaagtaggaaggaatacagctagcaagaaagcaatttatttgaaacttctaatggatttttgagtgataaaacatttactaccttgtcctttaagtctgctaggctctcagtaccctaaaataaactagattgtgttgctatttttttctttctctataaaaataacacattattttatccgttatttgaaattttacatttctggttaccaaagttcattctgatagcatgtactttgtgaattattatctttgtctataactgacagatgtttatattaaaataaaatattgtattaaaaatttaaaataggtattttggatagatatgtgtctgtagtatataatctaatgtgtccatagtattattgctaatcttttggtttactataagatgatataactattttttcattgggaatatacatttttcttaatgttccaacatctatactttgtaaagtcaaaacatttcccatgagctgtagttattcatccttctgtacaaaatgaaaagtttggaaattgtttgccctgataccttgaaaaagaagccagaatatttatttgcttcatcaacttcagtgtatatcattttgtgttattttatacgaaaacatgtttattattttcatttttgtaaaaggaagtaaaaggtcaacattttctctcatgtaccaaccttgtttgtatttctattttctgtaatgtttaagtatgatgttgaagaaattcacattctcttatagtttggatgggaagactattgactatttcagaaacagacttatttcagaggcttattgttttctctgtatttacctaatattttataacttttatgaatcagaataatgtccttcataaatttgttt

SEQ ID NO: 7631 - DNA, 1095 bp, Homo sapiens
cactttaaaaatacctttctttgggttcttttagtattagcttttcatgcatagaaagagtgcctggaagtgaccagatggcatgcccagaagcttggtgtctgacactgctcttgatgcctcccaggcccagggcttggtagacaacctgtcctgtctcttcgagttccttgagaatcatacgttcctctggctctatctggagctgctggtccaacttccctgagtgaattggctaattcagcctaactcatgccacttgagatgaatcattcttgactatactttctaattgacttgggatgagactagtaaaggtaccgcccacatcgaaggttggaatttccttcagtggtctttctgtttgctttgtatattcaatgttccccaaatattctccccatagtgcttctgctcataaatgaaaactcccatttgaaaatagcttttgtcatcttaatagcagatttttatcagctgtaccactaaggtgatcaactattcaagaatcgactagaagacctggagagtcaagtaggctgaaaaatgataagcatccagcacccagctttctctgtatccctagagggcacttctgaatattccacactatgatggataatttctctttccctagctccacagctcagggagaaccctggacctgggcaggacattgttcagccttgttgttatctgagcagttggctccattttggtgacatagggagagtaaaagatgttctcagagatcagaagctgtccattggacatttcccttggttattgctcaaattcaatgagattgagagacattaaataatgcatcccaggtcacaccagtgacaaaactgggacgagaatctgggtcttcctgagcctgtggctcgtgtttttatccattatggcaaactgcctcttgggtttgcagggtgactgtcatgaagcccagccctgttttcagggtgacaaatttcccacccctccagctccctaacacgtctagtggccatctatagaaactggcacataagactgcttggagtgctgacctcctcactgctcagtcagtctccccaatgcagagtccctttt

SEQ ID NO: 7632 - DNA, 1069 bp, Homo sapiens
tattttatagaatagaccagaggactgccatttcgccaaaggatgcttttgaaactcggcaggacttaaatgaggtacgtgcaatcattactggttataagaacatgaattagccaatcatgagatttactattctttttcacagtactaggaattcattctcatgaaaacttagtatttttgcttttaagtgaacttgtaatacttatagttctttgttcaattggtaatgtttttcctttttccggagcaaacatttaaaatactgtttgtgaggtggcttgcgatgtcttggccctaacccaagtccagcagtcattttgttacactcttttcagctttgcttcaggattgtataaccgtggcgatgacagttaacatttgcaaaattttctcttaattttattttgtctacatctctgtttttcctaacagcttctgcaatttcaaacataatcatacttactgtttatccactaagaatgatatagtttagtgtttgcaatgtgattttcttagtagacttcaagacgtgaagccgtattttccaatccaaatcatttcccaccaaactggacatcatgatgttaattagcttgttctggattttctttggaatatgtaattgaattctcctgtatgaaattaatgtaatataattatgatatctattataatgaatgccattgtttaagacattggtttggaatactctctctggctcttcttgtcctcattgtaaattaagtagtagtaggtggtatttagtacgtctgattaaggtcatagcaaagagaatgaaaagacctgatgatcagatgccaaaaagagaaatgatggggctttaccgcaaattgtttatttgacgttttgaagatgcatcccttcctcctcttcctctcccaccccacaaaaagggtatttcacttaatttaggtgattttatttttcttttctttctttttggtagaacttggtagaaataaatagctaaaggtaaaccagctgcttggttaagccaagttaaatagctaaagtggtaaaaagtgtcctaaagataagaacacag

SEQ ID NO: 7633 - DNA, 1029 bp, Homo sapiens
ccctcccccgccccctccccttcccctttccttcccttcccttcccttcccttcccttcccttcccttcccttcccttccctctttttatttattttaagttcagggtacaagtgcaggcttgtttcacaggtaaacttgtgtcatgcgggtttgttgtacagattatttaatcacccaggtattaagcctagtacccattagttattttttcctgatcctctccctcctcccacctgccaccctctgaaaggccccagtgtgtgttgtccccctctatgtgtctcatagattgatgtgttctcatcatttagctcccacttataagtgaaaatatgcggtatttggttttcactcaaaattataaaaaccctggaagacaaactaggcaatatgatttaggacacaggcctagacaaagatttcatgacagtgatgccaaaagcagttgcaacaatagcaaaaattgacagatgggatctaattaaatgaaagagcatatgcatagcaaaagaacttattgacagagtaaacaggcaatctacagaatgggaaaaaatttttgcaaactacccatccctcaaaggtctgatatccagcatctataaggaacttaaacaaatctacaagaaaaaaaccaagcaacctcataaaagaagtaggcaaaggacatgaacagacacttttctgtttttttgagactgagtctcactccgtcgctcaggctggagtgcagtgacgcaatctcagcttattgcaacctccgcctcccaggttcaagcaattctcgtgcctcagcctcccaagtagctgggactacaggtgcctgccaccacgccccactaatttttgtacttttagtagagacagggtttcaccatattgcccaggctggtctcaaactcctgacctagtgacctgcatgcctcagcctcccaaagtgctgggattacaggcatgagccaccgcgcctggccgaacagacactttaaaagaagacatacatggagccaacaaacaaatgaaaaaa

SEQ ID NO: 7634 - DNA, 1045 bp, Homo sapiens
ctactcacacccacttattttcttcgatgcctgaaatttcacctagagatgatttctttggatgaaggcctctggtagtgacccttattaaattggaaattaaaaagtttgtgcccttgggaagtggattcaaattgtcatgaatactttaatatgaattattttacctaacctattttctaacctgttatggttatggttatgcttggccagctgggagtcctagaagagtcaaggggaaagggaaattgggagggactcaaggacagattttattttcttcttggtttttcccagccctggcactatctatgcagctctagacaaattcaatttctttttccaccccaatgttttcatcacaatggccttggccttttcttccctatctgtggcaccttttcatctaatatttttccatggtcaatcgtgacattgccccagctaacttgctattttaaatgaagcctgcaataattctgattagttatcattcaaaccagtggttctcaaagctaactgatcatcaatatcaactggggaaggggactggagcttgtgaaaattgcagtctcccaggttttatctcaaagtgggaacccagaatgggtgattgtattggtgtcaggacagtgctgttttggggtttggaaacctttaggtcagtgttaaatgtttagaaacatagtagttctataggtaggcagtctgttttaaaaatccacattcctgggctctgccctcagagagttgatgtagtggggctggagacttctgttttgaccaggtacttcaggtagtgctaatgcaaggggccacattttgagaaagcccacaggaggctgtacctctgcaactttgccttcagggaacatggtactacagggcaagtgtaaatatctttatagcacaactacattttatctaacagtcagtctgaggcctctcttctgttttaggcagcaaaaagaacttcttgtgggtatttctttcaccaccattattctaagaaatggcatgccctgtctcttgtgatcctctggca

SEQ ID NO: 7635 - DNA, 1035 bp, Homo sapiens
gggtatcacacatagaacttttaattctgctggtgtaggctgttgcccaaacatctataattttactgagctcttcaagtgattctgataacacagcctggattgagaatttttataagattggcaatggaaaaacatttattcttttaaataataatttttttaaaacccaagaggtcaggggattttataaaccaatagccaagtgttctttaaataggaggcacccttcccattgtgccaaaatcatcttttcatttattttgaaatttgtatgattattttatacttgtatgttgcctttcttcgaaggcgcctgaagcactttataaacacaaatcctcacaatacctctgtgaggtaggtaaatagtacttttctatgtagtaaacctggaatatggagaatttcataacagttcattctacttaataatgcaataatggagctccaagttgtcttggacttctacaccacactcagacttctggaaagttttctgtacctcattctttagtccctgtcaaggttagtaaataaaataagtgacataaaaaaaaaaaaaactaaactacttgttgtgttgaaagttcctttttgccagttatgttcaggaaacccaataacctgaaaaagtttgactttgatgtgacatcttcatattcatcaatgctgataattgtccaaaggcatcttcactatgtctgctaaataacatccaatgtgggcgttatctgttgtctaggggatgaattttaagttacaataaaatatttttctttgttttgcatcagtttggttgctttttctcctcttagttctccacccaattatagtgacatgtcacttgaatgtaaaactataaattacctggcataattcagactctggaacatggttattggacaaaagcatattcaaaatgcttagctacttttaccattgccttccaaaaagctagtttatcagctttacctcttgtggtaaagagtactctgcaggtcttagttcttaataataatttatagaattctt

SEQ ID NO: 7636 - DNA, 1044 bp, Homo sapiens
tctgtgtaacttgatcttctgtctagtacttgtcttataggtaaccaacactgaaaactttgtagtgatgactaccaaagaaatacatagtaaaacaaccttttatttccaaattgttaaagagccagccattgatgctgctacatgagttccatgctcaagagccattgtaagagattaaggggtttctaggtttttggtgattttttgtttgtttttttctttgttttttagggtttttttttcttctttaattttttgattaaaacatacacacagctgttagcataaagtcgtggggggcattttctggaatgctcagcagttctgattaactgccaagcccaggttgcctctcatgaggcaactgaaaaaatcctgtgtcttgatagcatgggtgctgtgtgtgtgcatgtgtgtgtctgcattcatgccttaactcgggttactgcacaactttagttcttgacttagtctgcaccgtcatctagattgtattgtacatctcggtctgaacttcatcctggcaaaaacaaagttgcaggcacaacagtttaagaatgcattcctccagaagagtatctggtcaggttgacccctgagccttctttggacttgatttggaacttagcctggaaagcgaaagtggactgtccaacagaaagatgtcaacaaggaaaagaggagagccaagcgctagcatgccttttgcctctgcatatctgtgcacactgtatgttgttcatgatagcttgtctacaacttgactaggttggagttctggtaatagtggcaatcttgacattcttggtcagagtttagagagatgtaagactttcaattaatgtcttatttactcctttatgttgattagtctttgatacatgtgctgaatcagaaacctaaataaagataattttttaaaatgtacctcttgagccttaaaccctatcttttttcatttcggtttttgggaataaaacattgtttctctgttgcttctgacagacatctaacttaaattgtaaactctaaaggctgcct

SEQ ID NO: 7637 - DNA, 1498 bp, Homo sapiens
gtgggagaatgagaaagaccagatatcttttttgtttctttgttttttgagacagagtcttgctgtgttgcccaggctgaagtgcagtagctcagtctcgctcactacaacctccacctcctgagttcaagcagttctcctgcctcagcctcccgaatagctgggattacaggtgcctgccaccacgcccagctaatgtttgtatttttagtagagactgagtttcaccatgttagccaggctggtctcgaactcctgacatcaggtgatccgccttcctcagcctccccaagtgccaggattacaagtgtgagccaccatacccgaccagaaagaccatcttgtaacaattccctctgtctatggcataggggctgaactgaagtctccttttttttagatttggatatgattgcatgaaacatggtttaattgaaaactctgacttttcagattcagagaaaatggcacagtatctggaggaggaacgtcacatgagagaagagaacttgaggctccagaggaagctgcagagggagatggagagaagagaagccctctgtcgacagctctccgagagtgagtccagcttagaaatggacgacgaaaggtgtgtgcatgtcttatgagccttgtttttgtttaaaaaataaaacccaggttctacagaggttttctttggtatcctgttaggtgtataaggggatggcttaaatatgtatttattgtgctaatgaatgccactgcgttatagtagatgccaagaatgggataaagattgaacattttccttaaacacaaaaagatgaaaaaaatcacctctctaaaatcatttggtggggagagaaatggagacagggttatattagagaagcagcagagtttgcatttgttgttgaattagtttaatccagtgtcatatctgtttaaagcatgggaacatattaattcctgtactgtataaggataagcaagctatagtgcagctcgaggaaaacagtgcatgcgtaggttgaaaagaatcagtagggacacaggtgggggttgttgaaatcccaaggacttgccttaacacacttgataacttttgagcctttttgtagccacttaaaaaaaaataaaactaatggattgcattcatctgttcaaacctaagcaatgaatcccctcattgccccactgtgagtgatctggaataacagacccatcctttggttaactagcagaaatggtctcaagtatttgtgcctcatccagttctcttccctcttcctcctctctaaattcgggataaggtagtggtaagataacaaacaagtataaatggaaaaagatgttcaatctgcagagaaacccagaagttagagaattaacctttctctgaaccagatcatttctgcaaggaaattctccattctggatcagcgatgccctggcgttacatgggcggtatcttagtgtgagaggtgagactgagtattcttgggggtccctccag

SEQ ID NO: 7638 - DNA, 1034 bp, Homo sapiens
acagtcacccttctagttctagaaacagcaaatactccaaggggtcaatcttttgtttcctgtagagccaagtgaaaaattctgcatgcttgcatatttgggatcaaataatttaaatcgtttatattaaaagtgtactttgtaaatattttcccagcatgccttcaattaaagagatttttgtgtctggattagacagcggggtttctggctatgttgaaacagccaagggatttagtgtttagtgcacgtaatagtgtttaataattttggtatttttatttgaatttctaaaataaggatattcaagagcttttgtatatctgtaatgatgctgtcttggaaatcattgaatacttatcagaagtctttattggctaaaatgccagacctttgtagagttgcttaaaactgaaactaatttgatgggcattgagagttgaaatagggtcagtctgtgggagaaaaatgctcattgtggcattcagctccctccttcttccctaaatttggaccgaactgacaatatggaacagcagcctacaggaaactctcttagacgtgctcatggccactgaatttgtagctgcttttcagaaaagagaagtatatggagattttacttttcccaagttcattgacaaagacaaggaaaagaaatgaagcaagaagatgggtagacaccacattttgtattagataattctggttacttggtagcagattctgtgtgagataaaccagaaaggaatgggggcggtggggaggttgtcaaaagaggaaggaagacgtgtttttctttttttggaaggttgtggagtatgccacagaatcctgtgaagaataaccttggaaggacaagagttttgatggctccggggaacttagctgaagcagaccctggatccccataaagatgtcagttccccatttcagattcctgggagaggtagtctaagtggctcagcctgggtccaacagctagtgccagggctagtcagctctgtcctgggagatgggtgctgtagcagaga

SEQ ID NO: 7639 - DNA, 1026 bp, Homo sapiens
atctggaggttctgcatccacaaccaaagatggatggaaaatacagtattcatgggatgtcaaacctgtacatgtggaaggctgacttttcctatctgtgggttcctcagggctgactacaggacctgagtatgcacacatattggtatacttgggattcacaggttctgagggacagctgtagtaacacaatgagcacactcatttacacctttctcttttcgcttactatgcattgtagttttctcccctgctgatacatacaaagctgccttcatcccttatttaaaggctgcatagtatttgattgtatgaatatgccataattcaactagtcccataccagtggaccctttttggttgctatgctacaaccgcaatgaacatctctatacacgtgtttgatacctgtgcaggaacaccttcaggatagattccaggaagtggatttgttgggccacatggaatgtgcattttaaaaagttcagtggttcctacctttgttttcgtctctgaagttccttacaaattcttgtgccgtggagcatctgggatggtgtatcagtatcatccttggagcctttgagaaatatggtgtagtactttcctatttctgctattacaaattaccacaaacctagaggctcaaaacaatacaaacttaaccatcttacagttctaagatgggactcactaggctaaaatcagggtgtcatcagggcagccatccttctggaggttgttggggagcctctgtttcctcgccttttccagctctagaggctgcctggattccctggcttgtggccccttccttgcagtcgtaccaccccacctctgcctctgttgttacatcttcttttcactctgattcccctgcctccctttattaggatccttgtgattatgttgggcccactgtgataatctaggataatctacccatctcaagccccttaacttaatcacttctgcaaaggcccttctgtcaagtgaggttagtagcatttataggttttggggatt

SEQ ID NO: 7640 - DNA, 1050 bp, Homo sapiens
cagttatcacatatgctcccacatgtcccactgctttgttagatcagtagtaagtgtaggtttgggcatgtgaatggtgagtggtcctctgtatttcagaaggcagcgcaggctagtgttcagggcctgggctctgacttcaaagcaaccagttgtgaacccgttccctctacttaataatcctttcaccagttcactttctttttaacagccctagtgagatgtaatttacatatcctacaattcacccacttaaaaggtacaacccagtggttttcagtgtattcggagttgtgcaaccatcaccaaatcaattttaggacattgttgtgaactcaaaatgaaaccccgtaccattcatctgtcacctctaatcccctataacctctaagcaactgctgttctactttctgtctgtgtatttgcctattctggacatttcatgtaaatagaatcataatatgtggtcttttgtgattggcttctttcatttaccataatgttttcatccctgttgtatctgtactcttctttttttctggctaaataatcatctatggtatggatataccacactcatcaattatccatttatcgtttgatggacatttaggttgtttccatcttttagttattatgaagaatgctgctatgaacattcacgtataatttttttgtgtggacatatgttttcatttttcttagtcatatgccaaggagtgaaattgctgggtcacatggtaactctccttaaaattgtggaaacaaaatgtaattttaaaataatccatactttgcatgtagtgggtgaacctgcagaagggatattggaaggcattctgccagagatttgagttggtcacgatgtgtttgttttgaaagtagagcttgggttatcatggtttctgagttggctcctttctgttctctgtaaagcagaacttaactgggctgagtttcttcctaggaaggccccagttaactcacatgtcagcagggcctcactgtaagtttatctcactgaaagttagtcctttggtatggacactt

SEQ ID NO: 7641 - DNA, 1019 bp, Homo sapiens
atgcctggaggaatttaagtgaaaagtagttttcagctttctctccccactgtggagacttcatttctaaagtgagcattgacaggtttacatagttcctatcattctctcacacattttctcttttttaaccacaattaataaagtttcaggagataagttgtgatgtactgatttatagcaggaaatgtcagcttcctttttgcaaagcaaagggagaagaatgtttttgaccacaggatagtttctgtgaaagttcctaagacaatgttgctatggaactaaaactggtctttcaaagcttcttcagaataaacaattaacattttcctctttgattgattggcaaccttacatgagccttctcttctcccagtccagacttgttggtacaaatatggagtcatagacttggtaactcaccttgagtcaaccactgactgattgtatgaccttatattaacttcattaatttctctgggctcaggttctccatttgtaaacagagcaggacagactaaaaccagaaatggcaaacttaacaagggacaaaggtgggaagtagtaatagcacgcaatccctttgtcctctgccctcagcaggcattggtgttggaacattggccttgggagtccagacttggtctgtatgccccattatcacagagaactctgggcagctgttgtcactccattcagggtgtgtcaaactatattattgctagcctcggtgttccccgatgccttcacccatgctagcgtcctgaaattttagttcccttaagttataagaggctgatgctagtgtactgctacctgggtttccatgtaaaatgcagtagatgaagatcttccagctgtttgtattttagatcctgattgccctgattaggctaagcctcattaaagttgtctgatttatctcacattcaggcttctccctgtgcaccttactccatgttaactcattccatcagtcactctcaggaccgctctcgtttgaatattttacctgagaa

SEQ ID NO: 7642 - DNA, 1053 bp, Homo sapiens
acagctagtcttgagtcaccctgcaccaggcttcccagggtttttacgtctgtggtgccatgagctatagctttaaaataggcaggtcaattcagggtgttggttcaaaccctattggagccacgttgcttgaatttacatggtatctgtttaaaagagaatatctgaatttttcttagacaaactatatgaggcaagttctgtagttattagtccttcaaggtccctatgcacacatttgcctcctacctcttgctcatcttaacccttgtctcatgattttaggggactgaggtgcttctgtgcttctctcaagcaagcttttttttttttttttttttttagacagggtcgcagtctgtcacccaggctggattgcaggggtgcactcatgctcactgcagccttgaccttctgggctccagcagtcctctcacctcagtctcctgagtagctgggactacaggtgcgcgcaccaccgtgtccagctaatctttttttgtagagacagagcctcactctgttgcctaggctggtcgcaaactctggggctcaagcgatcctcttgcttcggcctctaaaagtgctgggattataggcatgagccactgtgcctggccgtgtttctctttttattggcagtttctttgttccaggaagaactatattttctgtttctagtctttgttcaggaactccatgctctgcttctgttgcatgtcacctgaggtggcagaacaaagcaggcagcagaactgtttgttttagcactgtctttgggggatgataaaaactgtgaatctttagcaaacagagttagatctcagaatggcttgatattttccaaatgggttagtgtaacccagtgaccttacttgagttctggtaatgacagctttaccatcaaattttccttagggtacagctcttgagaggaaaatgcctcctaaaattgagagctctgttaggctttgttactagttcaatctatagtcttaaaggaagtacctaaagctactgacagtgttagaccatctgtctaaatatggatat

SEQ ID NO: 7643 - DNA, 1024 bp, Homo sapiens
tcaagtctgacagtgtctataaacctcctctaaagggtggtctgcaggctagtacttcaactatgtgtcccttgcccataagaaaataagttaataaatccagcgtaaacatttagctacttttctagcaatttttcattgctctgtatccaagtaagtgaccagtgaacccatcttcttgaaccaggtatggaccaggttgagtgtttttgaactgacatgatgaggtgtgtatgcaaagctgtgttctagtcatgtgcattaggacatgcccagaaggacatgtgtctgtccactgcagatgggggtgggcagtgacgactacctggtctttcatgaaagctggtttgagagaaaccacagttggtaaaatttagtaacttaagaattcttatccagaaagtcactctttggtgctattttctctcttgctctgcagtcctgtaacaatgacctaggcttagtatctgaggcagaattagtgcatttgccagggctaataatgattctgctccaatccctgtatatattagtgacttgctggcaatactggaatggagtaaataatatgaatgcttcagttatcaactattagttgcttttattgtgagctagtgtgcagtatgcggaggaagcgtgtactagtctagggcttccaaagactaaatggagaattgtaattctcaggcatgtgactgaaatcctcttcttgcttcttctaatagaaaaaataaaggcacatgcaggcttgtcctctgtgtcatctgttacctacccctgctgcaccggcacttaaatattaaacagatgtctgcaggacagtggttggtgttgataaacccattgctgtgaccaacagtcaagctaatcctataagaattgccagccattggtcatgagggattctgctaaattctgaccatctcccacaacaatcattatgtacagtagtatacctaggaaaggacagtttaaacagaacaagtttttattcagttgcctgtgtgttgggtggtccctgcta

SEQ ID NO: 7644 - DNA, 1045 bp, Homo sapiens
aattgttggatctctcagtgagatgataactgctaatttatacggtacctgcttctcaaatggatttgaggtggccaagaagatatcccttccctccaagcacacaaactgcatcttttcctttcctttcccttatggcttggcctaaatgaatagtcataattgttaaataattccttgcctatgaaaaaaaattttctgaaagggggctcttcatccaaaaaaacttcattgggatgccccatggaggcactgaaatctctcattatgactctttttaaggcagggtgtgagtagaagacttgatactttggcaagctgaatgttatgattggttgtgaaggggtaggggtttgtgtgtcacattctgggtcaccttagactcctgaatcttttcacatggattgggatgtgacttgaccagaacatacttttctaattttcttgtctaacagggcattgaaccttctgatttctggcacccctgttttgctacatagccttatccgtaaactgcagctgtgaattccttctcatttggtttcatgggatagattgtgaaactggctgatataaatggcgagttttcccttgcagtatccagcctgacagtattcaagaaaggaaagggaaggaaggtgaagaggagtgcttggataaatggaatcaaaactcagaccaattcaagtagatgaaataaacaaggggggagctggaaatgcagacattttgctgtcaagtgtagggcttcttgtgcatatttgtaataatgaggtctggctatgagcatccaattaactcctggatacttatttgtttctcaagaaaaatttctaaactcttgtttttcataaatctatagtttataatatgggtgttcttaaaataggattgaactttagtaacttcttattccttaagatactaaggaactgaggtactgtctaattttgtctaaacacagtatatggccatttattccattgaaatgctttgaaatggcatctaaattccatagatacccgaacttagttgtgtaccctct

SEQ ID NO: 7645 - DNA, 2004 bp, Homo sapiens
ggatatttttgaggttacgtctaccctatcacacattgtccccttcatggggactctcacaagaaaattgttttctttggtcttaataccaagtagagctcctcagttttggggcaacaaaaactgcttaggcagccaggatgttcagcgaagttttcaaaatgcatactacctgttgatcagcatgtgtgtaatttcaacttttggcttcatttgaatattggactttttttctcctctggccatccatgcctcctctccctttaaaatcttacacatttatgcaagaaccccccagtgaattttagaatgaattcatgtattaaaaattagcccaaaatgaatctgaaattttagtaggccctcagctgatccctaagagaggaaaggggcataattgtctcacctcgttatgccccttctgggacaccaagataaagaaggtggaatttcccccatgtgaagccccaacagtttctttttttcttatgaatgtgctgccgggatgttcatcttaaaaccattctgaagtcttacaggacacatcacactctggctcacacccacttctcggggattgccctggacctctcattctctgggctggggtgactgtcagtatcaggggcccaggaacagtggtgagtggtaggaagtggtgacatctgtgataatacagtgaaaacagtagacaagatattggttgaagatggctattatggtggaagatgtggatttagtcagaaggcacatggctgaggagactgttgggacctgctgggcggggctgaagggctttggttggggaaggaggagataaagggagtgcagcagggggtcgggcagacaacgctctgctctgccagattatagaaaggtagtcatctctgatcatgtcagaactgatcgttccttcctgagttgcacagaggtggcactgggcagagactggatagcaggacatcagtggtttgaaccaccatcctctgtgcaccaggctaaatacaagcagtaactcacataactctcaaaaggagcctgtgagtataagagttatcctcatttacagatggaagatgtgtctcagagaggttaaggaactggcctaaatagtggacatatgccactttcagagcctcagttaagtggaggctgctctgtgacatgctaccactttatcttttccttttaaaaactttttttggagtataacttatacacatatggtaagtgtacattttgattcattttcacagattgaaggcacatgtgtaacttgcacccagatcacgaaacagaatattactaatacctggactccactgtgcccccttccggccattatccctccaagggtagccactatgtggagtttgaactctgcttaactggaattagacagtgtgtactttttaagtgtttaatgtctttctcccagcattatgtctgtgggatttatctatattgttggtctcttcccgtctgagattgggtcttagaacctagagtgtccagaaaaaccatttgttactatagggcaaaaccatttgttactatagggctgtaaagtcccctgagtgtacagttggtattttcagaacttgtaaaattggaaaatgtggtcctctcggtgtcatcgtggtctgccatgctttgagcattagaagaaaaagctacctggttttcagagttcttggtatagaggattctctgtatattaagaaggaaatgtcttcggtattttttaaagaatggattaaaaatattgatgcactcagagcctctgccagagacattttctcttatagatgtagcatgcttctatgcaatagctaggatcctgaaaagtttatttgcagatgaagttaaattcggttttatcaaaatgtaaatgtatgagggagcctgatggtgaaagaaaagggaaattggtaaaatgatgaatcatttgtgccctcaaagacctctaggcacatattgaacaagcttgggtttatcgttcat

SEQ ID NO: 7646 - DNA, 1029 bp, Homo sapiens
gctgtaaagtattctgggaactgggcgcactctctttaactcttcctctgttgattgttttcagtctccttctttctataaagcaagttaaaggaaacattcttttaacaatgtttttaacaagtcttagcaatggtttttattatctgtaggataatctaggagtagagttgccagtttttagagtatgtgcttttgaaattttgtttgtattcacttgggcagcagtaagtcatcttttgcttattgtcgtcgctgtctcgacctgaaatcctttctttttatattcttgccttctttttttggtcctgtagcagggaacatcttatttttttgtttgttttgaaggggttgcttttacttagaacaaattgccatgttacttacctttatttttttcctgaaacttagtcaactttcttaacattaaactcctcttttgcttaattggcttagaagtaagtgagagaacagagataatatggcttttagtaccaaatgcttctcttagtaagaatctacagattggttgatgttaggagtttaaaactgtttttggagcccattaaagacatgtctcctgtttgtatgggtcactctctcaagtcacataagaaggtggtggtctttgtaaaaatgctagaaaatgttgggaaatttgttcaaagtttgaggctttctgtcaaacttgagggttttgaactctgacaacaatacattaaactttatccagtttatactgcatacagagtttcttaaagcaggctctaccctgatcaccatcagtatatgtgatagggatcttagccctctgttctcaaatatagtttagggagttttagaggaaagtgtgtttcctcattaaataatcagttgagttgactccaatttgtgtacgtgaaaccaacaaaaagaatataaacttttaatattatggtccagttggataggatttataattttgagtaaccttccagtaaaactttgtgattcattaagtttttccctgtcatcagcctgtgctgacat

SEQ ID NO: 7647 - DNA, 1151 bp, Homo sapiens
gtcagagggttttctcaaactggattttggtagtctggtaaatggacagtgacatattagtacagtctttgcatttctctcaagggggtggataagcatcatttcttgtgtttataagagccatttgtattctttttctgtacctgcctagttgatatcctttcttgtttgtctttggggaccttggtctttctcttacccatttttcttagaactctatatgttacaatgacttgctcttgtttttcaattttgagttgcaaaaaaatttcccacctgtcaattgtcttttgacttggcttttggtgttttttggccacagtgaaaatttttatttttatggtttcttgatgtcatttataatctacaggaaatattgctaacattttatggtaaaacctttctgtatatttacttctttggaaaaaagtaggacagactgcttttgtgtttttgtttaaatgatagtgcatttaagacagattcagaagagtgtgtagaagtagcgatgccagatattcttttaaattgcataaacaattgaactcacaactgcacattagatacatctcctggtgtcttttttcctcattcttgtctgtataacactttatatttcatatgagatcttgaattaggataatttcctctgactagttgatcaattactgaattgtttattttggatactattattgtagcctccttcttcctccagaagctgctgcttaaatggattcaagtgtaattggcattatttttctatcctggtccgtttcgggctctgtttatctggtggttttattttactctgcagtattttccatttcccctgcttaaagatagatttaaagctgcagaccttaaatgtaatcttctttcatattggccggtcttctttgttcatctcacagatattacaaataacgtatatattacaaaactttgttcattctgctaatatttctgaggttattctgtatataaggctgttctatgcattgtgctaagaggttttgagacagttcctgcctctggcagctgatattctagttgggggggcggggggcggggttggaaatagacatcagacaactgatttcacagttatagaattgaagctgtgataaatccttcaaaagatgtgtttc

SEQ ID NO: 7648 - DNA, 1036 bp, Homo sapiens
aattcgaatttaactgggcctcctgtgttttatttgatagtcctaaaacctagaggacctgtgtttaaaaatctgtctgccctatcgcaaggacagaaaaccaaacaccacatgttctcactcataggtgggaattgaacaatgagagaacacttggacacagggtagggaacaccacacaccggggcctgtcgtggggttgggggaggagggagggatagcattaggagatatacctaatgtaaatgacgagttaacgggtgcagcacaccaacatggcacatgtatacatatgcaacaaacctgcacgttgtgcacatgtaccctagaacttaaagtataataataaaaagaaaataaaaataaataaataaaaaagaaaaaaaacaaaaatctgtttgccccttccttgctgtgtgaacctggggcaatttagctaacctctaagccatcttgccctcttctctaaaaagcgatcatagtatcttagctctccagttttggggataaatgatgtgacttaggaaagctctcagggtgcattcagcacagttcttccttttccttctcaattcaatgattatagatttgcttcttgcccatttcttcccttttctgttttcttcccccacaaacctgagatcaggttgctgtctgagaagaagccgacgcagcatcccctccttggcagcatcccctccttttgcggggctctttggagtcttctcaggatggtgcctccacttcttcctcagcggctctcagtttgctttcacagttcctgttcttccacaccagcttcctggtctcctcctctctgaaagccatcgttgactggatgtctcaggtatctgccgttacttggccacatgttacgaaaccccttgttttatgtctcctttcctcgccagcctgcagtggtactgggagaactgggcctatctatgccttgccttctctgtgggacgagacatcagtcatgtctttcttgacgagcctcagcttcctgagagaagtgtgtttagaatttagggtt

SEQ ID NO: 7649 - DNA, 1038 bp, Homo sapiens
cttggaaaaacgctccctttgaggccttgtcttatatgcaaggccatatattagtaaccacatgctttttgcactagataaatatagatcatcttatcaaattttaaattattgataagttatagtttatacattcttctaatattctttattggaaaaaatagttgttaagtaactctaataaaaaagatcaccagaacacaacagaagtagttgtgttgaaagcttcatttaatttgaacattttaaaattggaatatccttaaaatacagtcaaaaatgaaatggctttttgttgctgtatcttaatatttttaaattcctttttcaaaatttcttagggaaatttagaaacatgtatatgaagtaatttcacttaggcagattataaacctcagctaatcttagccagcttttcaacaagagtctggtttatagatgaccataactgaaaaatgttcacttacctatagcaatttgagtttacaacagcagctaagttggtatttacctgggactgatggaaaaattagacttttattttgtagaccaacaattcagaaactgtggtttgttgcttttttcctgtctctcctcttcgttgaacttttatgaaacttcctttcctcaccatgaccagaccattgttgacttttctctctgctgaggcagaaaaatgcttccatagtccatgcagcaatgtttaaaacaagggattcgttcccccctccccttttgtgtaggctggttaataaactctatgtttcatagcattgtcgtgaatattcagagtgctccctgcgaatggttttcctactatctctgttgtgtatcatttctgtttatttgattcgtggttctgagtggaccctaccactgacttcaccaagaccttcatgtactccacaaccctttcatcttggtcatatctgtttttgtacaacaccctaaaactacatggagtcttttaaacttggtctgttttttcaatccttttcttaacatcgtttaaaatttttttcccagtgccactgctct

SEQ ID NO: 7650 - DNA, 1041 bp, Homo sapiens
taacagtaatttattatgtatacatatttactaatatcaactttatattttaacattggacattgtaatctgaaaatatactggagcaaatgtttgttttgcattattatatgcctagaactgttagattattttccttaagcaaatacagtcagagtaaatttttggagatgtggcttaatagccagacgaaaagccataaacctaaaattcctagtgtcagtgtctttgctctttattaagtctctagacaatggatacagttttgtcatgaaggcttattgggcagtaggagtattgtctcttaagacacagagatgaagaacttaaaataattaacttctctaactagaattactgtatgctcaatgataattattaagaatattaagcatttaagagaacaaaatttatatctgtccctcgaaaccactattaacatcttatgtgctttttttaaaacaagaacgttttataatgttatacatacaatgtaatctgcttatttgtaactgtgtcattctacaaaattaaatattttctgatcttggttttaatgcataaaaaaatatccaatagatgtaccttatgatggtggttttctaactgtggttcacaatgcttcaatgagatgtgaaatcagttcatactttgtttttgtttttaaatggaatattatataaaagaaaatgactgtgtttaagtgtattaaggctaaattctgttccggggagatctgattttatttatgtaaacaccatgatatataatgtatttctaactgtaggccatgatcacaacagttgtttgcaagccactgccttaaattaactcttatccttttgttcaacatgcagattgttttcaatgaacattcatgtatataaatcattgtatataactcatatattgtcagggtaaatttctaaatgtgaatcacttggtcaaaagataatggacttttttgagcctctgaatgcattttgcaaaattgctggaagtattttgtaagggggatagagtcttgaccaattccttttc

SEQ ID NO: 7651 - DNA, 1048 bp, Homo sapiens
tttagagtaatacaatgtgttatttctggttaatgttcagtaatcaaataatggatgaaatgcaaatacagtattcaagtttcattttcatttctggtggagcccagggacgttctagagggatcaccttctctctccaagaacagaaggagagaggaaaattgttttgtcattattatttgctgttactgttgcaaaagctggagctttcagaaaaaaaaactgttagaaggaaaatgcacataactcagactgtactatgaattgtcaggattagatcatcagacacaacaatcctgcgtttaggaatcgggcatctaactcttgctgagttcagatgtgaccaccccggttgctgcataatcgtaatcatcatcttttccctttacctttcctgcctctcatagggcttgataaaacaaccatgcttaactcttatacagttaaaaatcctcagataagtctcattctataaccatcaactaccaaaattcttctagattagagacaccagccaagagccctgtggtcgtctgtcttttctgaaagaaccaaagacaacaaaaggactgcctcaaacagcggtttgcaacttaaatatcactctgccagcacataaaaaggtatcttttaatactgctttaaattgtctttccctggtcttgaagaagtgggcctttggtatgcaattaaggaatgctttgtaacatgaataaagctcttgaaactgaagttgtattagtctcctcgtgtagattgcctaagtcttgttaatgtggtgtcaaattcttatagtttgtatgatggagtcttctctgtttatcgcttttgcttctgctggtagcgcatagatttttatgcttttaaataacgtcatatgttaatttgccatggatgtacagttcttgatattttttgttggctttttttaaaatttgctttgctttctaaatcagcttgcatttgtgctccctactcagtccttttcatatcctgatattcttttccctgctgtccattataatattccttgtctctgcaatgcatc

SEQ ID NO: 7652 - DNA, 1066 bp, Homo sapiens
acatatacccatttccgtggcagtgcctggatctgatggtcgaatccctaaccccacccatttctcagctaatgttgtttagaaggggcataagtccctcctgttctgcaacagtgagacccaattctggccgttcagagcattcctatctcctggattacagcaattactttaggataaaaagtgaaatctgagcccatctagtgagactcaaatttgagactttgtctaaccttttgggaaagagaaactctactggggttcctaagctataaagatgacatacgtccaaagctgctgggagtagaatgtgaagaccaatgattcctaccatcatttgagctggattcaaccgaccttgaagttagcaccatacagattttcttgccatataaaccagcaatttaatttcagtcttcccccatccctggaaagggagtatcttaaaccagttcagtttggttttctgtcattactaatgtggttgctattggtggtaatgaaacctggtaggaacaaccacatatcaatgggaacataaaacgtctagcatcttaaagtgccattcaaccttgagattctattattttatgctttctctctagaaataagtaaatccaatattaacaaaagagaaaatgaggaactatgatttaagagaatgctataaagttggggatttcttttttcttttctttttttttttttgagacggagtctcactctgtcacccaggctggagtgcagtggcatgacctcagctcactgcaacctctacctcccggattcaagcagttttcatgcctcagcctccccagtagctaggattacaaccatgcaccaccacacctcgctaatttttttgtatttttagtagagatggagtttcaccatactggccaggttggtctcaaactcctggcctcatgtgatccacccgcctctgcctcccaaagtgctgagattacaggcgtgagccaccacacctggataaacttgggtatttctaaacaaaaactttagaaaggagccccttgccaattgatcactctaaaatgaacacctt

SEQ ID NO: 7653 - DNA, 1041 bp, Homo sapiens
tgcaaaatgaagacatctttaggcctttcggttgatagctcccaattcagggctctgttctgcagttggcactcatagagaaattaaaagaaggaggagatgtttaagaagtatcaacaaagtttagatacatttaaaaatgaaattaaaatgaataggtaattattttttaaaacttttaagtgtttgtctacatagaaaactgtttcatacaccccaatgttaacatatcatgccatggggaccataatttgaagaaatgaatgtctaatgcagagagtggccggcgactctcaaatcacaccactggagcaaaatttaacattgttattaatacttagaagctgcactaataatgtagccactagccacctatagttacttaaattaaaattagttaaattcatttgttcgttcacaccagccacatttcaagtgctcagtagccgctgttgttggatagctcagatttagcacatccccttcataggataaagttctgttggacagtgttgagttagagaattcctgctcttaggaagcttctactgtatttgagagaaggtaagagaatagaaacaggaatggcggaaagaagggcttgcaattgaaactggggaaaaaagagagtaatgggtcccatgattgggcacagagggcctgactgtgcaagtggctagagtcatgtggcttactagataagttcctctgtgcaggaattatgcttataatggtcttttagtaagttttgctgaatacattaaataatgactgcagaatgatggttgtttggggataagagaggtccatctgagattctgataaaagtgaaggctccaatcctagaagaatgtacgtacctatctgtgtagacacttagaatgaggcctctaatgtcaggaggctctgtaccttgataaaaggatacccactttctgattttctttagtatagcaggcagtggggaaaagaaattgtttcatgcaaagaatcatttatttacctcttatgtgtatcttctttgttcatttccccatcaag

SEQ ID NO: 7654 - DNA, 1048 bp, Homo sapiens
atattattcggcccttagaaggaaatcttgttgcatgctacagcattgatgaaccttgaggacattatgctgaggtgaaatataccagtcacaaaaggacaaatactgtatgattccacttatctgagacatctagaatagtgaaaatcatggaaacagaaagtagtatggtagttggcagggactgggggtagaggaaatagttatttgatgggtatagagttttagttctgcaagatgaaaaagttctagagatctgttacacaacagtgtgaatgtggttaacattattgaagtgtctgcttatggattgtgagggtaaattttatgttgtatgtattttaccacaattaaaaatttttaaaggctgggcccactggcttacaactataatcccagcatttttagaggccaaggcaggaggatcacgtgagtccaggagtttgggaccagcctgggcagcacagcaaaacctccatctctaccaataaaagagaacaaaattaactggtagtggtggcatgcacttatagtcttggctgtacaacaggctgaggcaggaggatcgcttgagcccaggagttcaaggctacagtaggctttgatcacacctcagcaacagagtgagaccctgtctctaaaacaaaacaaaacaacattttttaattaaaaaattataaaaacccacaaatatgtctaatctaggtgtttatgtcatgttgcttctttggagtgatgcattgtgggtaggggaaaaaaccaagacttagaatttgatttgaatccaaattctaaacttagctagctgacttaggtaggctatttaactttactgattgtcctttctctatctgaaaataaagaaaattaatggccaccttgtagggttgttgcaaagatcaagataatgtttgtaaactgtgctggcataaagtagggcagaaataaattctagccactgctagtatatctcagagctccagttagtattaaagttctagccacgggttttcttattcaatatttcttgtgcaagaagcaatctaat

SEQ ID NO: 7655 - DNA, 1033 bp, Homo sapiens
tttctgcgtgtacttcctaaaattctgaggtggtcaattagctatctcagagaattgtttgatatcagggtcattgaatgaaatagatataatgaaggcgtccaccagagaattttgtatcagtagagcaggagttcttaaatgcaagttcatgagcaagcttagcactcctgaaccacatgaaattatgtgcaaattgtgtatgcagatgtagatttggtgtgtgtgtgtgtgtgcaattgttgaaggaagataatttattcatcacctttattagtctcaaaagaatccagatcccaaataggtagagaaccactgaattcgaagatttgttttataccgattttgttttgttttagaggtttggatgggaaaattctgaggaaacttgagagcaaaatggacagtgtatggaattattaaatctttccagatatgcgatcaattcaaaggcttttttcttgaattataatacctctattttaacttctttagccgctgttgttatgtactccatgttggagtttgggatgcttaactcacagttgttatctctggcagttgaaatatccaggcagactgatgtcatttgttcccagaacggcatcagagcccttctgggcaaattcactgataagtcattgaacaggcacaaagaagatgatattttacggtgcaatgagccatccttgcgtggctaatttagttctaactgaacttataaacaaaaaactaacctctaaatagtgaacctctttaaaaactgcattctgtttttctttaaatccctggaaacttttatttgtcctttgtttaagttgaacttttatcttttgtcatctgcttaaccctctgctctgattaaatgattttcatgcttatctcaaattccaattttatgttattttaagtaatagctgtgtgtgctctcagacacctgactcggtgacttagtttataatctctggtattcacctttgtatctatcagattctcaacttaaactgctgctgctgctaataaagcctcctat

SEQ ID NO: 7656 - DNA, 1071 bp, Homo sapiens
ttttagctaagaaaaattttactgcatcataaaagacttcagaaatccatcatcttacattagaaaacttgctgcgaagttatgcaaggccactgctttcccttaaacctcctggagtcaaggggagagaccctggcccagcaacttgggatcaatcagaaaattagcccaggaaactcatctgggtcttccagctctgctcctctgcacctagatagacttgaacctctctaactggcagatatgtaataaagtacagtgatgctggcttgctaagagtgcaaattttaaccacggtagtaaatattttatgaggtgcggggggaagggaggattgtggtgtggtggcttttgggtgctattaatatagatcacttttatcaggggaaacatttgtcattgaagtacagtttcaaattaaataaattacaaagattattttatgtggtcaaaataaacatgtgaagcccatattcattgtattaagtgttggtaaaaatctttattaggggaaaaagtataagataattagtaaccaacatattcaagactgcagacattgtggaagagtctatgtaacagactaatagagattacccaattgccatcacctgggatttttaaccttttttagtgtagtgttaatttctgctctctgccgaaattcctgtgagcacataggtaggaaatgaaacacaactaaccaatacatgtatacatcattagtggacaactgatggaagtaaataaaaaaatataattagaactaaatagtatcccaggttcagaataacaggataatatgtgttttcattgggttcatctgtagaaaagaaaattttctttaaaaacactatgagaatggcgatcattaaaaagtcaggaaacaacagatgctggagaggatgtggagaaataggaacacttttacactgttggtgggagtgtaaattagttcaaccattgtggaagacagtgtggcaattcctcaaggatctagaactagaaataccatttgacccagcaatcccattactgggtgtatacccaaaggactataaatcattctgt

SEQ ID NO: 7657 - DNA, 1031 bp, Homo sapiens
cagatgatccaggctgcctctgaatgattgtagtttttaggagtttccttccaaaaacacaggctggtctgctcattttcctccctcggcctctgggaataacggaggcatgatgctccttccacaagtccttgtaggcaggattttcagtagctccaggccagactgtctctttctaccccatgccccacagctgatcacaagaaacacctgtgccctctggccttgctgcaggtggggcacggaattgtaggcagctgacaatacaatctggtttttctttctcctgctgcctcccttcaatagccaaagcctctggcatggagattcccccaggcgtgtgtcagggactggtccactcagcccctggaattccagaggacctcgaaggaaattcctcgactctgttctcacagtcattgtgggtggagattagtcacagcatactgataatatctccaaatgattcctctctaatcttcagtgcctcctctcagcctttctaatacagtctgaaggtgagaacgctaaggctactgctttggcaaatgctgctcaggtgtctattagctcactctgaaaggtgaaggtagctgccaccaactttttatgacttcagccaaaaaaagcgatggaaccatattgtttggacatccagtaatatataaagtaagatttttgccagcattgaaccatctacccttctctggtagtccatggcacgtaggagagaaggcatatttatttaaaccttcccctccttccaatacctgttcctccaccatggcttccttccctatctccaaaggagatctccctcaaaaaaattgtacagcttcttgtatataccaccttttttgttttgtaattaattagacaagcttgtcctttactgtggttatttgtggatacgccttgtgttccttgaactgcactgaagatcgatcttcattgttataaagttgcatgttcctgagaaattttgtatattcctgttatgtttcataatccagtccccatggatatgggag

SEQ ID NO: 7658 - DNA, 1034 bp, Homo sapiens
tgttatttggagatcatccgtgtcagatgtttggtttttgttatttagtgagaggtcattggctaatttgctacagtggagattgaatcctaacaggaaaacaaaggtaatgactgctagcagaaatactctaagatatgtagagaaaagaaaagcaaggcccagagaggttggatgtaaaaaaatgactaccacagatgaatactggagttatcgagttcggttttgatgttttactgaggtctgcatccctgtgaaagtgtggcctcacctgaagttaggattcattccaggtgtctgttttctcttttaaaaaggtaggtccctggactaaaaattagaaatcagaaggcaggcttaggtaggcaggagaagggactctgtttcttcctgaatgtaacaggccaagagggcatccaacatatcaatgcagacactttgcttctgacattcttgtctttgatgatgtcctgttttagcaaaatgagatgaacattggaaggaatgtaaagttcagaggcttaagaactgtggtgcatggagtttttctgccagcccaggaggccaggtgctctttatatgtgcaaattttctagcagatgcaggatagggccaggtatgctaacttagagcctgtggtaccagggcccatgtctttggcttaatacagttatagactgtcagagtaggagcaggggcctctgagatcatttaaatttttgctcttcatataatagatgggaagaatgagtgatgtgccatgcccaagctcccatttcaagccaatgactaagatgaagctgaaatgaggtttccaaactcctgacccagtactttttctttaaattcatctctttccaatggatttttaaaatgagcttgtgggacatttgtaaatgtttccaaaactttaaacttcatttaaaaacaaacaggtttatattcagtaggaggttggattcacacattagccatttaagacaatcaaattgagaatttcaacctaaaacttgtactttgtttttgaaatcaaa

SEQ ID NO: 7659 - DNA, 1050 bp, Homo sapiens
actgaagggacaccactgggatcagtgggtggaggtcaggggtagtaacagcactttgcccttcagtacacagaactatcctgtacagtaaagaattgtccttcaccaaatgtcaatagtgcctcattgtgaaatgccgtggaaagcatgtattccgatttggtaacatgtactctgttttctccgtatgtataaaagtcaaagcaaaattttcacgttttaaaactactgaaaatcactcccacatgagctttctatttcattagtatgattattttgactgagaacgttttttaatatttggcaaagctctctttattagcttgtgcagtctacctaattcttatttgcatttttaaaacttcccttgtaacagctgtgcaaatgccattacagcttaggagggaaaaaagaaataggctatgtttatgaaccaaattaatgaaaggcattattaaagtaaatgattgctgaagctttattacctagaaatgaataaaataatgtgttgctgaatccaggtagaactgaaatccaaaagataagaactttataaaaagacgtgtcaccccgtgtccctagaagcatagattttaatattttaggcagatctttatgattacttcaatgaacttggatagcaagaggatctatatctcttgacaaatcaaaagtctagagtagtctttgtcagttaaaatttacattgctaataacatgtgaagcagaataattttgtacatagaagatgctcagcaggtatttgttggcagctgtatagatgaataagttaatggaagaatgaatgaatttttgttccttgtggctttttagtaactagtaatctgtggctctaagtcttagccaaggataattaatggtagaaactttggggaaagactttggtggaagttgttcaaaattaaaagacaagacagggtcaacatttaaaaactactgcaagcaaagaatcggagtctgcaaatagacttcttgatcactaaaactcaagccatgttcaaattcctgctctatagtatctgatttgaa

SEQ ID NO: 7660 - DNA, 1074 bp, Homo sapiens
aattctaaatggctagccatcatcaaaagtaccccggcatcaacgcatcaaggcaccagatttgctgtgatttcaagctgggtatttaaagcaggtcacaaattgctttctgctttcccttccttttgctcctctgaacaaacaggttgtaattttaagaacagcactaatggagaaaaatgttgatgacaaatgccagtggttacattgggcagacataaaacacagctttctatatttttatgttctttttcatattctgtgatcatctgagaaagcctttgtctactttcattgtctgtatttttgtcattgattgacatgctggtaacaggcctgggaaacaagatacaattctgcagcagccccttaaaatttccctgatgacctggcctggccaaaaagcttaagaactgtggtgcactgtttatgttaccattctgattgggagttacccagaaattcttgtttaaaactgttattgcagttatttagggaattttgttggctggtaatgtgtgaaacctgcctttgatagagagacttgtacaaatataaatggtgtttacatctgaatttcagcgctcctttttttttttttagtagaagatataccagacaaactaaagattgactaatcctggagccctgatttttttttttaaatcactattgtcagcttaataactatttactatgatccaagtatatgctaagagcttttgtttgtttgtttgcttgcttgcttgtttgttttttggcacagggtcttgctcttttgcccaagctggagtgcagtggtgtgatctcggctcgctgcaacctctgcctcctgggttcaaacaatccccccatcttagcctcccaagtagctgggactacaggcgtgcaccaccatgcctggctattttttgtatatctttgtagagatgtgattttgtcatgttgcccaggctggtatcaaactcctgagctcaagcataggcgtgagccactgtaccaggccaagaactgttttatcgttttttaaaacatagtttcaataattagttttcttgtaatctagaatattgc

SEQ ID NO: 7661 - DNA, 1031 bp, Homo sapiens
attggcaaatgtctaggagagtgtgtgtaagttcctaaaaacagtaaattactaggagcccattgaaggaactcagggctagtgatctgagatgcctttggttcattaaggtcatattccagaaagaagctgcattttacttgctgggtgagaaagactgggaaatctttatggaaacagttttaaaatccagcaggcatcattaattaaagctgacaaaagaagcaatcagtcagaaagagaaaagacctagaatgatgcatcagcattgaaagcagatgatcttaataaagtagaagagggttccaggcagttgcaaaaaaatagctgagtaaagactctgaggtcgttatttaacaaaggtagcagcaacaggtatctgacaatgtccagagtgcctcaccacatccattatgtgattgtcaggttgaagttcctagttagtacaggaaccagtggcagtgtccccgacctgccagatcatacagggttttgaaatgagaaatatggtgaatgagacaggtaggtgtgctgtttatgacagatgtgggtgactttcagataaaggaaacattgaaaatacgctcaaagcttttcaccctcagaccaagagacttaaccttttacctgtcacaggaacacaatctcaaattgttctgtatataacatgtctatcctttggaaacggaatatatttgttcctcgtaagccgattctgtcaagacacagttgagtacttttcagtttaggctcttggatatgcactatcactcatttcgatgtattatattttatggtactttttagtgtcctaactttgtattaaaaaactctcccatattttacatagaataaatgtcatcaacattttttgttaggagcattaaggccaatccaattctctttttttaaaggtgatgcatattcataaattccttgatgttttaggtctgaatagcgtaagtaaggcttctcactttcactacatcatttgcagaccctcaagcatgaccccatcgtcttcacacagg

SEQ ID NO: 7662 - DNA, 1045 bp, Homo sapiens
aatccttattttatgtgaggaaattaagtttcagagatactgtaatccaggtcttttgaccctaaagcttatgctgttaaccactaagatgctccatttggttttccatgatttgtgttaatgaaatatatttatcaaatttttctctttaaaaacacagtagtagttctgtcaatgaaagtgattagctcaaaaacatcattttctcctttcaccttccttttcaggctaacaaaattatcagaaatttatatctttcttgtacagtatttctttgttctcagcaataattggcttatattaatgatctgtacccactcttgaaagaataaccatttatttcatctcaattgtctttaaatatttgctgtcagatttgaaacacagctataatggtaatttcacaaagttccattagtcattcttcattccattcagtttttgtttttactattgtattaaaatcatctatcatataacctactgaaatagctacagatttttttagcattgcagaaaaatatgtgactgttacgaacaaaatcaggaagtatgagaaatggcaattttctgaagttttgattttgaacttgaaattggaccatgaaaaacccattgagtcagactaataacctcttcaggtttgtttcttaaaaatgttaattgttgactgcttcatggttggactctggagaacctcttattataaatgttatatcaggaaagaaattcatctctttgaagattaatgatgaattcattctccccgtttccgtttgcccaaatgaagactggcatttaatttctcattaaaaggaagtctcacttagtgggtaatgatagttgattttttacatacttgtcaattatatattttaagttttacaaagtcacctgacttcatattatcctaggaatgtccttcctgcaggataattaatagattacataaaaatgtttcaatctgttcatttgcaacctctttcttagttttattgtttctttactgtggaaagaacagggatatacaattaggtttttggta

SEQ ID NO: 7663 - DNA, 1756 bp, Homo sapiens
gaacagtcatggataaagacaggatgtgtagctgtaaatgataatggctggttggtcatgatgttctgagtctacccaagtcttctttcctgatttttcacagggaagtaggaaggcaggacaacagtttttagtgagggttaaggatggaggaggtgcaggaggtttgaggaagtgcggagcagtggtcgtcaaactttttcatgcatcagaagcatggtgtgtgttaaaacaaatgttctgggcctcatcccagagtttctggttcagtaggactgggaaagaccctgagaatgtgccaagaagtttttagatgatgttgatctagataagactctgagaaccactggtgtagagctttcacttttatagctgagacattcatgctttgaataataaaatggttcatctaaggtgatggaactgtgactagtaagtagtccaggctgctgcctccagcttgggctcatcctacatatgcgctctgatttcagggagggagagcagcagaaggcagtgggttccaggggttaagtggggagtgtgcactaggcagggaattttggagaaaggagaaactgatatcaccaaagcaaatcttgttaaggtcaccttagtttgttatggcctgttccctgatgaataaatgtgggcaagaaaatgtttttatcctgttcagtacatatgagcatagcttcagattctaggagggctttgctttttttcctgtgaagaaggtttgttcttaggatgttcattaatggagatatgtttacattatttttaaaaggctggttctttatttgcatgcacatgcttttgtggaaccaggatacatacatattttaaagaaaattatgcaaatatgactgtaaaaatatatattaatatttaaagagccttttgttgtatatacatgaattatattgaaaagcaacacagtcatggtgaaagatgaatttgaactatgtatagtaataccaattaatatacctgtttatgtttacagaaaaactagaaggaaatgtgctaaatgttaactgtggcttttctttgagttatatgatcacagatggttttaatttaatttttctatatttttctgctttttgtgtttctaaaatgagtgagttattttcataaaacttatttgtaaaacaaactactcataataaataaaatataatgtaatacataacatgtaataataactaacagcataaaagctaatctatgtctagtgtattagtcttggctcctgggcacttgggatgtatcaatgaacaagtaaaatgtccctctactttcagggttggtattttggaatatcaatgattaaattcactgtgcattggagaagctatcttggcacagggtaactgcacatgtatattttgctttgaagtactattattcatgtttatgttgtttgcctcttttggattatacatttcttgagactatggactatggtcattgtgaaaattgtcatttgcttccaaagtaaccacttgtaataaaagtgctataattttgcctagaaaaaaaattaaatgtattttatctgaataaaagtaggataccatatccatttctggttgaaatctattcatgaaaatgagcaaaatttccaaggctatgtttggtaatgtcaaatcatagcaaataagattaattatttgatttaaacaatttaacatcctccagtaacatatggtacagttgtctaatgcatgaataaactacagcttttatc

SEQ ID NO: 7664 - DNA, 1376 bp, Homo sapiens
tgaactgcatatcacaaactgtgctctgtaaattggagggtttttgttttgttttgttttcttatgaaattagctttgagctataaaagatcaagagaatgtgaagaacagttgttctaatcacagaaggttgaatatacccagtgattcaaagacagaaaggagaaaaaggtctgggggcagcgaggtagaaatgggaaggaaggcttttagaaaaaaccttgtatgagaacagaagatgaggcaatttggagatagagattgtgggtggattgtcaggagtccgacggtgataatggatgttccaacaaaaggtaaacataactgcagataaaacctctaaaaatactttcctttcctaagagatgctgaaagttctgttctctgagatacaggggtaaaatgaaattttgtgggtgatttatagcaaccatattttgtttgtgagtgtgcggtgctttgtatggtgcatctatatctctgtgttatcatctaggacagtacttttcaaactttgtgcatcaaagttgtctgagtagctttttaaaactgcgaaggggatctgagcattatttttaaaatagatggctacagtgccaatcaaatgaacatttttagtctgtaaatactattataaagaataccaagcaaagaatgcttctctttgttccttataagaatcttgagaggcatgtacaggaagtgtgccaaaatgtaataaaaacaaaagcttaataaatcaatcatgtatatgttgaatttcctccagcattttgctttgtgcatttttatggcttatctcacaaactctgaagtacaaagtgtgaatacatgactgcctgggacttcactttgtgtgttttctattgttggcttttggggttaagcatatttaaatgtaattaagcaggtaccagaacaactacaattattctgactatgctattaagaagattgatactaggcacatatttattacaacttacttgggccatttttttctttttttaaagacagggtctcactctgtcacctaggctgaagtgttcactgcagcctcaacctcctgggctccagcaattctccttcctcagcctcctgagtaactggggaccacaggcatatgccaccacacctggttgattttttaaatttctttatagtgacagcatctcaccatgttgcccaggctggtctcaaactcctgggctcaagtgaccctcctatctcagcctccaaaagtgctgggattacaggcatgagccattacacccagcctgtttttgttttgtttttttctaaaactgatactgtattcaaaaagaaaaataaatgctttctgcaacaagtccttttcagagagaattgaacaccaa

SEQ ID NO: 7665 - DNA, 1049 bp, Homo sapiens
acgcctcccagtgcttcccagcaacgccatggctgggttctttttatcagtttgggtaagtcatgaattatcaaaatgccttcaggcatcgcaagccagaattgcatattggtttggataattaaaagctgtttccatcaaaaaaatttgtattcaagcccttggtagtcttcaggtgaaaatagttttcctgtcattaaagttaattagtaagtgtgtatgtgtgtttatgaatctgcagataatggtttcacaagccgtgagattgggagttggaagggaggggaaagtgataaagaatcaccatcggtgtctagtagtcagctacgcttctgagtacactgtatcctaaacaggcctgatcctaaggttcatttggggtatagattctcagggctcttagagattctgattcaggagttctgaggtagagcctggagtctagatgtttaacaagtaccccaggtgattcttatgatgggctaagagtgagaaaacctggtgtgtgcctttcataggtatctgaagaatccagcttcctgtagtaacgttagggggcttgtggctcaaggaggccagagcagcaacagtataggcctgctacgtgtcactgggagcatctcatctgccgggaagtaggagcttgctattttttctcttttgacatttgctgatatgcaccatgtcatctgaagatagaagaagtaggtgcattttacataaattatgggatgacaacaccagaaacttctggcagcatggaacaagttcttccatgatgtccttgccccaggctttagagtaagttttagccatgccaacctctagggtagcgtggtgctaacgtattttggctacatttattcagtatttctgctgttcagggctttgctaagccagtgagtcatgccacttaaactgcacaacttctctgagatgtagtattattctcatgtttatgatgagatgcataataggagcagagcgaggttaagcaacttggctgagtttgcacagctagccagtggggtggttatctggttcctgtg

SEQ ID NO: 7666 - DNA, 1031 bp, Homo sapiens
cattttttgatttaagtagtcttcttgtaatttacttgtttcaaaaatgtacttttgtatattggatttgcttaaagtgaaacatgtctaatatactattgactttatattaagaccattaaagtatccagtggacaaatctatcggtacttctcaacatgtattctaaaatcctatcaggtttagtggataggcaatctggaaaattatttcttacacaatattaaaaataagagttgattctaccatagcgtatagtaaggtaatggctgcaactgtgtatgcgactgttgccatgtttgattagggcatgcatatttgacatataaaatattgttcttattaatgttcatagcagtggatttatttgggtaaattttaatttcagtgttggtgatttcattattgttgagtgttcagccatttcacagcttgttaaagatctatttcaagcatttgtttttccttcagcacagtttcccagtatctaattattaaagagaacatataatatgtagaacaaattcacatgtgcaaaactgacaatcccagaagtgttatattcttatttgtatcatagtcttattcatgtcgggtaaaatccacatttctcaaatttctcttcttttcctcactgagcctcttagcagggatgctgtacatgatactgcaggcgtgctgttaggaatattaaaaaggttaagagcctcaagctgaagaattacggggaaaggattcagtgtgaactgtcaatcaggcctcttgtgcctttttttgtttgtttttgttttactttcttgttggcaatatctggggaaaatgaaactaccttggcaaaaattatgatagtgagaaaaatctgacataggaaaattatgacagtgaaagaaatctcacctaaccaactccatcttgcttttaattatcaagctacccttgttcattcctggttgcaggcaaactaactttgggaagaatttagttcatagtttaactttgaaacaaagataacagttcctccctaaaataaa

SEQ ID NO: 7667 - DNA, 1081 bp, Homo sapiens
aaagactggcctttcctaccaggataccttattaaagtaaactcaacagttttttccaatgatgtcaaatgtggccaaacaaaggcttacagttgatgagtacaagcatagcaaggttttaccttaatcagctcttagacatactccccagtgtctaaaacttgttaactcttctttcacttttaattcaacagctatataagtgctttttatatacaagccatacttttaaaatgaaaacataatattttaatcaccaaatgagggaagacttttctctctacagaaatgtatgttttagaaaggatcctgtgtactttaaaaaaaaaatctcatgagaccaattaatttgattaataaaaaacttttaaattatttttagtattgtactgttaactgtgttccaaaagaaaatgttcctcaacccaaatttataactgtgtttattatttttctaattcagcatcgaaaaactaagaaatgcatcatttttaaaaatcaggaagtatagggaactgagaagagactgactacctttcatttgtatgttccttttctaattgtcaatattgctactcatcaactgctaacactaaattttctgatggcttaaagtctaataataaagctacatttttatttttttccaagaacttctttatagacagaaataaattaaaatttgccactttcgactgataatttgaagctctagaaattgtcagtaccaatatggcactcctacaacatgactttagaaggcaggaacttttgcatgaagtcataaagagtattcagaagtttgtaaatgctttctgtcactttacttgaaattatttgatttttaaaaatcatccttatgaaatgagcagagaagctcttattaatacaagtttatagataaacaaactgaatctcagcttacatgacttgcacaaagccacatattgacctgcctatgaatacagcacaggcctttgtccattgatttttccatcatcccattatttgactcaactcctttaagagaccacatgctcccattcacatagtttccttgtaagaagcaagcaagctttgt

SEQ ID NO: 7668 - DNA, 1037 bp, Homo sapiens
accaagcatttttgtttttctgtggaacctgaatatatggcctggcctatgaaaagggcaaagcaaaagagatattttctatttaaattgtattccactaaatttaattataattagtttaattctgtttattcagattctacttaagcacatcactttacctcatagcatatgattttgacctgcttggcagaatgagatctgggaagaggaacttagattggaggcagggttagggaggaacagggtcttggtgtgcagctggttatcagaaaaggtgggtgtgggtgtgtttttcaagacttggttatcagatgaggtcttagcaagatagactcaagactctttgggagtgggcctgggcatggggaaggaaaagagggtaggatctatatgttttggcggtacagagaggtttgggaggggcaggatctgaggttcctgttagagagatgggagaaagcctgggggtgaaggagctcttccagaagagggcagaactaacctaaagaaagaggatggcctgggtaattttattctaggaaccactatagggtcaactttgattatgaagctttctaatactggacattttttttcttatttctggttttaatttcctgtcaatttttcaacagttgctaaagttaaattgtcctagagtagcacagaaagacatgtatttatttagggtcaggtgaataggagccaaacttgcccttccataatgtggtgagctgtagaggagaaacatttggatcagagtttggctggtggtcatgaaaaggaaagcggatgggccaaatcttatttatacttggcatttgctctgacagacaccttcaaccctaatgggtgtatgagaaagaaggagaaggccagggggtgccacagagacatttcactctggttttctccttctaccttgctgtttaccaccatctccttcttacctgctaactcaacccttttcctccaagagtttctcttttgcttcaaagtcctactcttttctgcttcagtgtttgtacctccag

SEQ ID NO: 7669 - DNA, 1050 bp, Homo sapiens
taacgtattgtaaccctaaatataaaagctaaagttgtaaatcttctagaagaaaactagaagaaaaatatttgtgaccttggctttgtgatcttgtctgagatttctcaggacacaaaaagcatgactacaagagagaataattcgtcaagtgggtactctcaggataaaaacttttgcttcttgaaaaatattaagaaaacagaaaatgtacagaataggagaaaatatttatgatatatatatctaaaaacttgtacctagaaattatagaggtctcttataattataacaagacaaccgaagaaaagatacttcacaaatgaaaatatatatttggtcaaataaacacatcaggagaggctcaccatcgtgagtggtgtttggggaactgcaaatgtgtaaaggcctgcactttgtagaacgtacccagactccacctcctatctggtctctagagagcccttgcccagtctttctgtagtatagtttttgatattggtttcgttctttatcctgcctctgcttcgacttctaactacttcctggttcaaagttatcagactggaaccttcgtggtcccatttctttgcccagtttagtttttttttttttttttacattttgcctggaagggtgtcacctcctcaaacaataatatggtaaacaagctggtgtcttccctcctcaataaaaacctcccaaggaatttcagtacttgactaatactgttcttaattgttactctttacacgatcatgcccccatttatgcctctgcctctatttccttttctccttggcttttgattaagggtttaaggttctttttcttaataagacctttttcaagttctttatctctccttcttttaatttcattagtgtagtatagttttcgttgttgtttttgagacagggtctccttctgttgccctggatggagtgcagtggtgcaatcatggctcactgcagccttgatctcctgggcttaagtgatcgtcctagctcagccacctgagtagctagggctacaggtgtgcgccactat

SEQ ID NO: 7670 - DNA, 1023 bp, Homo sapiens
tgagaggggatggactgcgatatatacagttgtgtgttgcttaatgacagggatatgttctgaagaatgtgtcattagaagatttcatccttgtgcaaacattatagagtgaatttacacaaacctagatgatatagtttactacacgcccaggctgtagcctatagctcctaggctataagctgtacagcatgttactgtactgaatgctataggcaaatataacacaatggatgtatttgtgtatctaaacatagaaatgatacagtaaaaatagcatatttataatcttgtgggaccatgatcatatttgtggtcaatcattcactgaaacattgttacactttactctattttgcagggtgcatgattgtatatgggtagaggtaggttattgtgaagatcctagcattcctatcgaatactaagtttatgcatgcttgttacatctgtaacataattaacaaaataatgagttcacgtggttcaaaaatggacctatgaagagactgtgtcatgaacaaaggataatgattgatttcatattgtgtacatgaggtctaagattacaccaaaataaaaagtaaaaatgtaataatacctacagttgttaggaagattaaatgagttaatatttataaaaaacttttaatagtgcctggcacatagaaagtactatacaagtatttgttatgtaaaatatatgaacatcattaactatacaagatattgccagattgttctgcaaaatattagtactaatgaattttatagcttcatcccactccaaatgccacaagcatgggtaagggatgacatttcttcatattcttttaccacttgaaataatgaggtttctaaatttttgtcaatttttggttgtgaaatgaatctcactgtggctttaatttgctacattttcctaatttaaaatgagattgaacaacttttaatatatttagtgttatttcaatttcttcttttataaaatgcctaattatattcttcactcattttctttcc

SEQ ID NO: 7671 - DNA, 1050 bp, Homo sapiens
gatgaacccggtacctcagatggaaatgcagaaatcacccctattataatcttaagaagcctacatcacatgcctaataagtggtaataaaataatttttttgttttttgtaagtgtcattcaattctttgacctgcttccatatcatatgacaaaaacaatctgttatcaaaaatcacttttaacaatcagctatcagctaacacctgaattttgctctccttctgctttgttcaaagcaaagaattggaaatatctgactttcaaaaggattgactaatcagatgttagagtctgatttctttctgattttaccttattaagttgactgcagtaaaatttgaattgtccctttatttggagtcccagtggttgttataccctgaggccacgcaccctagaaaaattcagagtagaaaagaggtttgcacttttattggtaaattgggcagacaggaattatgacaagaggagaagaatgtgtgacacttccatacattcttaatagatcagttttagggaaaactagaaatggaaattgagaacctagaaatagatatacagaaatacctatgctcagatttgtcatcctgaaccttgtaggttacacctagtagccccagtttgaagaccctcatttgaggcagcccatgacagaaaggccaacaccttgggctacgttggtcttgtctaacaacaagatgtacagcagctgggtgtcagcagaggcagagctcctgtgctctgtaaaacgtatgccagtattgcttatgtaggaacactgcccagtgatttgatattgtcttcacaagaatgttttatgcaagatgatacatggttggtcactcaaacaacaaaatcccttgacacacattggcttttaattctgtcccataacacctatttgtatcttaaataatgtggttcacatagctttgttcagtctacttgatgatggcttgaatttagctagtgatgagaaatagagggctacttggcatattcattaccagctaaggctatctattcttgacaacccctcctactggg

SEQ ID NO: 7672 - DNA, 1028 bp, Homo sapiens
ttttttttttttttttgagacagggtcttgtcctatttcccaggctggagtgcagtggcgaaatcacagctttttgcagcctcaccctcctgggctcaagtgattctcctacctcagtcttccaaggagctgagactacagatgtgtgccaccccacctgactaatttctttatttacttttttttgtagagatggagactcactatgttggccaggctggccttgaactcctggcctcaagcagtcctcctgcctcagactcccaaagtgctggaattataggcatgagccactgcacccagcctaatttttgtttttaggaatttctgctgtaaagttttatttataattatgtaaattgtatctcttccttctatcttatttccttcccctttaattaaccatttttagagcttatggtttaattttttcatagttttaaacgtaataggctacttttgatacacatttatatatatacttgcatccccttttttattttttgttgttttgtagataaaggagggcagattaattagagaaagtacaaagatatgttggaagggtgcaatgggcagcacagcggagaaggggctgtctgccactttctcctttgtttagataaatgtagcatgctatacatacttaccccatcttgctgtttttacttaatatagcctggagattaagtcacagcagcaataaatgctattgtgttgaatgtaccataattttatttagcttgtcatttcttcatgagtatttcgattattcccagttttgtgctattataaatagtcctgctgtgaattgcctcgtcttttcattttttttcttttttccccactgtgtatcttttcatgtttttttttctagtgtatctttgagatcaatgtctaaagcaagattgttgagccaaagggcaaatgagtatttcactccttcaaatattgccaaattccctttcattgagactgtactgttttatattctcgaccacatatgaaaatgtttttttttctcacag

SEQ ID NO: 7673 - DNA, 1073 bp, Homo sapiens
tgaactcccatctacctgtcactaaccataacaattatagacacatgactagtctggtttcattataccttactttcctctctcctgtattattttgaagcaaatgaaagacttcttaacatttcagccccacatatttcacttgtatctctgagagataaaaatttaaaaaaccccaaaaacctaaccttacaatacctaaatcttcagtcatacctaaactttcaataataatttcttcaatatttttccaatccatttggaaattatcaaatatccactaagttcaagcttccaaatgtcttataaatatcataatattttttaattgtttgcttgaattaggatcctaagaaggtccatacattttgattagttgatatatctcctgagtctttaatctgtgggtttctgcttttctggattttgtatttcaggcaatttatttgtcaaggaaactaagtcctttgttgattgcatccctgtggtatcattgaataagttcttttattccctgtgtttcctgtaaactgtagttggatttagaagctctatcagattcaagcttggatacttttttgtaagacttctttttagattgtggtatattcttccatgtgaaggcaaaataatgacttgcctggttgtctctttttgtgatcttagccactgttgaaaaattcacagatccacaaaagttttggaactacaaaatgatgatattctgattatagaattcattcttcttttctaaacccatagttcgttttctttattagccgaaatgcttctataagagaagatctcttatatccactatttgcttatcttttggtacagttcatatagaaagttttcaaaataatgagttagatcactagtcttctatcttacatctgtatttttttttacacaccaataatcacatttctcaaggacccaaagaatagtaacaccagaatatcaaataattactcattggatttatcccacagtatatacccaacagtctcaaaataacaataccagcactaccaccaacaatatgattactgtacaatgttttgtatcca

SEQ ID NO: 7674 - DNA, 1127 bp, Homo sapiens
tttcttctgcttctgtttcctggaaaagattgtagaaaactagtattttcttctcaaatttttggtcgaagtcaccagtgaacccatctgggaatgatgctttccatttgtgaaggttattaattattgattcaatgtctttaatagataaggattattcagattacctgtttctccttatttgagctttagtagatttcaaaatgtctttctaggaagtgattcacttcatctaggttataaaatttataggcatacagctgttaataacattctgttattattcttttgatgtttatgagatcaataatggtggcccctcttttatttatgatatgagtaatttgtgttttgtcttttctttttctgggttagcctggctagagctttattaattctattgctctttgcaaagacccagcttttttttttatattctctatcgatttcccattttcaattttattggtttctgttgtaatttttctttttctttttcttttttttgagacggagtctcactctgttgcccaggctgcactgtagcctctgcctcccaggttcaagtgattctcttgcctcagcctcccgagtagctgggattataagcatacaccaccacacccagctaatttttgtatttttagtagagatggggttttacaatgttggccaggctggtcgtgaactcctgacctcaggtgatctgcccgccttggcatcccaaagtactgggattacaggcatgagcactgcacccagcctgttgtaatttttattatttcttcttttctgcttgctttacacttacattgctcttacttctgtagtttcttagattagattattgattttagatctttgtcttttttctgatatatttcttcaatactataaatttccctctaagcactggttttgctgcatttcataggttttgataagttgcatctttattttcatttagttcaaaatatttttaatttctcttgagatttcttctttgactcacatgttatttagaagtgtattgtttaatgtccaattatgctgagatttttttcagttatctttctattacttgtttatagcttaatttcattgtggtgtgagagcatactttgtat

SEQ ID NO: 7675 - DNA, 1720 bp, Homo sapiens
tttaaattttattaaacatcaggtatgccagaaactatgctttcttagtctactgaatccaacagaacaggtgcataagcaataattaaaatttctttgcggccctatccttcattttgcagagtcttggtggattgaaaagctgctgtggggtgcgaggggtatgaaatggcatagtttaggttggtgcggatgtccacttaagtctccatggagacttaagtctgtctcaatgtgtataactgatcagccagaaattattcagatgtttgaaaaatcagtgtaatgagttgctctctgagttgggaaatttgggttcagcctatcattcaaaatgtatgtacacttggcaaagtcacttctgcagagtttcctcccaactggtaagatttcagccaatttaaagattctccatgctttgagatatgaactatgatgaaggtgtcaattaaaactagtacatgctattttgcagaacctccactaaactaattttaagctctaggtttgcctagaaattgatgaggactctgcagggatgagtaaataccttaatgtgcatttatgtggattcttgaagcagcttttatctgttagtaatcattgtctgcccaagttagatatcggtgtcattaataagacctttctccctgtctcatggaatgaagtacaaatcattttaatactactccacaaatgtccattgaatccaatctttgttttatatgtacaaaacaaagatatgatgtcattcctctgtttaaaaaccttttatgattacccattataaataggataaagtccaaacgtcttagggggttgtacagaatatcttttgccatcttgacccaaaacagttttactctttatttttgtgaaacatctgatcctgtgaccatgctatacttattttttcaacctttctttaaatgcagtctgcctttgcatttttccacctctacatacaagtcttctctctgctaatttgtgccattctcatttttctcttcctggaaaatcttccttcaagacaagctcaagtactcctcttctgggcaactttcatggtcttctgcagatggtgacagtcagtctgtcttctatagtgttatagtacttcatgtatattttgcagtcatggcatttcacacagcttattggaactatttaattactgtttcttccctaactaactggacaatggacttctagagggtatttttactaattggatatttttatatctgcttactcacatctaggatctagcacatctggtgctcagttgacagctgttaatcataaaaatgcttggttggatggtatttactaacatgatctcctgtgggacagtattaaggtcactttgaccttcaaaaggtctgggcttggtgtcccatgcctgtaatcccggcactttgggaggctgagactggcagattgcttgagctcagcagtttgagaccagcctaggcaatatggcaaaaccctatctctacaaaaaatacaaaaattagcagggcatagtggtgtgcacctgtggtccctgctactcaggaggctgaggtgggaggaccgcttgagcccaagatgtggaggctgcactgagctgtgatctgtgatcacatcactgcattccagcctgggcaacagagcaagaccctgtctgaaaacaaacagaaaaccttcaaagatacttatatttaagtcagatatagat

SEQ ID NO: 7676 - DNA, 1055 bp, Homo sapiens
cagctgctcctaaaccaaccccccagcaaaaggctatctgcttttcagggaaaaaatattagagttatcctgatggcctcttatggtgtctaacagcctttctaaaccaggagactctcacctgtgactaatgaaaatctctcctgagcttgggtcaaaggtgttttggagcatcattactgagacaactgcagcacatggaatctgcacagttacaggactgtgggactcaaatctcaactcctccacttacaagtgacttgggcaagtgacttaacctttcttggctctagtatcctgatctggaaaacacagttataacccatactgtggttgtggggtgtaagagtcattacttgcaaagcagttcagaagcattcaataaatagtagctgccgctggacttattctgatgttgttggtagtgatggtattctttacctcttgtatccagaaaaaagctagggtagccaccaatttgtaaaacctcatccagttggtatttgactgacttcagcaatctctggagataaagagctgggaggattgctccccttctttgtccagctcactgaagtgcatgctgattgtgcagcagaggacctgctattcacagagtagggagaagttgatcgaggtcaggaacgcaggcacaaagggacactgtcagagctgacctcacgaatgctaatctcctttatcccttccaagaatggactgtaatcgtctccagattaaaatgtgcagtagaggtgaccaaaacaaaaacttggcagcgaatgtgaatgcacatgtatatggttgtttgatggcctctcctggaggaggccacctgtttagcacaccctgctggagagatgaggtccctcaccacttagaactggagttgaggctaataggtttgtatacattcagaccagctcaaaagacaaagaccacggaaccaagccactgaagacctgtgccacaattcctttagccagtatattgaaaatgcaatgagctgtcgacattctcgccccttcccgtcccttcactttatttcctgtgtaaac

SEQ ID NO: 7677 - DNA, 1034 bp, Homo sapiens
tccaactgcgggctgctttgattgctggttctctgagtaacacttcacttgccttctgttagaatgttttaagttattttggcacttggtcaccctacttcagaaagactgtttggtcttttcatgaccatattggcagagtctaatgttatttgctttggattttgtgttatctgaaaagtctattatttttattagaaggtcatttttaaaaagaaagaaaaatatctccaaagtccttcgcaagacatatttccaaaatgaacagaaacactaacgtttatttttttaaaaaggagaaaaaaatctagtaatgggaaaactcctctagaaggacattaatatgggtaggaacatggtcaaagtgccttaaaatatttagcaacctctccttgccaccataacttaacgtctctctcaatgaatgggttatagctgttaaattctgtattaatggagactttttttttaccacttaattataaatgaacacatttcattttcagtgtagaacgtagatatcatggccttgttgtctcttcttaacatcaaacatcatatcaccttacaggattttattagttaggtactccaagcacgtgaattactccttggtattgagataagcatttctgaagattcttctatttctacaagccagtagctctttgaacggacttttattgtcatttatctaagtggcctaaaataatgaataaactgctgaaagagtttgccctattcccaggaattatttcacacactgaaagaatctgtgacttagaccactttctttcaaggggactcagagagttatggaagcaaaacacgattttaatgtccccttggtaacaaggacttttgaacttagtatcctacatcatagatagttttcttttccttgaatttcctggattttttttctttctataatgttgttgattgttatcttaggtgccattttgcttttttcttttgtccaattgttctacatgtaaaaataacaattataaatgaacctgcttgtaactgct

SEQ ID NO: 7678 - DNA, 1072 bp, Homo sapiens
gattagtgcccttttaggaagaggaagagacaccagagctttgtgtctctgcctgtcatgtgaggacaccacaagaagacagctgcctacaagccaggaagagagccctcaccagaacctagccacaccagcaccctgctgtcagacttccagcctccagaactgtgagaaatgaatttctgttggctaagccacctagtctatggtattttgttatggcagctgaagctgactaagggggtagttagaaaagctttttagaggatagttaggaaagcttttgtgacagagctgccacagtaggatatctgaataaggttttaaagaatgaatagaatttgccaggcagacaaggaatggaggagagttggcaagaaggaaaggtgtatataaaggtaacaaacaacatttagaatttgagaaagccattttgtgtggctaaagtgtgctacgttagtttcttattgctgctgtaacaaacgtcaaaacttagtagcataaaacaaagtttattttcttatagttctgaaaatcaaaggtctgacatgggtctcactgagcttgaagtgttggcaggctgtgttactttgggggccttaggggagaatctgttgccttacctcttctagcttctgtgggtcacatacattacctggcttgcagccccttccttcatcttcaaagccagcagtatagcaacttcatatttctctctgactctgacttcctgcctacctcttccgcatttaaaggaccatcgtgattgcgttgcacccacatagatagtccaggataatctgcttatattaaggtcggctgactaacaaccttaattccatctgcaaccctattccctcatgccacacaatggaacatattcacaagttccgcggattccgtggacgtattcagggaggctattattctgcataccacatatgcaatgcaagaaattgagggcgactgtaaagagaaaagttggcatgacccatcatccctaggtggaaaagatcatccattcaaaagggacctatcatctgacatttaaaaataaatagaggagtgaaggtac

SEQ ID NO: 7679 - DNA, 1040 bp, Homo sapiens
ttggtttattttttcaagaaataaatgaagtctttattttttcaatgagggcaatgtttattaagaacagcacataaggtagaaaagaaggttggtttctaatcttggttcatctcccccactgatcttgagttttaaaagcatagagagcacgatcttctgtgggtctccactgtcagagagccctggtgagaatcatgagcggatgtagtaaaaagtgcttctttcatatcagcaggtggttctgtagtatttgcatccatagacttctatgcagcatcctttctgttacttactcttttcttttttaatcaaaacagtccattgaaaaaataatgttgattacaacaatgaattctgttgatttaaatggtggaaggcaatgttatcctggagatataattctgtgaagttttgattcagggaagtccagcccagcccttgcatctctttcccggctctgggtctattctttattccagctgagatgtttattttatgtatgaaacagctcccacctacctacaactgctgattaaaagctcagaataatgaaatctgcacaatcgaaacttggctgttggctatagttattatgcaacttttaacattttccttttttcctgtcaataatataaaattgtcagttttttatttcagggctaactctttgaatacactaaaatttgttgcactagtattttttaatggctgagctaaattacttcttaaagttcagattatatgcttttgggaggaataagaaaatgtagtgtccgtgcaatagcatcattcagactgtctgtgaacagctaaatggagataagactacaaaggtccctccatgggccttcaatttttgtctttaagcagactgctcaccatgccttgatagaaatagcaaatatagggccaggcatgttggctcatgcctgtaatcgcagcactttgggaggccgaggtgggtgaatcacctgaggtcaggagtttgagaccagcctgatcaacatggagaaaccccatctctactaaaaataaaa

SEQ ID NO: 7680 - DNA, 1087 bp, Homo sapiens
ttatcaattccaattttacagaggcaagaaatggaactcagagattttaaagaactactaggaaacagagcttggatttgcacccaacgctgtctaagaacttgaatatatatttgctctaaacaaaccccccctccaaaaaaacaacactttaaaccatttcattccaggttactcttgcagatgtcggagtatagaagttattcttctgggtttgtttctactttgtaaattttgtatttaaatttgaactacacaacatttttgcctggataaattggctaactgcttaggtcattttaaatgtattttgatggaagttgtcacaatcttaaacagttgagtcatagagagttgaatcatggagccaggaatgtccttattaaggacccttagcccaacctcatgtggatggaaaacactggcacccagagaaacaacgtaacttgactactctcatagttaataagtgacacagtctgaactgaacccaggcttccaagtcccagccagagcccagttccattacataacactgcctgaaaagtgccaagtcttctaaatcttccaatgtagcctgaaatacaactagcaagtatgatatacatctgaaacccaaggtacatccagaaatgctgataagagaattccagtcgtgcaaagatatggtgggtactaggagaaacctcacttatcttcagtggtgctgagataaaatagtctttttctcttattcaaaacataacacccttctaagctgtctttgttacataaacccttccaagctgtctttcttaagtgatctgttcgatgctttttcattttgaccaaactctggcatttcattaactatgcaacttcggtgaaatatgaccttactttcctcaactgtaaaatgggaacagcatcccctcccccctcagagggttatgaggatgttataaaatcctcatgcatgtaaagcacatagtaggtgctcagtaagggttagctctcttcttagccttcctagagtatctcgaaagaaagtcttttaacatattaggcagttgtatcatttttgtctctaaatttactggagtcattt

SEQ ID NO: 7681 - DNA, 1048 bp, Homo sapiens
gacccacagctagcatcatactgaaaactgagaaaaaccgagagcattttctctaagatctggaacaagaaaaagatgcccatgttcactattgttattcagcatagaatgtgaatcctaactacagcaacaagagaaagaaatacagggcatacaagttggaaaggaagaagtcaaattatccttgtttgcacgatatgatcttatatttagaaaaacctaactttccatcaaaagagtattagagctgatgaaaaaattcagtaaagttgcaggatacaaaatcaacatagaaaaatcagtggtatttctatatgccaacagggaacaaactgaaaaagaaatcacgaaagtaatcccatttgcgataggtacaaataaaacaagatgcctaggcataaaagtaaccaaagaaatgaaagttttgtataatgaaaactataaaacattgatgcaagaattgaaaaggacacaaaggaaaagatattccatgttcctagattcaaagaatcaatattgttagaatgtccatactacccaaagcaatctacagattcaatgcaatccctgtcaaaacaccaatcacattcttcacagaaatagaaataataattctaaaatttatatgaaatcgcaaaagacccaggatagctacagccatcctgaacaaaaggaacaaaactgggggaatcacattacctgacttcaaatacagagctgtagtaaccaaaacagcatgctactgacataaaaatagacacatggacaaatggaacagaatagagaacccagaaataaatccatacatctacagtgaactcatttcaacaaaggtgccaagaacacacggggaaaggacagtctcttcaagaaatggtactggagaaaactaagtatccatttgcagaagaatgaaactagacccccatctctcaccgtatacaaaaatcaaatcaaaatggattaaatatttaagcctaagacctcaaactatgaaactactaaaataaaacattagggaagctctccaggacattggtctaggcaa

SEQ ID NO: 7682 - DNA, 1037 bp, Homo sapiens
tcctgacatactgcagtttaaccagagcctaaccaacctggaagaaggggaatacccaattcaggatttctaaaacactgagacctcactgtaggattatagaaaacgtctcctctgtccacacctcaccaccatatcagtccagctcctgaataatagcacgattacagctaacagaactgcaagtctcagtccctatttaataggtctctaagaaaactcaaaaaacgggcgagacaaaagaatgctagaggcaacttttgcccctgatgtcacagatgcagcaaaaagtaaacacaacctaagtagccaaacatgaaacttcatgctaaaatcctatttaactcagttcctttgacctaatcatttcaggctttcaactaaaaattacaaggcatgcacaaaggcaaaatgaacaacgacaacaaaaaacacagtctgatgggacaaagcaagcctcagaaccagactcagatacagcagagattttgaaattaaaataactcttaattaatatactaagagctctaatagaaaaaaatggacaacctacaagaacagatgggcaatgtaagcagaatgatttttcttttttggtaagaactaaaattgggtgtgtttatttcttttttaaaaaactttttaggtttagggtacatgtgcaggtttgttatataggtaaacttgtgtcacaggggtttggtgtacagattattttgtcagccagctactaagcatagtgcccaatagttattttttctgatcctctccttccccccaccctccaccttctgatgggccccagtgtctgttctttccctctttgtgttcatatgttctcatcatttagctcccacttttaattgagaacatgcgttacttggttttcagttcctgcattagtttgctaaggataatagcctccagctccatccatattcttgcaaagaacatgatcttgttctattttttttgtcactgcatattattccatggtatttgtgtaccacattttctttacccagtctaccactgat

SEQ ID NO: 7683 - DNA, 1029 bp, Homo sapiens
ttaaaattagattttttcttctcattatgtttcagaagttacttgtgtactttggattcatgtcctttatcagatatgtggtttgcaagtatttcctcccagactttcgcttatttgttcactctctgaccagtgcttttaattctgatgagatcagatttatcagaatcttggtttttattttattattttacgaaccatgtttttgttgtcatgtctaagaagtgtttgcctaacccagtgtcactgatatttctcatacattttttacttccaaaaattgtacagttttggtctgcgatctgttttatagtttattttgtatatggtgtgatatatcgattaatttttttgcatatgaatatccaattactctagcaccctttatttaaaagactactttctcttcactgaattgcctttacagttgtagagtttgtagagttaattgttcatgtatttgtgagcaatttttttattcagacactccctattttgttccattgatttgttgttctatctttacaccaatactacattgtcttaattacttcagctttctgataagtgttaaaaccaggttattgtttctaaaactttatcatttttcaaaattgttttggctatttgagattctttgcatttccatatgaattttagaattgtcttgttgatttctacaaaactcctgctgtcattttgactgggattatatttaatctatagattcatttgggaaaagttacattttttttttctttttttgtgacagggtcttactctgtaacccaggctggggtgcagtacacaatcacagctcactgcagccttgacctcctggtctcaagttttcctccctccttaacctcccaagtctctgggactacaggcatgcaccaccacgcctagctaagtttttggttttttgtagtgatggggtctcactgtgttgcccaggctggtctcgaacttctgggctcaagtgatcctcctgcctcagcctcacaaattactgggattacaggcatg

SEQ ID NO: 7684 - DNA, 1034 bp, Homo sapiens
ctctgacagattctctctgagtagttggggcagggatagctacagatagtattggggagcatcctcataaattgtatctagaagaagaaaagcagcctgtaaatgccaccactacacgttaagttcaccgagggcacaggccagttttttaggcatgctttgtcaatataagtatgctgagagaatcacacctcacctgacttgatttaaaaatttctaaaaaggaaaaaaaagtggttcacatatatccaggtcactaatgtgacactattgacttgatttttcttgcctagcagctcttttgcaaggggagggtgacacattaaattgcatccacctgtgacatcttaaggtgactgaatgtgtgtaattctcttcagtacacaaaaggaaaggagaggcctgagggctctgaagggtgacacagaggggtgaacagattgaagggaggaaactttaggggcttcaggcaaacctcatttacatgtgtccaaggactttgaatggagtccctgatttctgcttccctctgaggactattcaactgaactttttccctatgttttttcttttttttttttttgtgatttgtgatgccaaaagtgttccttaaatagtcacttacaagaacaaagctgccgtcatctctgaatcagtcactcaaaggttatctgggaaatcagaatagtgtgcctggtatacttcaacatctttgttgtattaggcagcaaagcagcccaagaaattaagtttagtaaaactttggaataatttggagataataattccactttagaccgatttcaacccagatcaattactaaaataaaatgcttagggtggagaacccagaaagctttggactaaatgaaccacaagtcttatcaacaccagtgaaaatagtatgtttaatttttttgccataaacttcctgggacgcaatcaataacttgtactattaataaaatattttgggaaaaatgtactcaaccaacttattgctagtcctcatcatatacaggactctgctagtt

SEQ ID NO: 7685 - DNA, 1162 bp, Homo sapiens
ttatttcttattttttgaggaaccaccaaaatgttttccacagaggtggtatcattttacattccgaccagcaatgtacaaaggttttagtttctccacataccagctaacatgtgttactgtttttttgtttgttttactaatcttaatgagtgtgaactgatatctcattgtggttttgatttacatttccccaatgactgatgatactgagcatctttttatgttttgttgaccatttgtcaacaaaagagaaatagacatttctctctttggagaaatgtaatgtgtcagaatgtaatgctggatcttgtcctctctttggagaaatgtctattcacgtcctttgcttatctttaaatcaggttgtttattatttgttgttgaacatacaaatattttgtgtagtagtagaaatacaaaaatacttaaaacatgtcttctttcttactattagtggtgtaaagtataatttgctagctcacactaccctaaccttggaaagtgctgaggatagtttcaagacccataatctgtctattaatggaaatggtaagtacagtatatattttacttattacatatattctgtctatatttctaattatagtatgttcccctcaagtggatatcggcttaaataatggagacatgagtgattctgttggttctttaaaatatatctgtccctcttccccaaaggagaaaagtttattttcctttctctacactgagatttgcttgcaaggcttagtgggaaaagaagggtctcaggtatgctcaatccttgtttttgacttggaatttatgactttaccactcttctagctggaaattaaagacctgacttatttttaaatttgaaatcaaggaagccagcttttctgttagtaggaagcagagaatgtaagaaagagaaagggttaaattatcttaacttttttctctttggatggcggtggtatttagagtttacctttttctctttggatggcagtggtagttatagtttatccaaaataaagatacaggaaactgaagaaggggtttaggtcattaggaagatttgtaaaacttagcatgagcacttgctactctcccaggttattttacttgtgatgaaaaaatatggagcagtgctggtaaggcagtttggaagtat

SEQ ID NO: 7686 - DNA, 1049 bp, Homo sapiens
cttttacatacttagtactcaacaaatgtcagttttcattcttatatgcctccagcattatacaatgaaattgttccattagcataatgtaggaaaatgtttttcagataggcatacattggtttaagtgagtgcttctcaaagttggtaacttgtagcactgagagtacatgatgcaaagtcatagaataaatatggcatgtcttcttagagcatgaatttttaagattaagcatgagaagtttagaatagtggagtatttggaggttctgctttcttattcctggggataggggatatatgttccctctcagcctttttattaggatattttgtcaagaggggcagtttcaatggaaaagtttgagaagccctgattttagaaagtatgggactaaacattatattatgtcatctatcacaatatctggaatattatttttgggaccatatctgcctccatatttaatgctctttaaatatttataatgagttatgaattgactgtttcttaaattcggcagtgtggcttttctgaagttgctgatgtataaaaactattaaataagcctaatgcctgttcaatttatatagcagtgatggggaaaaattaggatccctaactggaaatgtgtatgattttcagtttctttactaattatctgtgatagatgagaatatctttgtcattatacacacacacacacacacacatatatttgttcatcattcatgtaaaaacagtgtttcccttaattattgctggaatttaaaaaaatcttgtatagtctatatgtattctttgtttatagcttcattttgtatgtgaagatataacctgaggtgactgatcagatataactagaaattataattgctttgttattacacaaaaatgacttgaagattaatgatttagttccttgaagaaagttatgtaaattatgcagatatactgaatatctaccgcttgcagaacacttattaagccctgtgctagggtgtctatgttaaaagaacagaatttgtcaaaatatgacaatattgta

SEQ ID NO: 7687 - DNA, 1030 bp, Homo sapiens
acaggattgtccttctgtgtcttgtctgtgaaaaagacctcagccctggggccagcggagggtataccaaggacctgtgttgtatgggtgggtcaaatggactccactttgagaggaagggcattatgggtacagaagccaacaccacctcaccaccccttagtctttgacccaaattttgcagatgataaaagatgtggagagctggatgagtaaacaaatacactttgggaggccaaggtgggcagatcacgaggccagaagtttgagaccagcctggccaacatggtgaaaccccttctctactaaaaatataaaaatcagctgggcctggtggcacaggcctgtagtcccagctactctgtagactgaggcaccagaattgcttgaatctgggaggcagaggttgcagtgagccaagaccgtgccactgcactccagcctgggcgacagagcaagactttctcaaaaaaatagaaaaaaaaaatgagaaggaagtataagatgagatgcgaactgactgctttcccaaggagagcgagtgtggtcctctggcagcatagtaaggatggtaactgacaggtggggctactgtggaatatggaaacaacggttcaaggtaggtgatacaggtttgctttagtaagtggaagaagttcaagataaagactcagggatcactgtttccagccacacatgccatgccctacgtaagtgtaaggtagaactatcttgggccacgtgcggtggcccacgcctgtaatcccagcactttgggaggctgaggcggatggatcacctgaggtcagaagttcgagaccagccttaccaacatggtgaaaccccatctctactaaaaatacaaaaaattagctgggtgtggtggtgcaggcgtgtaatcccagctactcagggggcttaggcaggagaattgcttgaacccgggaggcggaggttgcagtgagtcgagattgtgccactgcactccagcctgggagacagagcaagactctgtctcaaaacaaaaaat

SEQ ID NO: 7688 - DNA, 1097 bp, Homo sapiens
ataagtacataagtaataagtcaataagcaagcaatcattaagcatgtaatgtgcaacaatcaaatcattcattcatttacgtttctttccaaatgttaataaagataaaaaggcagaaattacccttttagtaattaactgcattccttatagaacggcagaaaaacaagagtggagaaacagttgttttaaaattgaaagactggccttcaggagaagacttcaagactatgatgccagcaaggtttgaaacttttcattttgactcttgactttttgagatcgagctaagactgtccccagagataggataagtaaccgtaaatgtgacctgtaggctttttctttctcaattaaaaataaataacttgaggctgagcgtcatagtggctcacgcctataatcccagcactttgggaggccaaggcgaggggatcgctggagtccaagacttggagatcagtctggccaacatgacaaaaccttatctctacaaaaaaatacaaaaattagccaagcatggtggcaggcatctgtagtcccagctacttgcgtggctgaggtgagaggatcactggagtggaggaagtggaggctgcagtgagctgagatcgtgccactgaactccagcctgggtgacagagtgagaccttgtctgatggattgattgatagcaaaactgagttggtagcctcagcagtgggaaaatctttatgttaggacagtgaaggaaagaatgttcatgttaaagaggctgggcacggtggctcacgcctgtgataccagcactttgggaggctgaggcgggcaacaagagtgaaactttgtctcaaaaaaagagaacacaggaccctgtttaggacctcccttctattggagctttttaatggtttaatggttagagaagcagaattgctattttagtcagtatcacttgagtcaaggaaaattgttacctgtcttatggaaaggtagtctgctgttttgaacaacttgaaaattatatatgtgaaaatacttagcaatgcaaatctttatttataagaaggcaatgttgtttttcttcagatacgaagatcttttaaaaagtctgcca

SEQ ID NO: 7689 - DNA, 1046 bp, Homo sapiens
gatgccacctacttgtattctctgtcccaggcctataacaatgtaaaagacaggaaggctgtacttctaagtttttcagacctggcagttctcacacaaccagacttctggtttgcattttgtcaggaatataggaactcaaatctaagagaagtgcatattgtggagtgtagggatattgtttaaaaaaaaataagtctgtgggaggaaaatgtatttgatttctctcaaaaacaggttttttttgttttgttttttccttaatagagtagcaaaagtggacggactatgcctaacattcttgatgacataattgcttcagttgttgaaaacaaaattccaccaagtaaaacctccaagataaatgtaaaaccagagcttaaagaagagcctgaagaaagcataatatctgcagtggatgaaaataataaattatacagtgatataccacattcttggatctgtgagaagcatattttatggcttaaggattataagaatagcagtaattggaagcttttcaaagaatgttggaaacaaggacaggtgtgtattttaggctgataaagaacactcttggtggaactgaagcttattaaatagaatggttccctccttaggaatagaaatggaggggggaaaaatagtggttaacacatttgggggacaataagatataaaagtaccgaaaagattgtcagaatgcttgtttctcaattcctgttttttggccagatttaatatgaattaatagggaaacgttgattattttatgttactttttgatctatcagaacagacatgtaataacgccttgaatttacaaaatgcagttcctttctcctctttttagattggtattttagtccagttagtagatccatgtctactattaaaatattaatattggcagcatttttcatgaacctatgtagatgttcttatctgtaatatttatacacagaacatttacttacaaattagttcatcaaatcttgaatgacaaactatattgtttcattctcctctaatataaatgattttgt

SEQ ID NO: 7690 - DNA, 1050 bp, Homo sapiens
ctgaaaaaacagctttgtcctgggtgaaaaaggatggtaaggaagttaaatataacatgaactgcacaaatttcattttaagaatttctctttgaattatgtttgtgaaagaagtccctaatcttatctaaccttgatttttaattatgataatgatacctttttacagtatgtatttaaggttacagatactttcctatagagggtgaattgagtcaattaaccatttgtgaaatcacaatagcattttgctgtttctgccattacaacattaagttaatgtgttaaacccactttagaaattgtgaaatttcagcatttggcttataaagacataatctaccccaattatttgtattggaatctcagctttactccctaactgttacctttggcaaataacctctctggatatcaggcaggtctggaaaataggaaagataactatctcattaatttgtttagaaagtagttatgttaattatgtttacttaagtacttaatagttcctaacatagtagatgctctaaatattagcttcttttccttcccttccttgaaatcactggtttgcccctcaggggacacttagcaatgactggagacatctttggttgcataactgagggagttaaggatatgttgccaacatctgataggtagaggctacagatgcctctgaacagtctgcaatgcacagagtaatccctcccaacaaagaattattcaacctaaaatgtcaaaagtaccagagttgagaaaccctgcttagatgtacggcatttttatttttcacttaatgatcatttatgggtcttctaaagagaattacaaattacttcaagaaagctattggtcttcagttaatatagccttgaaagttcttggtttgcctttacatttttatttcttctgtatttcagccaaaattgccttggaaaagagcatgtttgcctttaaaatttttgttttttctgtatttcagccaaaattgcctggaaaagagcagtgagaggagtccgggagatgtgtgatgcatgtgaagcaaca

SEQ ID NO: 7691 - DNA, 1047 bp, Homo sapiens
actcttatatcatctggtgacaaaattggaagcttatggaaattactatctatttaatgctgctcattcaaacagtccttaacaataggtaaaaattaacataaggggaggcttgtggttttgtgtattcatttcgatgttaaagaattgccatattaatagcttcacaactgattatatatcctttgtggcaacagctggacaaaataagagatacttaacagtaatattcactataaagtgtttctatatcattttactctagtagtagtttttctcagtttgcttatttctttttaggtatgttgcacaatgcagaaagcacttagtttcactatgtccgtgtgttcatccacatacaatatatgaaatatctgtgacaatgtggacactcaaagtactttcacaagcacttggatgcttgaaggctcccatttgtgccttttaactgaatgaggttttcccacatgcctgtgtggaaaccagaggcaaagtgaaggagaggaaaacaggaggatggaatcatagaaaaggacagtcagaaagtgaaagaacaaaggacaaactcaactagagccagagactgacagactgaaatgcaagcatagtcagaagacagagagggggattaacatcgaaggatacctgccatttacttgaatattggattatatacagtgttgctttttcttatgtgttccccttactctccctcactacccccatgaattcataataggcttagtgtgagcaatttaattgtttctcttctgtcttatatgacatttcctttggtgttgggtgttcagatacttgagtaaaacttaaaaaacaaaaacaaaagataggtaccttccaggttttaatgcctagaaaactcttgtgaagttaaatttatgaaattaagtgttagtgaaatacgtattctcttttcatcttgagacgaatatacatattcacatgtaagagttctaagaaaagggccagaatgagtgcctttttttcccccaggttgtaatgtttagtcaaatctcccctgcttggtaa

SEQ ID NO: 7692 - DNA, 1028 bp, Homo sapiens
agatgaaggaggaaaaatatgattatatatcacgaggaggtaggacccacttttttttttaagggaatgaaaacaaataaaacaaaaatacattttaaaatatgcttatttagtatgaaaaataagactcttctttctttaatcctacagaaaatcctaaaggtaaaaacaaacacttgatgaataaaagaaggaaacctgaggaggatgaaaagaaactaaatatgaaaagacttcgaactgacaatgtttcagacttttctgagagcagtgactcagaaaattcaaataagagaataatagataattcctcagaacagaagccagagaatgaattgaaaaataaaaatacttcaaaaataaatggagaagaaggaaaaccccataataatgagaaggcaggagaagagaccctaaaaaatagccagcctccctgggatcaaatacaggaagataaaaaacatgaagaagcagagaagcggaagtctgttgacactcagcttcaagaagatatgattattcattcgtcagaacagtccacagtttctgatcataattctaatgatttacttcctcaggaatgcaatatggataaaacacataccatggaattgctaccaaaggagaagtttgtatccagaccacccacaccaaaatgtgttattgatattacaaatgacactaatttagaaaaggtggctcaggaaaactcaagtacctttggccttcagacacttcagaaaatggatcctaatgttagtgattcaaaacactctattgcaaatgcaaaattcttggaaacagcaaaaaaagattctgaccagagctgggtcagtgatgtagttaaagtggatctaacccaatcaagtgttacaaatgcttcttcaggaaatgatcacttgaacatggaaaaagagaagtatgtctcttacatttctcctttaagtgcagtttctgtcatggaagataagctgcataagcgaagtccacctccagagactataaaatctaaacttaatacttcagta

SEQ ID NO: 7693 - DNA, 1049 bp, Homo sapiens
tgatgttcaggatacaaaataattgcttttatggtaactcttatactatcaaagatggtttttatggagaaatttatgtcatggaatggaatttaagaaagcacactggatgttaccacaaaggtcaagggttttatagcagaggggaaaatcattccattaataagccacacatatcagtatcaatttgaaagtgagcattcagtcattatctatcagaaattgtccaaaggaggagaaactgctgcagttttgtgatatttcttttatcctaaaatgaaagtgctactctagacatcagttgagacttttgagcaaatctgttacgttattaagccagtcttctctgtcacttagaaactaaccaccctttgttggttttttgtcagcagtcaaatgagactatgtgtgacataaataatatatttcttgaactggcaaggagcactctaccttattatcttaggaaatgagttgtgtatatttttaacattttcataatactggtgtcattaaacctaactaggcatatctgaatattttagtgttctgagcttatgttttatattacctagatggttatttttttctttcgaattaagtagaaagtacataatcacctaaaattatgttagtacagtagtcttactgtcaaaatacacattccagcctgattttaaccttttctttgagagtctcactctgccacccagactggagtgcagtggcacaatctaggctcactgcaacttctgcctcccaggttcaagggattctcctgcctcagcctcccgagtagctgggattatagatgcgcaccactacacctaaatacattttttttgtattttttagtagagatgaggtttggtttcaccatgttggtcaggctggtcttgaactcatgacctcaggtgatccacccacctcggcttcccaaagtgctgggattacaggcatgagccaccacacccggcctgatttcagccttttactccatcatgtccttctctctctctttttttttttttttttttttgaaacagggt

SEQ ID NO: 7694 - DNA, 1351 bp, Homo sapiens
ttcacagatacttttctaagtttaccaaatcttaagcctatttttctttcattgcttttcttttcattatataaactcaaccctctaatataaaaaactaaaagttatcacacccagtctggttatggccttatcttactcctttccttcatagctggacttcttataatgtgaaccgttatatctatattttcttgcttcccaataatatcttcagttattgcagcctggtttcttcctccacttcacaaaactgatgttgctaagatggctaatcatctcttagttactgcatttaatattcaagtgtgcatcactgtcctactgaacctttgcatttaacactggatcactgtccttttggaaattctttgttcctgttgctactctgatacttctcttcaggttttcctatttttttaatcagtctttgctgtatgtttgttctctctgtagaagatttagtgtttatgtgatttttttttgtagtgctccttattttctgtagtgttcctttttggttttttccatttcactactcaccctaagccgtgtcacatttccactgtcttttaaaaccctgtcttctgaatccaaaactccagacctctctgctctaccattatttaataactgtttactaagcatcttctctgtgccaggcagtattcatacaaaatttcctgcccccatggagttaaaattctggagaggccaggtagataataagtgtaataagtaacttatatagtgtgatatacaatgtaataaatgcgatgacaaaatgaaaatgtaaagcagtgtaagatcaataaggattggggaggggagaagcagatatttaatagaatgttcagagtagatatcattgaaaaggtgaaacccatgtcttctgctgtctatttactgtattcacattcaaccatcagaccttgatttcgtttttcttcctgatcattctgtatcccagctaatgagatcaatcacatctatgccagtttgtcacttaaatcaacatgtagggccaggagcggtggctcacgcctataatcccagcacttaggaggccaaggtgggtggatcacctgaggtcaagagtttgagaccatcctggccaacatggcaaaacccccgtttctactaaaaatacaaaaattagccgtgtgtggtggcacatgcctgtagtcccagctactcaggaggctgaggcaggagaattgcttgaacccaggaaacggaggttgcagtgagccaagattgtgccacagcactccagcctgggtgacagagcgagacgcaagtctcaaaaaaaaaatcaacatgtaggaatgttttaggtctctctcttgcc

SEQ ID NO: 7695 - DNA, 1656 bp, Homo sapiens
tcactgcagcctcagtctcttgaggacgataggtgcgcaccaccaccccggctgattttgataaatttatgaattgcttttctgtgttatcttggagatcactctgttttcttaaaacagctgttttgaatttttcatttaagagttcacacagtgccaccttgttagggtcaatcactgttttcttgctttatttgggtatgtcatgattccctgtttgctgttgtttcttttggatgtatgtctatgtctttgcattgaaggattggttattctagacttctctgactggcgtgttttggctttaattagatatttttgcttagactttttaaataatttacctttcttgttttccccagtagtttgctgcctccttttcggcactaaatgacatcttaagcccagatttgccttggttctagtaaacagtcaggagtgccaggagtcccaaattgcagtggtcccaaagtggagaatatcctggtagtgcgaagactagctaggggtttgtgcctcgggtacctgtggaactaatctccacagcatggtgctgctgaactgccactctgatatggcatctcctttgtctaatttatggagcagagtttccaggactggggatggtagtccttctctgcttcctttgtttctggctgtcctcagggatatttctccctttgggtgttcctgatgcttcctgtcagttgaggcagggatagatctcctgccagaaaaccccaggtggtagggaagctggttgtccaccttgatcttactttttccagtgttgtagaaaccataagttggtgggaaagtgtggtcctgggcagattgctgggaggggcactgcagatagaaagtgagattctctctcaaaataaataaatagaaagtccaattctcttattatctgcttctggttttttcacttctctgtggccccaggactgtctccctctcatatttgaggtctgggatgttattggtgataatctcagcattgtgtatttcttttttgttttctactgaggggagtgaacccaaacattgtcattttggaactggaagtctgtacttgtattttttatcaatttaatttggctggtggtacaaggtgggtatttctgcctttgtaccaagaacttcgagaactgatttattgctaatattatttaaaatcagaagttgcttacaaattagtgaaaaaaaattttttttgagacagaattttgctcttcttgcccatgctggagtgcaatggcgtgatctcggctcagcgcaacttccgcttcccaggttcaagcgattcttctgcctcagcctcccaagtagctgggattacaggcatgcaccaccatgcctggctaattttgtatttttggtagagatggggcttctccatgttggtcaggctggtcccgagctcccgacctcaggtgatactcccacctcagcctcccaaagtgctaggattacaggcgtgagccaccacgcctggccaaattaatcaaattttaagatatagagagaaccagaatcagctcacaacaattgtagaataagttactaaattctattgagattttgttgaaagatacctatctagccatatatatatttatatatatatatatatatataatttatgttagt

SEQ ID NO: 7696 - DNA, 1291 bp, Homo sapiens
agactctaagccatcactagttaccattgagaaagattttctggtttcttttttccaatcaaaataagatcataggattgatttattctttttcttaattgcataatcttactgaagcatgtcatattatttaaaatctcagaattagagttttattcctcagtataatagtaatattttactagaattagaatttaattttgggaatttgatcattcccaaaatattttcatgtgcattattttatttccaatgttagctttatgaggaaaatagattgtattctcttattttgtgtaatgctttcaggatatatattaatttattaatccacacaactgtttgagaagtctaacttacagatgagaaggaagcaaaaatagaaacgatgtaaagtagattaagttttaaaagggtgtgagtattgtgatgatatagcaggcaatgtcatggtacatccatttcaagaaagtacagctgaactttactcagactggaattgggaactagaaagttaggaactcaagtcacatattccctttaaaccctctccagaatctcctttttttgacgggtttattctgctaactcatagatactgcttctcataacactagttttcatttgacttacgtgtgtcagtatcaattcacctacctgtccccgctcctttacaagaccttttaaatctaatatttatgttttctactaaaattacagatagatggcataggggaatgaaacgttgaaaagaagaaataaatataaggaagagaatatatggtagtaattttctgtggtaggcagagaaagtgaggtttagctcagctgtgacttggcatctaggttcacacagcttgtgatagtcaaaaaagaacctgtgttgggtatggtggatcacaactgtaatcctagcactttgggaggccgaggtgggaggattgcttgagctcaggcatttgagactgggtaacatgggagaacccctgtctacaaaaaaataaaattagcagggcatggtggtgcacgtgtatagtcccagctactggggaggctaaggcaggaggatcgcttgagcccaggaggttgaggctacagtgagccatggtctcgccactgcacttgagcctgggtgacagagggagaccctatctcataaaaaaaaaagggggggagctatgctgcatagtggcacacacctgtaatctcagcactttgggaggctcaggcaggcagatcacttgagctcaggagctcgagaccagcctgagcagcatggcaaaactccatc

SEQ ID NO: 7697 - DNA, 1043 bp, Homo sapiens
gacctttttgttaaccttcatgagttgacctgatatggtactgtttgaaaagaaatagatcatttgataatgttcaaggattaaaagtcctcttgagaagatgccagtgttttctagtttacttaaaaactaaactgacagagatataatatgaaaaaacattttttacagtagggatcagccgaatatccctgtttatgttacatatttcatgtcaattggtcacgtagtggtggacacttttaaagcctaaatacaataaatgctcttgaatttcttacaaactttttgtcacttaagtaaaataataaataggattttatgaaatcctataggattttatgtaattgaaaagtgttaaatgataacagtagaaggaaatagctaaataatgtgaggattttctattttgaaaatgtgatttctcacccaaataatagtaattttgataaataatagagtgcttaaaaggttagcctaggatatgggagagaggatattactgtgactagattttctgatcttaaatatcgaaaataagtgagaatataagagagtttttcctgttttttaattaagaaaatattatttgtaacttcatgatgtagatagcatagaaataagacttgcttaaatttaatattaaatttttaactttgaaacattgttacagattgcagtgagtcaacctgaaattcctcttaggaatttcttaaatatagaaattaactccttaaaagccactccaaaccaaacatcttgaagtttttccctggagtatgtttattgttattaacaaaatgttatatattttttaagacagaataagagaaaggggaaacacaatgattttgaaatgcctggtaatttgtactgtctatgccaaaatctttgttttgtgtggaaatattaacacaaattaccctgtagctagaaagatttctccatgtgatataggtaacttagaaattgagttgattattaattctgttttccgaacttttttccagttaaaaaatttttttatagtaaagcagctgtgt

SEQ ID NO: 7698 - DNA, 1043 bp, Homo sapiens
cctggccaatgtggtgagaccctgtctctactaaaaatacaaaaattagctgggcttggtggtgcgtccctgtaatgccagctacttgggaggctgagggaggagaatcgcttgaacccaggaggcagaggttgcagtgagttgagatcatgccactgcgctccagcctgggtaacagagcaagactacgtcctccaaaaaatagagagagaacttactattagagcattcttgtccagtagaaataaaatgtgagctacatgtgtgattttaaattgtctttacatcaaaattttaacataggtgtattaattttacagtattttatttaacccaatatgtcaaaatattagcatatcaaaataaaattattcatgagatacctcttaattttttttatattcaatgtgtattttgtacatcacacatctcaattcagattaactacatttcaggtgctcagttgctacatatgattagtaactaccatattggacaacatcagacagcagaactctagaatttagatagatgttaagagactatattatataacacatctgagaaatgcattttatgctttcaaattgtatcttagaactatctaggttaagttgttttttgtaatgagtgaaaatggttgaggaatattttcaaatctaccaaaataaatattaccagtttttttttagtaaaatgcctatgagattgttgagatcattgtctaaaaatattttaaattgatttattttgaagtttttaatatttttaaggcaaaatggttatactaataaataaatcgtgcccaaaaacatacaaagtatatttgatgctttatttttaccaacttgagagatagtcacatgttatttcttttctgcactttctcaccttggtaaatctggaaagcaaaaacttagtatttgcatttgctttatgaaggagacagtaaacttgagctttcagtctcgccactagtctgtctttgtctgttgttaaaattatgagccagtctctatggccgcagccaaatgagtaatcac

SEQ ID NO: 7699 - DNA, 1065 bp, Homo sapiens
accagtgcaaaaaaggtgtcttattcaagtttctaagaggacaaacaatgaaacgattaggaaaaactggaagaggcatattactagcttttgaccaaaaaaggtcaggaaatcagtcatatgcaaacgtatatgtcctactccttgaggatggtgtgcttgacaggactcaagattgaggacattttattttaggttaacctcagtttctcctgtgatttttatgagtattaacattttaacacaagcattgcttttatggttgagttgatttaatggtataatatttcttattcccacagaattatatttaatttttatcctcaagaggtaaaggattggctgggcatggtggctcatgcctgtaatcccagcactttggaaggccgaggtggtagatcacgaggtcaggagatcgagaccatcctggctaacatggtgaaactccatgtctactaaaaatacaaaaagttagccaagtgtggtggcatgcacctattgtccatgctactctggaggctgaggcaggataaccgcttgaacccgggaggcagaggtcgcagtgagccgagatcataccactacactccagcctgggccacagagtgagactccgtctcaaaaaaaaaaaaaaaaaaaaaaaaaaaaaaggccaggcgcagtggctcacgcctgtaatcatagcactttgggaggccgagacgggcagatcacaaggtcaggagttcaaaaccagtctggccgacatggtgaaaccccatctctactaaaaaaacaaaaaacaaacaaaaaaaaaaaacagaaaaattagccgggcatggtggcgtgtgcctgtaatctcagctactagggaggctgaggcgggagaattgcttgaacctgggaagcagaggttgcagtgagccgagatcgtgccactgcacttcagcgtgggcgacagagcgagcgagactccatctcaaaaaaaaaaaaaaaaaggccgggtgtggtggctcacgcctgtaatcccagcactttggaaggcggaggcggtgaatcacgaggtcaggagatcaagaccatgct

SEQ ID NO: 7700 - DNA, 1036 bp, Homo sapiens
ttagctgcttgatatttttaggaagccagaatacctttaaataaatatcttctgcaaaataccaaagagcttattctcttactagccctagatttttcgtatttgaaaacctggtgtgtataattgggtaaagtttaaagggcctctatgtggttcaaagagctacatactgaggatgggcagctttccaatgtaagctcttggtaaattatttaaaggtcctgtggttcctgagaaagtaggatgttgagtgagcaaagtgaccaggaaactgatctgttaagaaaaggtctaagttctggactgaggtgctctgctctgagatatattcactctaggccaggtgttcttaaccgtgttcacggtcgcaatggctgaagcaacggttcctaaaggtgattgaacctcagaactaacccagagagctttttaaacctaaggattcctgggacccaccctcagtgtaagttacagagtaaggcttagatatgtgtattcttagaatgttctccaggtgatcttgaaaattctgaaattgtggagcaaaatagtgtgtgtctcatgtttcttttggagctacagctttcgtcagattcttaaaagggtctttgattcgaaaatcaaaatgttaagaacagttgctagaagccactaattctcaaacttgatagtgtatcagaatgacctaagaatttgttaaagcacagattgctggaccccacttctagaatttctgatttcagtaaatctggtttggagcacaggaatatgcattgttaattacaacaggtccttgaatgatgtcattttgttatttcattgatgataaaaagtatagattcctagctggggctgctctcaagcaaatgggcttgctgtccagtgtgcacagaaaaccaataactatggcattggctttttagaaaagaaaggtttttttgttttgtttgttcgtttgtttgtttctgagacagggtcccacagtgttgcccagtctcgagtgcagtggtgtgatcatagctcactgcagcctcaa

SEQ ID NO: 7701 - DNA, 1044 bp, Homo sapiens
taatagttgaaagatcttagatgcaaagagttttaaatcattagttcaagaactagtcagtgagtgattgaataaactttattaaaacatgcttagtgaattagtgaatattacaacacaatttttttcctattactttctttgagtttcgagaaagtttctagctgggtgtggtggtgtgtgcctgtagtcccagatactggagaggctgtggtgggaggatcccttgagcccaagagttcgaggttacagtgagctatgataggcaacagagtaagactctgtctcagaaaaagtagtctctatatgtgtatgtaaactttaggaagaagtggatgtttatcactgttggtttgtttctgaagtgtaattattatttgattgtgacttgaatctactttttaagaggccataattttggctaattccaaataagacctgaccttacaaatggcctcattactaagtccagcttgtgctagagctttcactaattactgtctgggtctaggactggtagtcagactgcaacagtcacaacttggtaaacattttaaatactgacataagatttttatattcatacattattcataattgaagtaaaaacatagttccaagatgttgtaaaggtgtctttcactttttcttcagtcttagctgtctgtgaagataaacatacaacttgcctcttataaatggttctcatgcaagataaagctataatgggatactttttttctgtttttcaaatatcagattagcaaagatcaaatgttttgaacacgtttttgaaaagagtgtagaaagactgccactgtcattcattgctggttatgagtatatacagatataaagcttgtggaatgcatttctaattatatatattcatttactcaggcatttttcttctcgtaacttattgtccagtctacatgcatttattcatttgtgggagatgacttgagtacagggcttcttcttgtatgtattagaagactggaaacagcctaactatctgttaaataaactgagtgcagttgc

SEQ ID NO: 7702 - DNA, 1047 bp, Homo sapiens
gtcaagactttgttggctgggcacggtggctcacgcctgtaattccagtactttgggaggccaagacgggcagatcattcgaggccagtagtttgagaccagcctggctaacatggtaaaactccatctctactaaaaatacaaaaattagcccggtgtggtagcaggcgcctgtagtcccagctacactggaggctgaggcaggagaactgcttgagcctgggaggcggaggttgcagtgagtcgagatcacaccagtgcactccagcctgggcaacagagcaagactcactctgaaaattaaaaaaaaataaaattaaaaaaacgtgataaactaatgactaagtctttttcttttctttttttaagagatggggtctctaccgggcacagtagctcacacctttaatcccagtatttaggaggccaaggtgggcagattgcttgtgcccagaagtttgattccagcgtgggcaacaatgtgaaaccccaactctacaaaaaataaaaaaattagtttgcacatgcctatagtcccagctactcagaaggctgaggagggagaatcacttgagcccaggagttcaaggctgcagtgagccgagattgtgccactgcacacagaagaaatatcagaaaaatgatttttaatcaaattacttacgttacaatacagtttgaatacaagtatagcaatatccctttgagaaagatctttcaacacacacacacacacacacacacacacacacacacacacacacacacacacacgccagcatggtggtgcttgcccgtagtcccagctacttgggggctgatgtaggaggatctcttgagcctgggaagtcgaggctgacaaaccttgcctccagagagagagagagagagggtcagaccttgcctccagagagagagagagagagagagagagagagagagagggtcagagcgtcttgccatgtcatccaggctggagtgtagtagtggtacaattagagctcactgcaaccttttttgttttttgttttttttttgaggtggagt

SEQ ID NO: 7703 - DNA, 1063 bp, Homo sapiens
caaagtagatcaaagacttaaatctaagatctgaaactaacaattctagaggataacattggaaaaacccttctagatattggcttaggcaaagacttcatgaccaagaacccaaaagcaaatgcaacaaaaacaaagataaataggtgggacttaaagagcttctgcatgccaaaagtaacaacagagtaaacaggcaacccactgagtgggagaaaatcctcacagtgtatacatcctataaaggactaatatccagaatctacaacgaactcaaacaaaaagttcaacagtcccatcaaaaagtgggctaaggacatgaatagacaattctcaaaagaatatgcacaagtggcagatggccaacaaacttattaaaaaatgctcaacatcactaatgatcagggaaatgcaaatcaaaatcatgagatcatctcacaccagtcagattagctattattaaaaagtcaaaaaataatggatattggtgcagatgtgatggaaagggaacattcttacaccgctggtgggaatgtaaactagtatgactaatatggacagtgtgaagattcctttaagtagaagtaccatacccagtagtgggatccagcagtctcactactgggtgtctacccagaggaaaagtagtcattatatgaaaaagatacttgcacagtcatgttcaaagcagcacaatttagaattacaaaaatatggaactggcacaaatgctcatcaatcaaggagtggataaagaaattcttacacacacaatggaatactactcagccataaaaaggaatgagttagtggcattcacaacaacctggatgggattggagactgttactctaagtgaagtaactcaggaatgaaaaaccaaacatcgtatgttctctttcataagtgggagctaagctgtgaggatgcaaaggcataagaatcatacagtggactttggggccttgcgggggaaatggtgggtggggattgagtgataaaagactacaaattgggttcagtgtatgctgctcatgtagtgagtgcaccaaaatcccacaaa

SEQ ID NO: 7704 - DNA, 1035 bp, Homo sapiens
gtggtggatactctaaataccttaacttgatcaatacaattctatgcatgtagcagaataccacattactacataaaaatgtatgaatattggccagctgtggtggctcacgcctgtgatcccagcactttgggaggccgaggtgggcggatcacctgaggtcaggagttcaagaccaacttggccaacatggtgaaaccccatctctactaaaaataaaaaaattaactgggcatcatggtgggcacctgggatctcagctacttgggaggctgaggcaggagaatcgcttgaacacaggaggcggaagttgcagtgagcagggatcatgccattgcactccagcctggagaggagcgaaactctgtctcagaaagtatgaatattatatacagaataaaagaaaattacaagcaagagaagtacacacaaaacaaaccaaaaaacacgtaagaagccacatcataaccaaatgcctcaaaagcagtgacaagtataaaatgccaaaagcagccaatgaatcaaggcacattactttcggaaaaacagatatgaaaattactgcgtacttctaactaatcaaaaaattttcaagccaaatgcagtggaatgacatgtttgaagtgctaaatgaaaacaacaaatttttgtttgcgtgtttgcttttgagacaggatcttgctctatagcccaggctggagtgcagtggtgcaaccatagctcactgcagcttcatagtctcagcctcaagtgatcctcccacattaccctcccaagtagatggaactctacaggtgtgcaccatcatgcctggctaatttttttattttttaaggagacaggggtctcactattttgccagggcttattttgaactcctgggctcatgtactctgtccatctcagcctcccaaagtgcttgtattacaggcatgaaccaccatacccagccattagaatttcttctttttttttttcgtggtgttttttttttttttttgagacggtgtctcactctgtccccaggctggagtg

SEQ ID NO: 7705 - DNA, 1032 bp, Homo sapiens
aaaaatgtatgtttggtttgtatgaagcaagctaaggatttcatgactccagcaatttacaatttaactcaaaatctagctgaaagcctagttcaagttctgtcttttctattaaatgttttctgattagacttacatgcagtgactacccagtataaaccaccaccctggaacctcttttcttcccgaaaatgcttatttttctctaaatcacttatcaccatctgacatacacgtttacttgtttattgccatttctacactcacacaggattatgagctctataggtaggagttttgttaacacactgctttgactttgtggttaccagtgcttgtcacatatcaagttcttaagaagcattcattgaatgaaggaatctgtttaattctgaatctttctttcctctaggcttctttgtttataagttgtagtcaatatagaataatacagggtttgtattgtttgatgtgtataaatctgatctccgtctgcaggaactttcttggagcaagggcctaactttgtactattatctcctccacagaatcttagttggcatttgtgtttgatctcttgatttagatagacacgagtttgatttttggtttagctgtttacttacttttgtgacagtaggtaacttttctgaaccttggtttctctgttttaaggatatacgagatagtgttggttgaggactgtgatggttcattttatgttgtaagcatgactgggccacaggatacccagatcctggtaagatattatttctgactgtgtctgtgagggtgtttccgaagagattagcatttgagctagtagactgagtagggaaggaccacccttatccatttgggcagatattgtccatcctttgggggcccacatagaaaaaaaaaaaaaaaaaggcagacgaaggatgaattggctctttctgagctggaacatccttgtctcctgctttcagatgtgggtgctcctggttcttcatttttcagacttgaaccaagacacaccactggctttcc

SEQ ID NO: 7706 - DNA, 1151 bp, Homo sapiens
ttagctattgttacagaagcatattgctaagtgagaatttgcttacctaataagttaggttgcagttcatacataagaacccaagtatgctttagggctgtttcaggccagattttgatttaacaaaactagtgtcactcataggctttagagcctcctcttcatttatcttatgtttccccttttcatggctttattttagttgcttctcagctactcagagaaatctctgtatcttgtagtatctaatcacactttaaaaaaatgattcatttcccagtgggcagagtagcacacagctgtagtcccagctacttgggtgactaagttaggagaatctcttgaggccaggagttcaaggctgtagtgttctataattgcaccactgcattccagcctgggcaagatagtgagaccccatttactgattataagatttaaaaatatctgctgcatgatttgtgaaaaacacagaaagtcgtaaggagtaaaataaatcatctttaattttttttaaagttaaccacggttaagagttgggtctgtttccttttattccgtatgtacctttttccctgtctcctttaattagtactgagttaaagaccgtgctttacttagtacttgagtatgatttctggaaaaaaaaattactggttttataaaaatgtgtgtacactaaaattcatttattttaccatgtacaattttttgagtttgggcaaattcatagactcaggtaaccactgccacaatcaagatacaaaatagttctcttaccttaaaaattttcctgtgctgcccccttgtagttgtctccctactcctaacctctggctagtttctgcatttttcagatcattgtataaatgtaatgataaagtatataacctttcaaagctggcttctttctttcattcattaattttgagattcatttatgctgttccatagattggtagtttgttccttttttttgtttttttttttttttttgagacaaagtctcactcttgttccccaggctgcagtgcaatggcacaatcttggctcactgcaacctcccgcctcctgggttcaagcgattctccttccttagcttcccgagtagctgggattacaggtgcctgccaccacgcccggctaatttt

SEQ ID NO: 7707 - DNA, 1600 bp, Homo sapiens
catatactgttctctctgcctagaaagttttcctagttaacttgactcatagttcagatattactttatgtcttcatgaaagggctgtctacacccatggtcttgattgaggaaagtacttaataaattttcctaacttcatttatcacacatgaaatgtaatatattttatgttgtttgatgaccatcagtctctcctcgtagactgtatgtcccatgaatacagtcgtcaggattggttttgttcagtgttgtgaacaataccattcctccattagtggaactccgaatagcattctaggaccaccagcctacttttaccaaattccacacatactcaagtcctgaagttggccccgtagaacacactcataaaaagtcagccctctgtatacacaggtttcacatcccatgaacactgtatttttgatccatgttctattaaaaactacgcatacctatgcatttcaaacctctcttgttcagcggtcaactgtatattatttttactgttttattgctttgcctctgtgctgtatttcctctgacttgacttccagtttaaattttttttttttttttttttttgagacagagtctcactccatcacccaagctggagtgcagtggctctatcttggcccactgcaaactccacctcctgggttcaagtggttctcatgcctcagcctcctgagtagctggaattatagatgcatgtcatcacgcccagctaatttttgtatttttagtagagatggggtttcaccattttggccatgctggtttttaactcctggcctcaagtgatccacctgcctcggcctcccaaaggggtgagattacaggcgtgagctaccatggctggccagacttccagtttacttatcctttttattggtatctaataaacttttatcaattcattgctttttgaaaatatgtctattagtcttttatttttagaagctctgtgtagttctttttcaattttacttgctcatttaatttgtttctaaacgtatttctaaacttacctttatttcgttaaacacaaagtacctcaagttagtctgtgttaatctgtatctgctaattcctatgtctaaaatttttttgttttctgtcttcattggttctcagtcatgtgaccttgtttccttgtgtatatttttttattctcgcccctccttactaggatgagatggttaggggagatttttgagaatgatttaggtctagaatggaggtaggtttctctagagaggatttgctgttgtgtctgctgtatatctggggagatggcactgatggccttggactacattaaattgaaagcttgaagttttttgtatcactaaaatgatgtgaatgaattcatactgggactggtttgtggttacggcattcaaggatttttttttaagccgtatttgctcggtgctaacctagctttccttgcagacctgtgaaggtaaaaagaattagggtaggtttacttctggtactctgttatcccaatgagtagttagccctttgtaggtctcttgttagtcttctttgcatgaacagagggtgattttatgttctatttttgttt

SEQ ID NO: 7708 - DNA, 1062 bp, Homo sapiens
tgaatctaaaagtaccgggttaccatatggaaacaataccaagccatccttaaaaaagagtttaaattctaaattgtaagagcagttataacaactttcagtactttcttcaataactatattttgattagcatttctgtgacattagtaactctgataaaatgatttcatgaaacaggaggaaacgaccaactcaatagctagaaaagaaacatttcaactagattaaaacaaagttaaaacttgtactgagaccacaaaattcctatcatgggtaatgaaaagtattcattaaaattcaattttttatgtaataagaagttagaaattggatagtcatattcaggtaaattggtcacattatgtggaatgcagaaagaaacaagggaaataaaaccagttctacaaaaatgttttgtcattataaaaatattagatcacattttcaaaaattaacttttgaagaaactgctgtgttttaagaaaatgaaagttagtaggataaattctctgtaaaacgtccagaacaaatgtatgaacataatatgtggttattaccatgataaatgtgcacaacagcttagaaaaatgttaaatagttgtgaatgtagaaatggtggtagccatgaatatggcccaggccagttataccaatggctaggtaatagtgagaaattataatagcaatctctaagatgatactaaaacaaaatgttactttctaagaattaacattactaggattatgaaacaactccaatttaaatgggaatttaggttctcaaatattctagtataacaggtgttcctttcattagtatggctgctcaaagaatatgaaatggatttctatctggtagtaatattcttaaattcacacaattaccatgcttcggtggaaattgaaggaggtcattattttgaaggtccaacatggttagattttctgtcatcttcattttcggagggtccacaagatacaatctgatcgttactaatcaaaactgttttaaatgtgaatgtatgttgtagaacttaaggtagtattttgaactagatagt

SEQ ID NO: 7709 - DNA, 1124 bp, Homo sapiens
tggagatcatctctcagttgccaaggtggaagcccaggcatctttttcttctttggtgtataggctatgccctagcctttggcctacactcttaaagcaaaatgaatatatttgaacgtctacatttaggttttatatgacagacattgcagtagtaactttttgaatatgcctaatattgggaggagccagtgttgaataggtgtacatttaaataaacagtcaatctaatttataaagccattatgtacatcattttcttgtactaatttaattactcattttcccccggatttaccactatttttgtatcttatgaaaaattcatgcaggactattggcatagaaattagttgatgggctgggcacggtagcaaacgcctgtaatcccagcactttgggaggctgaggtggggggtatcacttgaggttaggagttcgagaccagcctggccaacatggtgaaaccccatctccgctaaaaatacaaaaattagccaggtgtggtggtgcacttccataataccagctgcttgggaggctgaggcgagaattgcttgaacctggaaggcagaggttgcagtgagccgagattgcatcattgcactcctgggcaacagagtgagacgagaagaggagaagaaaagagagagagaaagagaaagaaaacaggaagaaaaggaaggaaggaaagaagaaaagaaagaaagaggaagaaaaattagttgatggttaactaattcttccttaggctattcattttccatcattattacaccctgaggaggctttaactaaatttcctgatacattagatgatcaatatcagtattataagattgatttctataaggggctgggcgtgatgattcatgcctataatcccagcactttgggaggcgagggtgggcagatcacctgaggtcaggagttcgagaccagcctggccaacatggctaaaccctgtctctactgtagtcccagctacttgggaggctgaggcaggaaaatcgcttgaacctgggaggtggaggttgcagtgagctgagatcatgagactacactccggccagggcagctgagcgagactctgtctcaaaacaaaacaaaaaaagatttattta

SEQ ID NO: 7710 - DNA, 2168 bp, Homo sapiens
ccagccttccagatcaccccaaccagtgctcctatataaccatcctgtgctcctatagaactttgttttgtacctctgttttaacaatcagcacattctgctttgtattatacctatttgtttgcatgtctgtcttcccttaatagattgtaagttctttgaggacaggagtcatgtcttagtcatctatgtatggttccttggagtctagcacagtgctttacccatctcagaaagtaaattcttattttaaagtgatgaatgtgctgcaacccagctagtgaaaaagaaccctactgggagttatcacaagttttctgactattaacatatgataatatcaaaggacaggaaagcagaatcacccaattgtggtaaaactgtgagttaccaattttaaacatgtcaatatataataaaaaatactaaaaagcttataatgccaattctcatcaggtacaaatttgattcctgaaatcaccaaggggaaaaatgtaaaattacctgaaatgcgttattttaaagatgttaaaggaagaaacagaagtcctcacaattgacttaaatattcaaatctttgataatttacttgaatttctgaattgagttttaggaaactcagactactttttctcaatgtagcttttccttcatagataggcaattctggttcaaccaggaattgtgatgacatcataaacacgtaaactcttagcaatttatttattttaaaatattctcttagagtgctttttacttactatctgttccaaaagaaaccccctcaaaggagaatagagttcactgctctttgggacaagattacctttatatccagcagttatcaaagttggtttagattatggcctcaagcaaattttactaaaatgtgaaaatatgccaccttccaagtcagaaataaactttggagtatgttcatttaaagagtttttacatatttataattgaatttccacaattagaataaacagttgcatgtctttttgtactttgttaaataatgaaatggaagtaatgacaatataacttcaggattgttatttctctacaaggtaaagcactttaagagatcaaattatacataataaaatattaagctttttaaatgataaactctaatactggcatgtattgcaatgaacgagttcacacactcatatcttgtggattataaaatgacattattcttttggaaagtattatgttataagaaccataagaagttcatactctttgattcattaattctagtcttaggaaacgatgcttgaaaaacagtttttaaaaagtgtattcagtttagctaatgtttgtcacgtacctcatacgaattagacactgtggtgggagctgcagattaaaaaaatgaaaggtttaatgttattagaagaaagatgtttattgcagtcttattaaagaggaaaagaaaaatggaacaaccttgatgttcaacaatttgtgaatgctgttaaattaatattttggcatattatgcagctttaaaagtgataattgtacatactttaggaaaatgtagagaaaatttaagtaaaaaaaattaattacatcagcactagaattatgtatttaaaaagtcttatagaccagggacagtggctcatgcctataatcccagcactttgggaggttgaggcgggagaattgcttgagtccaggagttcaagaccagccagggcagcatagctataccctcatccctaccaaaaaaaaaaaaaaattagcctattgtagtggcgcaagccttgtagtcccagctactcaggaggttgaggtgggaggattgcttgactccaggagtacaaggctatggtgagctatgattatgccattgcactccagcctgggcaatggagcaagaccctgtctcaacggaaaatatatatattataaagtaatggagatcattattttatattatggcagaattttgcctgaccaaaattgtcttttccctaaaaaacaactattatttcctagcaaattggaaatttcatataatgatgttattcagtattttatattttggaggtagtcttcttcaaatgagttattttagtaaacttgttttatgtttctgttaatatactttgataggtattatttgtgttttgctattgcagcattta

SEQ ID NO: 7711 - DNA, 3417 bp, Homo sapiens
tttgcctgtttttgaattggatcatttgttttttttggtgttaagttttaggatttctctatgtattcttgatattaatccccttttagatacatgatttggtaacattttctttcattttacaggttgcctttttactgtgttagcagtggcccgtgctgcacaaaagttttaaattttgatgaagcccaacttgtctgtttccgcttgttgcttatgcctttgttgttgtattaaaaaaaaattgccaaatccatgtcatgaagcttttccccttatgttttcttctaaaagttgtatagttttagatcacaaattttggtgaattaattgattttaagtttggaatatcatgtaagggtccagcttttttttacgtgtagatgtccactttttccagcaccatttgttggaaagactgcctttgccccagtgaatggtcttgacactgttacagaaaatattttgactgtatatgcaagggtttgtttctgggctttctattccattccattggtctgtatgttcttatgctgataccagctcactgttttgattactgttgctttgtagtacattgtgaaatcaggaaatgtttttccgtcaactttcttctttctcaggatagttttggttattcagggtcccttgagattctgtatgaatttcaggagagatttttctttttctccagaaaaaggtcacttggattttgatagggattgaattgaatctgtagatggatctgggtggtagacatcttaatattaagggctgggtgctgtatcccagctctttgggaggctaaggcgagaggattgcttgaggccaggagctcaacaccaggctgaacaatgcagcgagcccccttctctgcaaaaaaaataaaataaaataagccgagtgtggtggctcacgcctatagtctcagctacttgagaggctaagtctgaaggattgcataagcccaggagttcatggctgcagtgagccatgattgtgtcattgcactcaagcctgggtgacagagtgagaccctgtctctaaaactacacacacacacacacacacacacacgtgtaaatattaagtcttctagtctttgaacaggggtgtctttttacttatgttttctttaattttgctcagttatgttttgtagttttgtttatttcatcttctaggtaatttattcttttttgatgctcttgcaaatggaattatttgttaatttcattttcaaattattcattattgttatatagaaactagtcagcgtgagcctgtagtcctagctacttgggaagctgaggtgggaggatcccttgagcccagaaattcaaggctgcagtgagctatgattgcaccagggcactccagcctgggtgacaaaccaagaccttgcctcaaaaaaaaaaaaaaaaaaaaagccaatttttatgtgttgatttcatatcctgttgcttaggtaatatcctagtcaatggtgaaagactgaaagcttttcctctaagatcaagaataagacaagggatccctgcttttgccatgtccactcaacatagtatttgaagttatagtccagaaattagaccagaaaaagacaaatagcatttaaattggaaagaaagaagtaaaattgtgtctgttcacagatgatataatcttatacttagaaaaccataaagacttcacaacaaagcctactggaactaataaatgaatttggcaaattagcaagtacaaaatctctgccttcttttaaacatagttttagctaacactgcattaaaattgtagatcctgcttttttgcctaacatctatcctctacatttctcttcatgagtagtaatttaggatcatttttaatggctgcataatatttaatcttataatgacccatttccttaatgtttgacattgtagtttccagttctagggagcattataagcaactgggataaataccattgcaagcctttgtctgcatctctgattttttaaaatgtatattcatagtagtagaattaataatcacagggtatgaacttgaaagccacaaaaatctatctcctgacactcttcacaaattgtgtaaaggttgtactgactgccattgtcctcagtcagtgttggggtgtttttatctcactcatcacacccttgtaagcattaattatttatttgcagtttatcttgttttaaaacacaaatatttggccaaaacaggaggagttttacatcctaaggggatgcagcattgaatgttactctttctctgctaattggatatttgaaaataatatttcgttgtttcaatttgcattcctttaatagggtgaatttttttcatgtttatgagcaacttgtatttttagtgaattgttatttagtacttattagggttttgagttttttatatttgttatgagctttctttatattattacagatattataacctttttgtcatatttcatagtttgcttagccagttgtttgatagtaagtctttttgaattgtatgtttattttaaagtctatgcaatgggatattgtcattaattccagtagtcaggttatgtgtgcttgccttccttccttttttcttttgttttaggagattgtaaaaattaataaacaagtgaagtgagaatgcttgtttgtaataattaagaaaatagtcaatttaagtttcataagcattttgcaaacatttatatacagttgatatgactgagattttattgtttccttttttgttcattaaaatttggcttctttaaggatgtctataaacagcaattataaagttaagcgttttaaaattcctacagcgtaatgaaatactatatctacagatttgagaaatttgagggatctgtatatgagatggcaatagaatgaaacagtagaaactaatactttgtctttaattttctacaaatttaatgtttctatttctgtgcacatgatacttgctttatgttcttttgtatttaaacatgtttgtatttattatcttctttctagttgtttcactcctcgtgtggtacttgtttaatattacatatcagttacgttatcttgtctacctcttatacctagaaattagtggaaactggcagtgtacctgctgtttcttgagatcatgacaagacaaaaacaaatcctgttgtctcattaacatattttaaagtatattttttaaaacttaacataattgcatcttcagcaaaatatgaatagtataatacccaggctccttctctggaattgtctggttcctctttctttctaggatatcagtagcaaaacatttatgggagcaccacatgtaagatgctgaagtggtgtctttttttgcttggtcctgtacaatcagagtaccacttgaggccattctaatgctgta

SEQ ID NO: 7712 - DNA, 1219 bp, Homo sapiens
ggccaaaaggaatgaccctagccagactcagggatcaaagagcaaacagattcagtggcctgcattggtaagatctattcctgtttcattaagcattttcatttgttcgtttaaaacaaagaacaacaacaacaaaacaaaggccaggtttggtgactgacacctgtaaaactagcactttgagaggctgaagcaggacaattgcttgaagccaggagttggagatcagcctgggcaaaaaagcgagaccccatctctaccaaaaaaaaaaaaaaaaaatagctggatgtggtggcacatacctgtggtcccagctacttgggaggctgaggtgggaggatcacgtgagcccaagaatccaagtcaatgtgagttactgtcacactgctgcactccagcttgagtaacagagtgagaccccatctcttaacaaaaaaaaaaagaataaatgaaaatttaagactaagaattaaatagaagtttagattcatcttactgatttataaattaatatttttgaagagtctctgatgaatctggcagagattttaaaacactgccttcattttgttaaaacaactttaggtgtctctttgttagtattctgtcagcgtatgtagttaatgaataagtttattctatcaaattaaaatataaattggattaaagggacctgagagatagttgactgtatgccacgtggaacaactttgctgaatgaaactttgttaagtgggagatggaacatactttgtattaaaacatttaataacgagtaattcttcttggtttgttaatcagtaaatcattgtgggtgatagatgtttaatgtgtaattattcaggtaatggattaaattacttatcaggacatgtttcatttaagaaaatataataattttcagtaaattctctggtactttgaagagttttatttaagaaaagaaacaggaagtaaacaaggtcattaaattgtattaggaaaagagccacattcatttaactattgttattgctgttttctggcaaaacatctagcatataacaaatttgcaatatttgtaaagttttcttcttatgttactatcaaagaaatatattaaaagctgctgaaacattattgcaggtatttgatataactaatgagttagggtagttcctttcaattttttaagcctgcaaattaactaattacaaggatagcttctgcttgctaataa

SEQ ID NO: 7713 - DNA, 1035 bp, Homo sapiens
tttttcatctgtgcttagaatgttgagagtttttattatgaagggatgttgaattttatcaaatacttcttctgtgcctattaagatgattcatgactgtcgatttacatatgttgaaccatccttgcatccctgggaaaattttcacttgatcttgatgtttttgatgtgctgttgaatttggttttctattttgataagaatttttgtatgtatgttcatcagagatattggcctgtagttttattttgttgttgttgttgttgtagcattcttgtctggttttggtattagggtaatataatgctggcctcttagaataaattaggaagaattccctcctcttcagttttttggactagtttgaggagaagtggtgttagttgtttcaaagtttgatagagttctgcagtggggccatctgatcctgaactcttcttttttgggagattttttactactaattttacctcattacttgttattagtttgtttagattttctatttcttcctgattcaatcttggtagttgtatgtgtccaggaatttatccatttcttcaaggttttccagtttgtttttgtatagttgttcataatggtctctgatgatcttttgtatttctgtggtatcagttgtaatttctcttttttcgtttctgattttgtttatttgggtatccttttttgttgtttattctcaacaagcagttaattgattttgtttatctcttcaaaaaacagtttttcatttcattgatcctttgtattttgttagtatctgttgcatttgtttcttcttgatcttaattgtttctttccttctgttaattttgggcttgccgtgttctattctgttttcatgggatgtatggtttgacactgtatttgaaattctgttactttttggttataggtattaattatgaacttccatcttagcactactttattaaatattctctagattttggtatgttttgaattgatttttatttattgtaaagctacatttgatttcatccttagtttctt

SEQ ID NO: 7714 - DNA, 1051 bp, Homo sapiens
caacagtatatgagagtacccttttctctacatcctcaccagcatctgttattttttgtctttttaatagtagcctttctcactcgagtaagatctcgttgtggttaagatatatacatttccctgatgattcatgttgttgagcattttattttctttttcacttttgagacaggatctcactctgttgcccaggctggagtacagtggtgcgatcacaggtcacttcagcctcatcaactcaggctcaagtgattctcccacctcagtctcctgattagctgggactacagttgtccaccaccacatccggctaattttttgtattttttgtagagacggggtttcaccatgttgcccaggctggcctcaaactcctgggcgcaggtgatctccctaacttggcctctggaagtgcttggattacaggcatgggccgctgctcctggactcatttttttcatatacggtgttggctgtttgtatgttgtcttttgagaaatgtctgtttatgtcctttgctcacgtgtgtgtgtgtgtgtgtgtgtgtgtgtgtgtgtgtgtgtgtttatgtacttttttgcccaccttttttttttttttttttttttggagacgaagtctcgctctgtcaccaggctagagggcagtggcgtgatctcggctcactgcaacctctgcctcccgtgttcaagcagttctcttgcttcagcctcccgagtagctgggattacaggtgcatgccaccacgcccagctaatttttgtatttttagtagagatggggtttcaccgtgttggccagaatggtcttgatttcttgacctcatgatccacccacctcggcctcctaaagttctgggattacaggcatgagccaccatgcccggccttttgcccactttttaatgggatttttttttaaactgttgagtttctcatatattctgaattattagtcacttgtgcgatgagtagcttgcaaatactttcttccattcaacaggttgtctcttcattctgttgattgtttcctttgccgtgcagaactg

SEQ ID NO: 7715 - DNA, 1033 bp, Homo sapiens
tttaaacattcatgtacaggtttttgtgtaaatataggttatttcacatgggtgaatatctaagtatggaattacttttcttaagtagtttatcattttgcattcccactagcatccagagttagttgctttgcatccttcccattcttttgggcagttttaaaaattttagtcattcttttttttgagacagagtctccctctgttgcacaggctggagttcagtggcgcgatcttggctcactgtaaactccgcctcctgggttcacgccattctcctgcctcagcctcctgagtagctaggactacaggcatccgccaccacacccggctaattttttgtatttttagtagagacggggtttcaccatgttagtcaggatggtctcaatctcctgacctcctgatctgcttgccttggcctcccaaagtgctgggattacaggcatgagccgctgcacctggccaaaaattttagtctttctaatagatgtgtagtagtagctcattgtggtctttatttgtatttctctaattattaatgatttttaatatcttttgatgtgcttacttgctgcctgtatgtcttctttagtgaagtacatgttcaaatcttttgcccatatttttgaattaattttcttttattgagtttcaaaagtgttttatatattcttgatacaagtcttttgtgaaatacgtgatttgtaagtatttccttacagtctgtggcttgttttcattttttttaacattgattttcacagagtaaaacgtttccaattttgatggcatctaacatcacttttttttttttttgtgatggagtttcactcttgttgcccaggctagagtgcaatggcgtgatctccgctcactgcaacctccacctcccaggttcaagcgattctcctgcctcagcctcccaagtagctgggattgcaggcatgcgccaccaagcctgactgattttgtattattagtagacacagggtttctccatgttggttaggctggtctcgaactcccaacc

SEQ ID NO: 7716 - DNA, 1047 bp, Homo sapiens
aacaacaaaaagggctggatgtggtggcttacacctttaatcccagcactttgggaggcgaaggtgggtggattgcaaggtcaggagttggagaccagcctggccaacatggtgaaaaacatagtgaaaccccgtctctactaaaagtacaaaaatcagccgggtgtggtggttgcatctgtaatctcagctactcgggaggctgaggcaggagaattgcttgaacctggaaggcagaggttgcagtgagccaaggttgtgccatggcactccagtttgagcgacagagcaggactccatctcggggccgggggaaaggcagaaaagaacaaagtaaactcaagaacaaggcaggaaataaagagcagaaatcaatgaactagaaaataagcgggaaaaaatgaaccaaactacactgagttaacaatgttcacctataaggtagtccctcacttggcttctcttccctcaatggacaacacacccaattggtgagactctagaggagaggaatggacacactcacatgttgtttattggaatgcagagtggtataacctcctataatggggttttgtcaacatcatctttgatctaggaaatcctaccttaggagtatgccttaaagatagaatggcaaaaatacaaaatgacatatgcacaaggatatattcattgcagcattatttagagtagcaaaagattgaaacaacccaaatatccatctgttagggttctgattgaataaaatggttcatgccccaagtgggatattatgtaggtataaaaatcaaaaacaataccttttaagctgtgattgctactgtacattttgttaagtaaaataataagatacagaacagtgagtaaagtaggctttttatttaagtaaatatatttgagtatgtgttcatgtgtatatctatgtttctacttttatttttttttaaaaaatggaattaacccaaaactaatttattatagggaacaggtatagaaggactagctagaattctccgaatataccttgttttctagatgtgactt

SEQ ID NO: 7717 - DNA, 1041 bp, Homo sapiens
tcctgaatttatgcaggcaatgggcttgtttggttttcctttgtattacttataaaatgtagtttgttctgataacgttcttataagattgatgatattaatctgtatatatgcatatttgtttctctcctgttatatatatgtcctttaaaaattggacaccagaaactatgtagcctcattgttttactcatccccttcatttattcagtccactgacagtaagttcctaatgtatgtcaggccctgagaaatcaaatattgatattactttttactactagagttactactttcacaggaaatgtctgctgcattttcttattagaattattgacatctatagaattaaaaaatacatcttttgcttttttgtctcccatccatattgtcaagtactgtttccttttaaatgtacatgtggggctgggcgctgtggctcatgcctgtaatccccgcactttgggagactgaggtgggtggatcactcaagcccagaagtttgagaccagcctggccaacgtggtgaaacgtcgtctgtattaaaaatacaaaaaaattagctgagcttggtggcgcacacctgtaatcccagctacttgggaggctgaggcatgagaatcgcttgagctttggaggcagaggttgcagtgagctgagatcatgccactgtactccagcatggacaacagagcaagactccatctcaaaaaaaaaaaaaaaaaaaaaatctacatgtggtattaaagtagactcaggtttgaattctgactctcccatgtattagctgtgtaacagataaatcacttaatctttttgggtcttgagttctcatctgaaaaacatatttaatacctactttataggatttaattgagagaattgaggtgctaaaaatgaagtgagagaatgtacatacatgtgttgtataaacttcttaaatttaaaaagttatatgatggtagtatttttataaggattgctattcacatatttatccttgcactctgtttgaaatataattgtagttatccttgggag

SEQ ID NO: 7718 - DNA, 1033 bp, Homo sapiens
agatattatcactttctttcacctcactcactcttcatttccttcacagtattaacagtaaccttttctgttacattttgttaactttagaaatagtagatcatgttagactaagtagagatcacaaaaagatgagatttaggagaaatccatagatgttttgaactgtggatgaatagttcaccaactatttcctgtacacaaaagccatgcaatatatgtgattaaatttgtgccttggtgaaataatatgttatatgtcactgtatgtattgtggggtcatttataaatggttacaatattttaaagtaggaatacctagggtctgcttgtcgttagttttctgtgatagatattcgacagtgcttcctggcatttaggaaggggcagtgagatcttttaatacatctagagaagacacttccttatatgatcttttcatttattcaaatatatatttattacttcctctgtgccaggtactgtgtggctgagcagcctagacttgattctgtaaaggaaattaaaaatcccaggacccccagactccttatgcaaaaggaaagttaatcctggagtctgagtcatgcaacacactctttcaagtgagtagctgttactaacattatgccttaaccagatcctcatgtaaaagtaaaagacctcaggcatctatgaaagacttcccctacagatcactgaaaagcaaatgcttcgctggtctcccacaaacagatacatgccagttgtaactttaggtgtacaatctaagtgaagctcctaaaactaaggtctgttctgtgccacactgataatgtcatttacaatcttaccttctcagatgcagaacagagacaagaatagtcattcttccactgacccagagatgtctgcagaattgatttttcctttactctgtttttccttcattcacctaatattatgtaaaatatagtttttactagataccaattaaaatctcacaggaatttaaccattcacgttactgcctacctgtccctcttcctacat

SEQ ID NO: 7719 - DNA, 1434 bp, Homo sapiens
gattttttaactgacatcgttaatctttgatgaattcatcattcatttccctacagtcactcatctccagctatgttcagctgattgattagatacagaaacaaagtaggtggagagttggatttaatgatgattggggtttggctggaaaactaagatgcattcagagatgggcaaatgaattactctaatgatagacctaggattttacatttggtgagcaaaaaagtgagaaaatgagagatgaatagcaatgaaatggtgttgagatcagtgaatcttaggtccaggggaacttgaatgtgaaaaagaaaaataggaggtagtggcatgagagagagaaagatgcttgaaatcgagatttttgagggattgctgtttggggccatgataagggtctaagataggatttcttatgtctgaaaggataatccataggtttatattgcctgagtaaagttaaagatcctctggtctagagtatgccatggtaagtcagtggttgagataaggttgaggacaaaatcattaaagaagaggaaatcaaagaaatgagaaatggaacaattaaaacagtcatcactgtggatactgaaatcaccagaaatgattattggacagaaactaggacagaaataatattgaatggcatgatgaataacattttagggtacgcatgagtgtggtggatgactggttgatggtagtaggttagtataatgtgctgttcagatttcaaggtactgatttttagagatgagaggatagaagtctgaaaatcatggtagaggaaacagctacaccaccatacaagagagctagtaagtagcttcaaaggagattttaagagtgattttaacttggggaatttaagagctggagtcattgtttacttcactgtggcacctttgaaactgttacattaacataaggtaattgaagaattgttattcctcttgtattcaactgaatatttatggttagcttacagaaatttgcagttgtgaaacagaacagaaacttgtgttgaattcggctactacttaaatatgcatttttaatactctttaacacctcctccctcctcatataatctctcaaggcctgtgattacatattgcatattgaagtcacttcttttttctctttcatagatattaatgccttccaatgcactgttgttgatagaatataaaactatgaggtaaaaatatctcagggttttgcctttctttgaatatagaatctaacctttccaccatattgggtatttatttagagagggtactcaagtattttgccacactcttttttagtttgtttgtttgagacagcgtcttgctctgtttcccaggttggagtgcagtggtgcgatcttggctcactgcaacttctgcctcctgggttctagcagttctcatatctcagcctcct

SEQ ID NO: 7720 - DNA, 1049 bp, Homo sapiens
tgttttgaatgtataaatatcaagtattgattatgtatgtggtcagtgttgtaggctaacatagcatttaagaagtaaacccgttctcaagaaatttctacttctagtggagagagttgatgaatattcagcggttgattcatactactgtatacagttgtatatttagaaacatgtttgttatttgttcccagttcctggcacagagcttctgatacccttggactctcccgagtgataggggtgatagaagtgtcatttcttctatgaggcaacccttggtggacttctagataacttcagggtatggtctggtcaccaaaaagaccagaccttgaatagaagcttggaacactctcatctccatgacctaacctctggggagtggggagtgactggagatagagtaaattaccagtggcatatgtaaccaaacctctataaaaggtttgcatatgtaaccagacctctataaaaacctgtcaaaaggctgggagcagtggctcacgcctgtaatcccagtactttgggaggccaagttgggtgggtgcctttgagctcaggagtttgagaccagcctgggcaacatagcaaaaccctgtttctacaaccattacaaaaattagcggggtgcggtggctcacacctgtagtcccagctactcgggaggctgaggctggagaatcacttgactcaggaagaagaggttgcagtgagccaagatgctgccactgcatcccagcgtgggtgacagagtcagaccctgtgtcaaaagaagaaaaagcaaaacaaaacaaaaaaaacaaaaccctgtaaatgatgggatttggagagctgagagggtgacaccctgagagagggtgtggaagctggaagctcccttacttcctacctcaccccatgcatttcttctgtttggtggttcttgggttgtatcctttataataataatctagtaagaaaatgctttcctgagttctgtgagttattgcaccaaattacctaactggaggagggggcctgggagcccccaattattgctggtcagt

SEQ ID NO: 7721 - DNA, 1022 bp, Homo sapiens
tttgcctcctgggttcaagtgattctcctgcctgagcctcccaagtagctgggagtacaggtgtgtgccaccatacccagctgatttttttatttttagtagagatggggttcaccacctaccttcccctatggttgacatactgcaactagatggacaatgcacttatactgctgattccttttagttgtgatattgatgccacaaaaccatagaaaataagatttgatcacttcaggttataaactgttacctttattatttctgtccatctaagtaatttggaatattatgattcatgttagagtacccagcagatgtgaaggaaaatatataagcttagtgaaattttgactggtcacttaattgttcattgggaaatgaaagaggtctagaatatgttgaagtttattacagacaaaaataaaaatgaaggggaatctaaatgcattaacattttgtaccttttaatattatagtttttttcttcctctgttccaaagttttccagatactgtagcctgctttttactatgttgataaagaggaggtgtctgagaagctttgtagaaataatgtgggaacatggagaagaactgaattgaggtcagggaagctataaacctttgagtgcttttgtgatgtgatgtgctctatgggaggctgtgtatgagttcaagcttgagaaacttgcttgataaaaatgtgactattaacacttactgttccttcctcttgttaagagtctcttgagaagatgaatttttatttaaatactgttttgtcttttttttttttcctggttataaaatgcttacagatattttgtccttagagttatacctatccctcacaaataacctgaaacataaatataataacagagtatgtcacaaagataggaaattcctggtgattccagagaaactggaatctctagtttgtaaggaaaatagtctctatctttggcttctttggcttgtaaagtgcttggtattatacagattgtccccagtttgttg

SEQ ID NO: 7722 - DNA, 1061 bp, Homo sapiens
tttttgttttttgttttttgagacagggtctcactctgtcacccatactggagtgcagtggcacaatcacagctcattgtagcccggacctcctgggcccaagtgagcctcctatctcagcctcccaagttactgggtccacaggtatgtgccaccatgcctgcctaatttttaaattttttttgaagatggagtgtccctttgttgcccaggctggtctcaaactggcctcaagtgatcttcccacctcggcctcccaaaatgctgggattacaggcaagaaccgtcacacctggcctaactttgcttggaattgtgtacagttttatagactaatttaggaagtatgaatatcttttcattactgagtctgcacttcaaataacatgtagtatccctccagctattcatgtttgatttttttaaatattctccagtggatatgattttcttcatatacgtcctgtgtttgttaggcttattcttagacactatatattttgacacttagatgtatattgatatatgcctgaatcattaatacatatcttttactcatttgtttcttcagacacaacttttggaataaaaataatgtgatctttcttttcccagtatatatttttagctcatataatagcttggtagcttttttcattcataggcttaataaagttacagtagactttatatatatgaaaagtgttataaagaaaaagtgaaataatgttactagcttcttaaatcttgcctaaagttttaataaactgttcaagatgttatttccttatcatgtcttttgttttatcattatgatcaatggaaatataatatttattttacagaatttcacttttagattgtgtaccagttcatcttcaagtgaaactgtaacaaaaaatttctcattcaaaatacagatttaaaaacattttagtgatgattatttactatacaaagcaagtatatattagaatcctttacattttattttattttattttattttatttttgagacggagtcttgctctgtcatcaaggctggagtgcagtggtgag

SEQ ID NO: 7723 - DNA, 1029 bp, Homo sapiens
atggctgagtaatattccattgcatatatataccacattttatttatctaccaaagggtagaaggattgcttctaccttttggctattgtgaataatgctgccatgaatatcagcatatctatttaagtccctgctttttacttccttggggtatgtacccagaattggaattgctggatcatatggtaattttatgttttgtgaggaaccactgcacagttttccacagtggctgcaccattatatgttctcaacagcaatgaagatggattccagtttctctacatcctagtcaacacttactatttcctgggtgttgtttgaaaatagccatcctagtgagtgtgaaatggcatttcattatgataattttcccaatgattagtgatttttgagcatcttttcatgtgcatgttcacaatttgtgtatctcctttggagaaatgttttaagttgttcacccagttttgattcagcatgttttgttttgttttgctttgttataggagttctttacatattctggttattagtaccttatcagctaaatgattagagatatattctctattctgtgggttgccttttcacattcttgataatgtcttttgatgcataggaaaattataaattttaatgtagttcaatgtatccatcttttattttgttgttggtgcttttggtgtcatttcccagaagttgctgccaaatctaatgttattgaagctttcctgtcttcatttgcttctaagtcttctatagtttcagctcttgatttagttcttctatccatttttagttgacttttgtgtatggtgtaaaataagggtccagctttattttcttacatctgttaatctcattttctcagctccatttattgaaaagactgtcctttttccattgaatagttttggcacctttttcaaaaattatttggccatatatgcaggggtttatctctggtctctgtcttcatctgtacagttgtctctcagtatcgtgggggattgattagagcccccaaa

SEQ ID NO: 7724 - DNA, 1035 bp, Homo sapiens
aaaggagaagaaactaataataaatatgactaaagttcatgattgtcaaccttttatttcttgtattccagtgtcccagtggatagggttaagctttaacgtgcagaattgtggaggaaacatgtttgaatggtttttttctagacctcatacccagatactgtgatcttagatatggagtataggacaaaaatctgtactaaaatttattaacttttttgactgggtaccacagaaacataaagaagtatattttgaataatctcactcccacacctgccccgatcagcctagtttaatctgcatctcttttaaataaccatttttgttaatttcttatgttttcttccagagttttttgttaaaaataaagatgtgaacggatgcacgtagtcttattcctcccaggcatatgtaatcaagctgagcataacctaaaggaaaataaccacgttataggtgttgcgatacaatacaacaggaactacacaattcaacttatgaagtatttttgccaagaagaactgaacctgaatataatgaagcttctagattctgacagcagtttacaggacatatggaggtagaggaacatgtgaaactacaccatgaggatacagtcagccatattcattatgtggggaattacagagctgtgcttttcagtatggtagccactaatgtgtggcacttcaataaaatgaaaaatcaggctaggtgcagtagctcatgcctgtaatctcagcactttgggaggccaaggtgggtggatcacttgaggtcaggagttcaagaccagcctgggcaacatggtgaaaccctgtctctactaaaaatgcaaaaattaactgggtgtggtggtgcaggcctgtaatcccagctactaggggggctgaggcatgagacatgagaattgcttgaaaccaggaggtggaggttgccgtgagctgagatcgtaccactacactccagcttgggcaacagagtgagattccatttcaaaaaacaacaaaaaaattagctgggtgtggtggt

SEQ ID NO: 7725 - DNA, 1037 bp, Homo sapiens
tcatccatacacccatctatctacctttctttgatgcttaggttgattgtatttctgttttcaagccagttctgtctaaagtgtaagtatttaataaaatatgtctggttttttcaatagagaaaaggacaataaaaaatcatactgtgtattaaaggccaaacccataaatttgcttgtatttaggggatatcctgggaatgaagagtttaaactgttgaaatgtgtatcagctgatgttattttgcaaaacttctgtcttaaatatgaataatattcatgtttaggaaatttaaagtgatttatgatttcgcatataaataaaacccctttttgtttttgggtctacacatttctgcttagttttctcatttaagtttcttatttagttggtagcattacatttccttgtatgtttctttatgtcagtctgacatttatattgtcttgcatcattattaaaaatgctgatttctggtctgtttacaaaatgttgaatgtatgaatgaatgaatgatttttacttcattggtcaatacgatcttgataggtttactatagcaaaattggtttttttggtaggtagaaagacttctatgtctgatgtaagtatgccaactatttttcacactcgaatttgttattgctattgctggtaaagacttgaatataggaaaatgacgaaattgccccaatggtgggacataaactcgtgcagttactaccactagctagttttaaaagaaggtgatgatcgcccagtaaatgttgttaattgtgtttctgtgtaaaattaaaggggctgttgttttatatgatcttttgacccatcatctatatgttctggcacatattttaaatagggtattccaataatttccaataattttaaatagggaattcagtaagttccagtaattttaaatagggaatgttttcattcattagaataattgaactatagaaattttaccatgtgaaaccttatcgtctttgtatagggatattattgcatgtgaaagtaaaaatgttaacta

SEQ ID NO: 7726 - DNA, 1053 bp, Homo sapiens
cactgtagtcaatgatatggttaatgcggcatgtattaatattgactcgatatcgcaaaataggtgtgttttgctgataggtatttctaacagaaaatagaggtagttttgaaggttttggctggttattttcgtatagaaatgtataatcttccttaaaaagtattggtgatgttagtggttctaaaaattatggcagttcaattcagtaactatttttgtttgtgtaaaaggctgaggtaagaggattgctagagcccaggacttattaagagtccagcctgggcaacataggtgagaccccctcatctgtaaaaaaggaaaaaaaaaatttgtatatataaataacttaattgctctcttagttgggaatttaagtgattaaagagttaagtttgcatatgttagtaaggtattaagctggatattaaaaaataaattatctatggatggtagagattgactggaaagaataggagtttcttcaggtgatagaaatgtttcctatcctgattgttggttacacagatatatatatttgtcaaaactcgttgaattgatactatctttgcgtttcaccatatctaaattttaccaaaaaaagaaaaatgtatgttgaaccatacctatgtgaacccttgatgagtttttttaatctgtctttatttgaaaatttgaatattaatttagtttttttagcctagaatctaccattttagatttattcccagattttcttacattcacatttcttaaacgaaacttggaacagtttagcattaacataatgtaatattcctgttcgactttgattactgcagagtagattttaagttacatgaaattaggctaggcacagtggctcacgcctgtaaacccaacactttgggagactgagatgggaagatacttgagcgcaggagttttgagactagcctgggcaacatggcgaaaccctgtccctacaaaaaatacagaaattagccgggcatagtagtacaatgcctgtggttccatctactggggcggctgaggtgggaggatcacctgagc

SEQ ID NO: 7727 - DNA, 1035 bp, Homo sapiens
ttacaatgatgtttaaaaactgttatttagtactttggtttgtattatattagtatgtattaatattagtaattagtatgtagtaatattagtattaatcatatgtatatcttctttgagacctttgagaaatagcatatgctgaagtctttctaacaatatttgttttgctaagcaagattacttttgtcagtcctttaacattttgggggtttgaacctaccacgtgacaggaaagcatactttgctccttgctgaattacgtgtgttcttgattataaatttccttcattatataatacctagcttcattggtgaggaagaacatagatggagtatatggttagcatgcagagattttgagttggtattactttttagtttagattttacattggctttccttcatttatagttttaatacaagtttagaacctcctttacttaatgaactttcatggatataaacagaagacttttaccctgctgctattaacttgtaacaatagtgaaagcttgtaagattaataagaacacgacccttttggaacctaacctgtttgcaaagtgcagacttgcatattttaatggtagttaatagttggagcgtttatgatagggatgatgaacagagaaaaagtgcagtgggacacgctggcaagactcttactgtgtgctcaatggcaactttccatttctttatttcttgtagttcctcactcagcagattaggaattttctgatgctttgtgtattctttctaaatttttaattttttatcattaaaaatcaaccttgtttttaatagagaagagaatgttgaaaagaagtggtacattcctgtgcagccagaatttaaactggaaactggataacagatggatagaaagtacaattagaaggcccaatagagattgcttcacttcctccttcatttcttttctatcttcctttttttcttctctttccctccttccatggcatcaagaagatagtcagaaagttatgtttgtatattggctccatcaaggatgt

SEQ ID NO: 7728 - DNA, 1033 bp, Homo sapiens
tgtagtcccacctactcgggaggctgaggcaggagaattgcttgaacctgagagaaggcggttgcggtgatcctatgatcgcgccactgcactccagcctggcaacagagcaagactccatctcaaaaataaataaataaataaaaattgaattataaaattcctaaaagaaaataccaaagaatacctacatagagtatttttaaagcatgccttaaggctgcaacataaatatattagcatatttggctatatatgaaattttaaaacttgtgaatataaaaagaaattgcagggcggggcgcagtggctcatgcctgcaatcccagcactttgggaggcagaggcaggtggatcacttgaggtcaggagttagagaccagcctggccaacacagtgaaaccccgtctctactaaaaatacaaaaattagccaggcgtggtggcacatgcctttaattccagctacttgggagactgaggcacgagaattgcttgaactcaggaggtggaggttgcagtagctgagattacgccgttgcactccaacctgggcaacagggagactctgactcaaaaaaataaataattaaataaaaaagaaattgcaagtgggggaaagaagcatccatgcaaatttagatataaaagcaaatgaagcaattgcttttaagataatttttgtagctagaatagttgaaattattaagaaattattatatataatatataatagttgagataggatttttatctattatagatgaagaaggtatataaggttaaaaagtgtcaattcaaaagtttatttgtaatgtagaacattgcaaaaattcttccatttcaagttagttttgatagactgtttgtttgtttgtttgtttgttttgagactgagtctcactctgtcgcccaggcttcagtgcagtggtgcaatctcagcccactgaagtctcttgcttcccgcgttcaagtgattcccctcccttagcctcccgagtagttggcactacagccatgtgccaccatgccca

SEQ ID NO: 7729 - DNA, 1031 bp, Homo sapiens
atatggtatctgcaataaatgtgtttgtacatattgtcatattctgttaatatcaccgtaatttccaagtgaactttaaaaaactataagggatcaattatttttcaaatctgaaaattttatctaaagtttaaaaactatttcattctacagctatttatcagctaaagaagagaacttcatttattagcagtacctataatacaaggaaatcctatttagttcctgaagaaaaatacttatagtttctcagcaggtagaagttgaatttagtaaaaacatttgaggattcagtctatgatatgattagcctaattttataatgtcaacacatgagtggcatttgtaaaatttacaaataatgatacttagttctgatgagtctataatgtggttatgttaaacataatttctcttacatataaatatgaattatatggtaggcgatgaaaatgcttaccatttcttctccagaaagttaatatcctgtgatatagaatgaaagtaaggaaaggactgttgttggtagtcacaaaaaggaactttttcttcctttgtagttatagccagagtcctgggctttctcatttgccatttccattttttttttaactgagtgatataacagcaatgtagcaaaaataagtttgcatccacagtgctttctgtcagaaatggtgcctctatctataggcattcaaactggctgtgatgaataatagttttttttttttttttacaatagtacttttaaattgtcaataacatccactgaaggaagctttaaatgcgttggtcctgtaaccattgtgctcacagctttcattgctgccattctagggtgccagtccctggagttgtgttggctttataaaactatagtttaggccaggtgtggtgtgtcattcttatgatcccagtgctttgcgaggccagtgtgggaggatcacctgagccaaggagttcgaagtacagtgagctatgattgtaccactgcactcaagcctgggtagcaaaatgagactgcctca

SEQ ID NO: 7730 - DNA, 1945 bp, Homo sapiens
aggctaaaatttttcttcccatgattaatttcatcaaactttgttcatatcagaaggaatctttttatttggagtttccgcttgactttgaaagaaaaagtgccagcctgggcaacatggtgaaacactgtctctacaaaaaatacaaaaaattatccaggcatggtggcatgggcctgtagtcccagctgcttccggggctgaggcgggaggatcccttgagcccaggaggtcgagggtgcagagagccgagatcacgctttactccagcctgggtgacaaagtctcgaaagagagagagagaaagaagaaagaaaaagttataatttactctatatgttgtttaaaggaaaagtttctctgtaaggaaaaggaatttctgctaggttgcattccccccgctctgcccctcttagtttagaatgaattctgttttgtgctgacaaatagctgtttctgaagttggcaagaaaatttcctcttgggactccactagaagtgttgtagtagctatctgattcaactgcttagaaagctctctgaaagttgccttgtttgtctggaaagagtgaggagcccaaacctgctttttccctggaggggggttgtagctataagctgttatgggaagaactaggagggattgtgtcataacagtatgaaattgagcaataccaaggcataattaaaatttcatactccaaagcaaattttcagacacaataaagaagggctcttaaagataggcttgggtagtattttatactcttatccaccttcttaggagatagaaaggaaagaggaggaagattttccttttcttcattttctttttatttaaaacagtccacaagtaagctgactgccttatgcgagtcattatgcaagaaaggaagggggatcaagagttactggtgcagattccatcttactataaaataaaattgtgggtctttatgtaatatcttattgaatactaattgttttatattaaaatattacatgtaaatattaagataccccatgaaattattttgaatcagatcaagtggcaaggagaaaagagtcagtagttaagaataactgggggagggggtgatgaaaaagaaaagttataatagtaaaatgagatgaggaaggtaatagaaaagttggaagcagagaagttaagtaaaataactatttctgttttctccatctgccatcttcattctttgccaacttttaggccaccttgaagagattaccttgattatcttgcccacacactaaattgtgtgaccacagggcaagatacaacaattcgtcatctcagttttcttatttctaaggttagtaaactagtacttagcacatagagttgttgcatggattaaatgagctatctatagattgctcattagcgtgcttcgtgcatggtaggtgctcagtaaatgttaactgttatttttgtcatcactattgttattaatgcctcctttatttattcatgcattcaacagatgtttattgaatgcttatattggaagttggtgattaaacaaaacaaagttcctgcccttcttgagttcctgccctcaagaagctttcattcactcttgtgaacaagacagttaataagcaagcaaataaataattaggctgggtgcggtggctcacgcctgtaatcccagcactttgggaagccgaggtgggtggatcacgaggtcaacagattgagaccagcctgaacaacatggtgaaaccccgtctctattaaaaatacaaaaataagctgggcatggtggcgcgtatctgtagtcccagctacttgtcaggctgaggcagaagaatcatttgaacctaggaggcggaggttgcggggagccaagattgcaccactgcactccagcctggcaatagagtgagactttgtctcaaaaaaaaaaaataaaataaataaata

SEQ ID NO: 7731 - DNA, 1028 bp, Homo sapiens
ggcattaggtggggtcatatatagtcttcatttgtagaaggagacacaaatgatttgggacagaaactgaggctatcacagctcagaagaagtaatgaaacttgtggaggaaagctgaagaagactcaagtggcatggagtgaggttagtggagctccatgtctctgaattcaagggactctcccacagtctgcaaatatttagaaataaaccagagacctttggaagaagaagagagtggggaacaaggcagagatcatattatgtgtgttattgtgggggatgacttggaagaggagagctacccctaggtagtttctatatttccccaattatcttatttttttttctctttttaaaaatagttcaagttgagatcaaaataaagtctgcatagtatgctggtcttaaattttttaagtttctaaagtttcttctgtcttctcccccttctctgtcctctgttctctttctcttattttcttgtacttttttggctgaaaaaaataagttatttatcctgtagttttcctcagtcttgattttgctgattacatacctgtggtgtcatttgacatgttcttcttttcctatgtttcctacaaatgagtggttggatttagaggcttgatcatatttaggtttgaggtttttttttttttaattttttttttttttagtgcaattgcctcacaagtgatattgtgtatatccatcagaggaacataatgtctgttagtagcaattggtggtcattgcttagatccattaagggttgaaagatgttgatatccttttttaaaaatataatttcttctttaattgctaaaatattttgaaataaagaacttttcctctgctcactttttgttacactgaggtatactttaaatagtaaaggaaggataaatgcttcattctttccctttctcaattttcttcttcttttttttttttttgagttaggagttgttttttttgaggctggagtgcaatggtgcgatctcggctcactgcaacctccgcct

SEQ ID NO: 7732 - DNA, 1026 bp, Homo sapiens
tcacatcccacaaatactgtatatatttttttttttttgagatggagtcttgctctgtcacccaggctggagtgcagtggtgcgatctcagcactcactgcatcttctgcctccttggttcaagcaactcaattctcctgcctcagcctccggagtcactgggattacaggcgcctgccactgcgcccggctaatttttgtatttttagtagagacgggatttcagcatgttggcctggctggtctcaaactcctgacctcgtgatccaccagccttggcctcccaaagtgctgggattacagacgtgagccaccacgcctagccaaatactgtattttctatctgcttttagtaaaaagacatctgcatataagaggacccatgcagttcaaacccatgttgtttaagggtcaactgtataatcaatatgccaagaaaagggagaaaatgaaatcatataatgtgctcagttaaaaccacaaaaggcagaaaaagtgtaaaagacggaaataggaacaaagaacaggggccacacacagaaacctgtaataaatatgatagatactagtccagactatatcaataatcactgtggttaaatataccaattaaaagacagagattagtagagtgaattaaaaagcaagacccaactatatgttatcaactagaaacccactttaagtttaaagacacaaagattaaaagtaaaggaatggagaaagatatatcatgctaacattaaccaaaataaactgagggtagctatattaatagtagacttcagagcactgtacgttatcagggataaataggacgtaatgacaaagggtaagtaatccaagaagatacaacaattcttaatatctatatgcctaacaacaaagcatcagaatatgtgaggcaaaaactgatagaactacaatgagaaatatatgaatgtactattataattggacactttaacactcctgtatcagaaattgacaactccagtagacaaaaaatcaataaagacatagttg

SEQ ID NO: 7733 - DNA, 1202 bp, Homo sapiens
ttctcccattctgtaggttgtctgttttctaacttgatagtttcttctgctatacaaaagctctttagtttaattagatctcaattgtcaatttttgtttttgttgcagttgcttttgaggacttagtcatagagtctttcccaaggtgccagtgcccagagtggtgtttcctaggttttcttctaggattcttatagtttgaggtcttacattgaagtcttaaatccatcttgagttaatttttgtatatggtaaaggtaggcatccagtttcattctcctgcaaatggcttggcagctatcccagcaccatttattgaatagggaatcctttccccattgcttatttttgttgactttgccaaagattagatggctgtaggtatgtggctttatttctaggctatgaattaaaaaaaatataggattaacatgcaaaaggctttaaaggaaaaagtagacaatatgcaagaacagatggataatgtaagcagagagatggaaattttaagaaagaataaaaaatagtaaaaaatattgtaacaaatgaagaatttcattgataggctcattagtatactggacttttaaaaatctctgagcttgaggatattacaaaaagcttccaaaactggaaagcaagaagaaaaatgacagagaaaaactccctcagaacagaatgtgcaagaactgtgagacagctgccaaaggtgcaaaatatacataaggaaataccaaagcagcagaaaaaaagaaaggaacagaagcaatattttaagtaataactgagaattcccccaaatgagtgtcagatatcaaactacagatccaggaagctcagagagcaccaaagatggtaagtgccaaaaatctacacttagccacaccatattcaaacttcagaaaatcaaaggtaaagaaaccatcttgaaagaggccagggaggaaaaataccttacctatagagaaactaagataaaaattacatccaacttctcagaaatcatgcaagcaagaagagaatagtgaaatatttagtgttgagagaaagaagcccaccacctagaattttatatcctgccatgttgtgttacccttccaaagtaaaggaagaataaagacttactcaaagtgaaaattgagggaatttgttgcaaatccgatttgtaagaaatatgtataaaagacttaaagcaaaaatt

SEQ ID NO: 7734 - DNA, 1045 bp, Homo sapiens
atactctgacttgcatggaagacaatcaaaggacacaacagattatcctaaattattttcagttctcagtcaataaattgggtaatatttcattatttaagaaacaagctcagaagctactttctactcttgggttaggttcttttcgcttattaattcatgtcaagactttttatttcaggaatttgagtaataatttgcatttaactctgaatcttttatttttggccattattcagcattatttgaggatcaggtgtgctgcataagcaccagttttttggcgaactctcttgttcaataaaactcaaatgaatttgaatatcattcagatcccttcatgaaaggtcctgaaatagctttacagcctttacttttactactttcacccccaactcctaatgtacccgttccctacctctcttctttcagccaacctgtattttcatgctcagtgcttttgcccagatttcgtttttcccttaacactttgctccccattctgtacctatcagaactctcatttttcagtggcctgtgccatgaagacatccttggttttcctcagggacaattattcctaattttgtctgtgctctcataatttattacttgaatttctatttcttatctgtgtcattctgcctctaccatgtctaatgtactgaatggtaaaatgtttgagaacagacatggtgtattagatttctttgtgttttccaactatctagcctcagatagggtaaacgtccaataaaaatttgaataatgtttgtgaaatacagtcactctttaggcatcagatttaaaaaatttcagccacgtacattggaagtctcttaaaaatgtctttcttgcctttttactttggaggtcatcattgtgaatattaattatttcagctaatcctagtacattaatgccttcaggggttgctgaaggcaacctaggtaggatggctggctgctctctgaaatgtccctagactgctgtgcgttaagtttcattttgtatgcttattatatcttctgcctcttccacattt

SEQ ID NO: 7735 - DNA, 1027 bp, Homo sapiens
ataccctgaatcgtctccaaggcccttcgtagcttaaaaaatttactttctggctgctacagatgcgttgcttatgtcttttgtctctgaagatttgattttacctcctgatgagctgttgaaaggtagtagctcttagattgagtataaaagtgacatctgtctcttttcaaagcctcagaacttttgtatgcatctgggaagctctgtcccctgcatagtttcaattacaatgagtattcttttcattttggatcttagcaaagacttttgccactgtgtggctgtgtgacagctgctgtacacccctccagtggtggttgacgtgatttctgcacctgtcttatgcttaaaaatattggggggagaaaatggacccagcatgctggaaaatattgacttgtttcccatattaggcttagctgctgaatgtcacggatctggaatgagaggaaagccagccaatttgtcaaggtcactagctccctctctgaaaagtgctctgtttatctaaagagttctgagacagggtcttatgtccattaaagatgaaggttcactgttattttagggctggacttggagatgggctttctgaaaaatgtaaacaacttaatcaggccaggtgagatgagcctatctctgtatgcatcccctacctccactttctgtcctctagatcccttcccagtgtagtattaaatgtttcacatgctaaaataaatattctgaacaaacagcaggtcaagtaatccagtttcctttttgggaaaaaaataaatcacattcaggattaatggagaggaacaaaagccaatagtgtggttaagaatttggattcaggagcaagaaagacttgggttcaaattccatttcatgccctatctctgtgatcttcaatatattacttaaaatttctatgcccagtttccctatccggaatatgagtaaacagtacctatctcatagatttgtcgtaagaattaaatacgttaggggacacattattgcaatgcctcaaacatag

SEQ ID NO: 7736 - DNA, 1043 bp, Homo sapiens
tataaagatggatgattcctttttaggagcagtgggagattaaagggtaggcattactgcaagaattggtgttaactgttctttaaaaaaaaatcattgttaatgatctggcagactgaacgatcagcacatcaatgactgaggaaagatgtgagattcagagtgttacagcatcacattaggcagagaaatcattgaaataaaccctatactagaagaaattggaagagctaaatgacatgcagcttaggaggaaaacctactccctcagaaaagatttttttagatcatttctttctgtggaacaaataaagggtttcagtagcatgttttggctaattgagcagaccactattattgctgtggttctgtaatcattttgctagagaacataggagaataaatctctagtgatcagagaatatatgaatgatgtagaaccctcaggccattttcataccattcatcatctgtgggatgttgccatatctggtgttcttggcacacttcaagtatgtgagctatagggagaaaagttggaaatggacccagatcttattgcacagaaaaaaaaaaaaaaaaagaaagaaagtgagccttgaggcatgaaatctcccaagagctagccctcacacctgcaggtaatttatatctgtatttcctgacttgcttcctcctatttaacactacttcttccactttgcttttgtactattccaccggttgctgattcctcaggtatggagacctagctgctcagttttcacttatttggctcctcttttatagcgttcgaatatattcaaatttgttacaggaaatatagttaaaccctctggtctattgccctttaactacctcctattcctcacatttccattggaactaaattaactctcgttgactatctaatcattgacaactgacaccatggacttctttgttctgaatccagcaaacattttcagtcctactcttccttctttttctatgacaatcaaacttgctgaccacctcttttttttcctctaatagtttcccca

SEQ ID NO: 7737 - DNA, 1226 bp, Homo sapiens
acagatcaggagtggatcttggtttcacaagcctgaagcttatacaatttgagagaccctcatgaagaaaaataatgcaaaattgtgaacataaaattagatgcaaaaatgggtagtacgagcattcctgtaatccagtcctacattgggaagactaacaatgaccaattatgcatagaagtaactgcaagccagagaaatattgcctcacccaaaccaaaggaattcccaaacatattttccttaaacacatcctagtgggtccacaggcactccagttcttgaattagaacttgtataccaaccatattttattaaagctcagttaatcaactcttatgtgatataaattccatgaatgggcgacagtatgtatttcaggctgtaggtagactacccttttattttctcagaggacataaaaacgtgacattgttctttccaatactttacaagcattcttcatctccacctcaacaatataatatacatatattacatgtggcaaaagaacataagaggtgaggcaagagtacagtattatgctcatgaggaaacacattatcatcagtgtaaataaaacctgaaaatattcctccttgaccagaattcccagtcaataactaaatctatattcatgatggattacacaacagccatttacagtggcaacttatcattagggatatggaggttgttggggaaatttaagacacccctgatatccttatggcttttaagaacctttgaggtacatctttcatcctctgcccactgttagctctgaggtctgaaattcccaagccttactcccacaaaaataccaggaaattcttacaaagaacaaagcccatggtaagtgatatcctattcatcttttctgaagcattgtctgccttcaaaatattgtgttgattatattttgggtcatgttaagtttttattgcttagaaaattttccataactttctagcctgcaaatggcattgtctcctttccagagctgcagttttcctttttcattatcttagtctgtttggttaaaacaacacctacctatttgctttgttaattatccctttggacaggaactgtgtaaagttctgttgtgaatctctgtccatgactgctttctgtgtctatagtttgactgctctctttttactctagcctcataaaatctttgcttaatgagtttgttccaataatatgaaaactcaatggga

SEQ ID NO: 7738 - DNA, 1048 bp, Homo sapiens
gttcatatatagcttttataagcaagtgataattaatggaacagacattttagttgttgttgaatcctttccatttctcttcccatcataagggccagcttcagatgctgttaggtcctaataacttcctggtgataaccatgtggcccacccatcccattaatttctgcttttattctgaagttattgaagaaacaagagtaattcttgtatatatttttgatgcttacctaataagatactaggctttgaagaaatgcaaataatgtctaaatgttcaatctatacagcttcaatattagcaaactgctatgaaagtaatgtttacacatttttttcacatttttgtaattttgagttcaatgttgaaccaaaatttcctgggactagaaaaaaaagagcctgattatgagaaaagaagagcaaaacaacagaagacaaatacaattgtagtgtaaaatgtactattttgatttgaaagtttacacgtgtactgaagaccaggaaacaatctgaatattgcaatacaaaaatatcttgcttttctcatttatctcagtttattcttaaaggtgttcatcaattactgttagatctagcaggctatttgaagagctattagtgtattttgaccctggaagaaaagaatacattttgtgctttagtgaaatatttattttatgtggttgataaacacttatagaatatttactcagtaccagttactgttttagaaactttatacatcatttaattctcataaccattctgtgagataggtgttattattatcccaggcttttagatgagaaaatgggcacagaggttaaataacttgtaaaagttcaccaagttgtctggtccagaacttaaaacttcaggctattttgcctctcagtgctgcattcattctaatctacttaagttgtattcatttaaaagactacaaattgcaatttgaacagggtcaatttatgattttttaaacttagcaaggagaaagatttaaatgtagaaagaggtggatgtatagtcatgtgttgcttaa

SEQ ID NO: 7739 - DNA, 1050 bp, Homo sapiens
atgactttggttcctgaccagaaatctctcacctgtcgataaatcaaagttgtaaggtagatttctttaataagaaaattttagtattgtcatgtcctagacatgacatgtcctagaatgcctgaagctagaatatccccatttttagcatataatatattcttaaagatttttcaaggtaattcatcagtcataaaaaacttagaagataatattttattgaaatgccttctttcatgatatgcaaactgttacaattattattttcctctttacagataaaatatagtaaagttatatatacatttatttttcctagaaattataaaattgtaagttcaatttatctaaaatagaaagttattttattctttataggtacaaattcagatatatatacatgtgcacacttacccacatacataggtaaggttggccacgtaatttgtggggcctaatacaaaatgaaaatgtgaggcttcttgttcaaaaagcaggagaaaggaactgtagctttcttacacagtctctcgtgacctatgaaaggttatttttgtttgctatttaatgttagatttctagagtatagaggtacttataaagtgactatataaagaggtacttataaagtgactatataaagaggtacttataaagtgactatatgtctcgtgacatataggtcacgagagactatgacctatgaaaggttatttttatttgctatttaatgttagatttctagagtatagaggtacttataaagtgactgcagaccctcacaggcatctgtggccccaccaaatgaccctgacccaccccagggtgtgccaaggcccccacaaggaataaagggtggcagtaatcactgggtgggagaacaggtggctgaggacctatcccaggaagtcactcggaggcaggactgcatatgagccaagacatgtgcttcattgctgcattggactacacagattcacaggtaaaattgttaaaaaattcaagactgtggtagcagagcatgaaaacccaagcctgggacccctgtct

SEQ ID NO: 7740 - DNA, 1032 bp, Homo sapiens
ttctgtattcccaatttatttttaaaaaacaatgtcacttttgtcagtaaagacttaaaagcaattttgaatgtgtgtgggaaaaaaatacccagaaaatttccccctaaacctgatttttattgcttgatttgtggtttaaagtattttcataatatttataagtaaaggtggtttcagcaagtatgaattccaccattttgtccacaggattagtggggagggattttgaattcagatcttagctttggtgctggatgcctttaacaaattgccgtaattgcttttcctttatccgtattttacttctctttggcagggtgaaataccagtttatcccaggtatcgtctgaggaaggtttggggagtgatctgtatgtttagattttctgcctaactttattaatgtggtatgaataaggagcttttttttttagaaaatgacactttatacaagtcagttcctctctattttctttatggacggtactggggtggcagcaggactcaccatgaaaactgtagtggtaactctgttcttctgactgcctcccatgatcctgtgtaggaagctattaagcctgtagttaagttacttccatttcctcttgactaaattgatataatgatagtaatatatgctgcgcttatctttcagtgtgtcagtcactgtgccaatcgctttatatgtacgaactgattaatctttacagctcctaggagtagatcttactgttatctccatttcacagatgaggacccattggagactgtattcaaatccaggcagtttaaatatagaaatatttaagagctgcttcatgctgcctcctacagcatggctgggcagaatagacacagaacattcagaaatttgagttttgggaaacatgcaggagagagatgtgacagtgagatgttgcctccaatatgaattgtccttgtcttctaaaaacagaatcctgctaaattaatgaccaacagtaatagcagctatacctcccagtttcccttgcagctgtaattatgctt

SEQ ID NO: 7741 - DNA, 1025 bp, Homo sapiens
ctataagggattttattgacaagaagaaactactccattctgactaaagaacatattgcaccctggaggatttattttccaagagaggctactgacagggatagaattatcttctttttggaggcctcccttctctcctgtaatcttctagctggcgcctaacacagggctctgcatcaaggggcttctcaatacatccaattgaatgactttgtttggggccggtcctgatgcccagaacgaaaaaacttacttttgattacctcgggagaattgctagtaatggccctgatttattctctctcttttttctctcttttttttttccccagctcttctaccctcaatgtttgattgcttgcaagaggcatgtgagccaaaattttaaagtttgcaaagtataaagaaaggaaacaagtaaatagggaaggagaataaatactgaacaagactgggcaaggtgacaagaaagaactactgtgaaaatctggaagagggccaggatgcaaaatgcaggggctgtgtagtttacaggaactatttagcctccagcatgcctcagcgatcacacagagaaaggcagatttctctgcttttgtctcctaccctatagttagctatggaaatttgacataggtgatatatgttttctgtcagcaaactgatacaaatacagaggaccatggggcctgtgatcaacaaatccaacgtgatttgaattgctaggaggggacctcttgtggctatagtgggaaatacttcagctaaatactaccttggaggctgcagatatttttatgaaggaattaaaaaaaaacccactataaaagctctttaaaattacatttcagatatttataatatttaattgttttgataacaccaaattctgtaagaaggttttatctgtattgcatctctgaagagttcagtgtaatttaaagctcttcagcttttatccatttaattcacatatcctctgaaaagcaaatgaaaagaataagagttctcatctacattttgta

SEQ ID NO: 7742 - DNA, 1047 bp, Homo sapiens
tcttttgttgcttgtgcttttggtgtcatatctaaggagctcttgcctaagctgaggtcacaaagatttattcctatgttttttttttcccagttttttatggttttaacccttacatttggatctgtgatccatttgagtcaatatttgtttatagcttaaggtagaaatctaaattcatgctttttatatattgatatttagttatcctagcaccatttgttgaaaagactattttttttcttcattaaattgtcttggcactcttgttgaaatcaattgactgtaaatgtaagggtttgtttctggattctcaattctattccatttataagtatgtctatccttatgttagtaccacactgttttcactactgtagctttgtagtataagttttgaaattcagaagtgtgaattctccaactttgctcttatttttttcaagagttttttttttttttggcaattctgggtcccttgtatttgcaaacagattttaggactagattgtcaatttctgcaaaaaaggcaactgggattttgatagagattatgttgaatctgcagatcagtttggggggtattatcattttagcaatagtaaatctttatgaacgtgggatgtcttttcatttatttagatcttctttagcttcttttgacaatattgtgtagttccttcttttgttcaattttttaaaaatattatattcttcttgaagcttttttttttttcttttgagacagagtcttgctctgtcacccaggcaggagtgtaatgacatggtctcagctcactgcaacctccgcctcccaggttcaagtgattctcctgcctcagcctactgagtagctgggattacaggcgcctgccaccacacccaactaatttttttttttttttgtatttttagtagagacggggtttcaccatgttggccagactggtctcgaactcctgacctcgtgatccgcccacttcggactcccaaagtgctgggattacaggcatgagccactgggtccggctcttgatgctcttataa

SEQ ID NO: 7743 - DNA, 1048 bp, Homo sapiens
tctactaaaagtacaaaaaattagctgagtgtggtggcgggtgcctgtaatcccagctactgtggaggctgaggcaggaaaatcacttgaacccaggaggcggtggttgcagtgagctgaggttgtgtcacagtgctccagcctgggctatagagagagactctgcctcaaaaaaaaaaaaaaaaaaaagaaagtaaacttcagactaagaacctgtggaatggtatttttgttactgatgtgcaaacttcaaggacatttggatattagaagaaggggagcaatttgtcctttgttaactaacatcttttaatgtctcaattttttttttactttatagtctttactgtttttccccatataataaaaataacataattaataaataatgttggaagaaaaagtttgcttttatctttccctgatagagaaccactattaacagttggtatattttcttccagattttttcaaagcatattttgacatcatattattatttcttaagtaattgtaaatggcatacatttaaaatgtgactgttgtaatacaaattctattgcaaaatatgaatttaaaataacctctatattttgaaggtagacccaggagttaaatcagaatgtctcgcaagacttccagcatcatttgctcctataagcttacaaaatgagatctctcttcccagaactggcaagtgtttaccttgtgtggctcatttgattagttgctacattaatggaaaaatataaacccaaactcacttttgttaaatgtggtgaagtggatggaacaagagaaaggtcacattataggaaagataaggtttcttttttctttctgcttatcaactgttgttgagggacttacatcagaataattctaagcagcttctttcattctgggaattctagaaagcgaagccaacaatgatgtgaaaagagaaggtgactcacagataaatacataaatctttacaagccccacatgagtagcaactggcatgtgcatccttggtggtaatttaataagctttttattcctgttg

SEQ ID NO: 7744 - DNA, 1050 bp, Homo sapiens
ctcggtctcccagagtcctgggattacaggcgtgagccaccgctcccgacccctggcccaaacatttctttaggattcatattaactacctgtctgaactggagttaatattaagataggtgtcctagcataaaattataaaaatttagatcgggctcggtggctaatgcctgtaatcccagcactttgggaggccaaggtgggtggttcacctgaggtcaggaacttgagaccagcctgaccaacatggtgaaactctgtctttactaaaaatacaaaattagccgggcgtggtggcacatgcctgtaatcccagctacttgggaggctgagacaggagaatcgcatgaacccgggagcagatgttgcagtgagccgagatcgcgccactgcactccagcctgggtagcaagagtgaaattgtgtctcaaaaaaaaaaaaattataaaaatttgataaacacttaaaaaccaccaccaccccaggttattctttaactgggttcttttcagtgaagcatgactgtgagttgtttctctgtccctgacaaacaatttttattcaggatacatgatgaatcactgtgtaattattgccatttctagttgccatagtgatgggggttttcatgtatgggctgcctcaaggcgtcttgttcagagaaacagtggactgtgtaaatattgtttaaaatgaaaaggtacacagacatcaatatcttctctaggcaggcatgcatttgatatatgattcaacctttgggtagaggttgttttttaatctatttaagcatccgtttactcagttttcattaatacaactttctgaacgtttatgtggatctttacacacttggatgattaaggttactgatgaaaatatttcaaatatatatatgagacaggatctcgctctgtctcccaggctggagtgcagtggtgcgatcttggttcactgctggcctcaacctcccaggctcaagcagttctcccacctcagcctcccaagtagctgggaccacacatgtgcgccaccacacctgagtaattt

SEQ ID NO: 7745 - DNA, 1136 bp, Homo sapiens
atttatttatttatttatttattttttgagacggagtcttgctctgtcgcccaggctggagtgcagtggcgggatctcagctcactgcaagctccgcctcccgggttcacgccgttcttctgcctcagcctcctgaatagctgtgattacaggcgcctgccaccacgcccagctaattttttatatttttagtagagacggggtttcactgtgttagccaggatggtctcaatctcctgacctcgtgatccgcccgcctcagcctcccaaagtgctgggattacaagagtgagccacagcgcccggcctatttatttattttttgagacggagtcttgctctgtcactcaggctggagtgcagtggcgcgatctcagctcactgcaacctccgcctcccaggctcaagcgattcttgtgtctcagcctcccaagtagctgggactacaggccatgccaggctaattttttaatttttagtagagacagggttttgccatttggcaattggccaggctgttcttgaactcctgacctcaggtgatctgcccgcctcagcatcccaaagtgctgggattacaggtgtgagccactgcacccaggtcaataaatttaaaatgataataattatcattattatatacatatatagttacataatcccttttgagataagacatggatttaaattgcacataatacttacatattattatatgcagtataacataatatattgcacatatcttaccttttctcatagaaatatttaaattttctcaggttgttaaaaatcttttatgacaagataattttttaaatgagtaaagtattctaacctacagttacattacaatcaactataacaaacatcctattattggacatataggttgtaagaattaaagaaagaggagagaaacacaaagggcggcttgacagtcaacagggacagatttgtttatttatttttattttttattttttatttttttgagacggagtctcactctgtcgcccaggctggagtacagtggcgcaatctcggctcactgcaagctccgcctcccagattcacgccattctccttcctcagcctccggagtagctggaactacaggcggccgccaccacgcc

SEQ ID NO: 7746 - DNA, 1109 bp, Homo sapiens
cttccaaaatatacagaaaaagaaactctacgctctaaactgatccaagctattgatcacaatgaaggcttcagtttaatataactttggagttataactattcagtttagtgcaaaagcattaaactatttgtgtttttcttgtggtgatgaattcagcaaggtgacagaggtactattataattcttacttgcagaatgttcaatctacgagtgttcatggaagccaaaaaatattaaaggaaaatgaacaaactgttaatattattgtacagaaccatggattttttttgaccatcttctaataaacatagcaagtattatgaatacattaaagttttactaacatgaattttaagagtttgcatatttcagaaatgatctggtgtgagtgcatggaaatattgcttaatttttcttcaatcattgagtgaaaaacctttaactttggcctgcaatagtcatttgattattttttcattttgtaaataatgttaagttttgtaataaaatagttatgttctgataccagtacagtttctatggttgtaattgaacttgaacagacttttaaaggttaaaaattatgatttaaatcttactctgagactctataaaaagaaaaaaaaggtagcatggtggaaacactatcttttcttttttgctagaataagtgtctttgtgcaaacctaaatcacagatagggaatatactacataacctgcagttcttttctttgtgaatcctgacacactgatagatgggggattgtcgatcagagaacttattaatatttagtactggaagaactctgtctccacagttgccagtaataaaaagaaacattggctactatgagcaccaatcactgggttatagctttcaaaattattgatgctgcagtgctttagagctatttccttgaatttaagaaacaaatcttaacagttttatggtgctgatgcttagttgtctcatgccattaaattgtaaaagtgagttgatgcaatacatgtgactttctgctataatgcaaatatttattttttaaatttattttaaaatgccgtgaaaactgtttaataaagatttattgttttaatatttaa

SEQ ID NO: 7747 - DNA, 1029 bp, Homo sapiens
catgcccagctaatttttgtattttcagtagagatggggtttcaccatgttggccaggctggtctggaactcctgacctcaagtgatctgcccggcttggacacccaaagtgctgggattataggcgtgagccaccgcgcccggccagtactaatatttttgacaggggagatattttagtcctattgcagcaaattaccccaaaacttattggcttcaaaataacaatgaaactcttgtttcatagtttctgtgggtcaggaattcaggagtggcttagctgagtagtttgggctcagggttccctcatgaagttgcagtcagaatattggctggtgctataggcatctaaaagcatgattaaggatagagattcacttccaaggtggcttactcacatgactgttggcaggaggcctcagtatagcaccatgagtacttctctccatatagggatgtttgaatatcctcatgaaatgacaactggtttcccccagagtgagtgatccagaagaagggctgaagccatagaggtttttttttttatgatttagtctcagaagtcatacattcctcatattcacagtatccttatacacacgggcatgaataccaggaggcagtgctcactggtggccatcttggaaactacctcagaaaatttttagtgttgcttagtaccatatttttaaaaggagagataaattgtaatggtttgacttctgttcatgaatacagagaaagggaattttctgattatcacagataattccatgtcagacttttgatggtcctataacattattttatctagtttctctttatttacttttgaagatgatagtatgatcctatcatgttctttgaagtgctaggaaagatttctggtgattcttacgtatttcttctttttctcctggaactaatagcttcaaattgtaaatgtccagaaaacagtgggcaatccattgaattgcacaagttgcaaactactggaccatgttagctttatgtgctaatatattagcc

SEQ ID NO: 7748 - DNA, 1035 bp, Homo sapiens
gataatattccaaaaagaaggagtagcaaaagaaaagatgcataagtgggaatggtaatatttttagaaaaattccagaagtaaaagaaataaaaggtttcaaaataactgcctatctttataaaccaaattagtacataactggaaaaactgtctgtgataaagtttacaacaagggtgatagaggaaccctggagtagcagttgtcatgtgggaagaatgcatggttttctaagctgaatagcattctcatacttggattttatcactcgtctaaggaaaacatcctgtctaatattttatagtaacaattctaaagttttatgcacaacaaatgcttagtttccttattaacttaccaaacttggtaatttgtaattaatcatggtaggatttcaaactagagagtaccaaatttctagttctggctttaagtagaattctcagataagctatatggtagcagaattttatctcaaatttagtagttttttttaattaaatgagagaaaggtagaatataataatagattattataagttttgagtctgacattgactttttttaaaaatttaaattaatagatcacagttgaaaactttggtgcaacagaagtgaaagagctggttctaaatggtgcagacacagctgttaacaaacaaaatcggtaagtgaattttagcagcaacagtgggagtaataagattcagtagacattttcttctgtacgtagaaaacgtgtcacaaccctaagcttttactccaataaaactttaattttgagtggttagtgaggaaataatctgccttttcctcctgaaatcccttgaagacattaaaacaaagagaagggagaagtgacagcagcaaacatttttggaagccaggaaacagtagtaactaacttaagcaaaccagagaaagctacaacatgagatggaaaagaggagtcacgaagccagctggatcacttcacaaaacaaaagtttgggtgctgagaataaaacatacctttagaaaatgcatggtgtttg

SEQ ID NO: 7749 - DNA, 1041 bp, Homo sapiens
tgactttaaagggttacagtaagtttgctttatcatttgatcctgtaaataaaaaagattttgagctgcttcctctggtatagaatatctgactataccaactaaggattaaggaaaggatgaaaagaaagcttgaatatttaatagtctaaaaatattttaaaaaattaaaaaccttcaaatcttggtaaccatttttattctgttcaaataaatgcatttggtattctaaatatttttgtagtgttctatactaacagctagtaagccaattttttggaggtctttgttaaaacgataagttaataacttggtgattttaccatgggatattccattttagaacaagaactcagggagaaccataataaaagaacaaaagttttaaatggtaaaagtcaaatccttggttcgtgagcacataccatgatcacttagttaagtgaatttgtgtaatgcttccttagccagatcattccttattctttgttttttattttttatttttgagacggagtttcgctcttgtcgcccaggctgtagtgcagtggtacagtctcagctcactggaacctctgccttccaggttcaagtgattctcctgcctcagcctcctgagtagctgggattacaggcacacaccaccacgccctgctaattttgcatttttagtagagacaggatttcaccatgttggccaggctggtcttgaactcctgacctcaagtaatctgccctcattggcctcccgaagtgctgggattacaggcgtgagccactgcgcccagcctgttccttatactctttaaaggtttgtttttgctcctccctctttaccctcccctccagtgaatgttttttagaaaaaccaatgctcagatttatcagtattactaccgttctgtactggcttactctaatggtgttatgagttatacattatacattagtataaaaacattcaaaagggtactctttatgctcagtttattaagttttatgctgtacgggatactgttaggtgctatgttaattcagtag

SEQ ID NO: 7750 - DNA, 1134 bp, Homo sapiens
aattcgtaatctactgggcaagattggcaatagtcaaacaaagcaaaaaataccagctaataatatgtattattaaaatgaggggacttagtaaagataggtttcagaaaagacttatctaatgaagtatgagtactaatctgaatgacaaggagcagccctttaagatcagggcagagagaatttcaagaacaacgaacatttggtaaaatacctgaggtgaaaacaagcttgacatgattgaaggacagaaaaaagccagcattaggccaggtgtggtggctcacgcctggaatccctgcattttgggaggccgaggtgggcagatcacgaggtcaggagttcaagaccagcctgaccaacatagtgaaaccccgtctctactaaaaatacaaaaacttagccaggcatggtggtgggcgcctgtaatcccagctacttggaaggctgaggcaggagaattgcttgaacccaggaggtggaggttgcagtgagcttagattgcaccattgcactccagcatgggcgacagtgtgagactcctttcaaaaaaaaaaaagaaagaaagaaagaaaggaaaacagccagcatggcttatgggagtgaggagggaacagagaaatgggcaggggccagatcatagagagtttagtaaactaggattaggaatttggattttatctaaagtgttaatgataaacaggggaaacttaatctgatctttttgaatgatcactttgttggctgtgtagggaacgggacagaaatgaaagacggaaatccatgagaaagctatattttagtagattaggggagaggaaatgatgggtttgactaggatgatggttatttagatggaagaaggaaatggaatatgtcttggagataaaagggaatcttggagacaaaaggaaaataaaaatcactgatggattggatatgaagtgaggaaaggagagaaatccacaaagattaaaaagcaggtgtggtagagggaaaactaggagagtcttggaaaccaaaatttaaaagtgaaagagagactgttgaatgctgcagaggaggaggatgaaaccttagaattgacagtgaatttggttacatgaaggtaattggtaaccttgataataccat

SEQ ID NO: 7751 - DNA, 1049 bp, Homo sapiens
ggccccagagcactttagcccaccatggtgaggcttgcaggaactcacattttgacaactgggacccacagttcccctctggctagggctgggttttaatgctccctctgtggacaggagtcagctaagtttgatccagttttactttttgctgtaacagggcagtgctgagctcaatgcctaacaattgctgcattctttctctccccggtgcacagaaatgctctctgcaccacaatgcctctgccaggggctgggagaggggtgatgttggtgattcaagacttttttgtatctctttttttcagcaatatgaagttgaaaccaggtgctatgagtgctcacctgatttttggttctcaggaagatgctttttttgtgtagatagttgttaaattggtgtccatgcagctgggacaatcagtggagctttccattttgccctattgcttcacctcttccacctgtttgcttttagggatggaaactgtggtttcacttttaaattttaagtaagataaacaaaaatatatatcagaggtcagtgggatgtgaatcatattctgcaagagtcactaaattttagaatccaatgtgattaaaaattagtttgtatatgtataaacataaatattggagaggggaaagccattgtgttttttgtataactattctgtatatttctttttttagtagaaagagtttggctaattatttcagttgattaaagcacaatactaaagactccagggtaggacctgcaaactttttctgtaaaggaccagatagtaagtattttatgctttgtgagccatacagtttttgttgcaactagtcaactctcaactccactgtggacagcatgtaaatggatgggagtggctgctttccagcaaaatttacttaaaaaaaaaaaaaacagtgggtagcatttgacctgggtagcatttgacccacaggttgtagtttgccgaccccttcttttaggatgaaaattttggtctccatatgtaaacttggtgtctttgttttgtttgaaagctagtaat

SEQ ID NO: 7752 - DNA, 1313 bp, Homo sapiens
ggaggatgattatgaaccagagaactggactttgtgttccctattcatttcaggatttatggatgcacttgttcctcccatatgtcatgtcctttggaaagtttttgaattaaaaattgttttcagtgctccaaatggcatcataagaaaatacctttggtacctgctgtcaggaatggatgtattatcagctaaatgagtttactggcaaataattgggttatttagtagtttccgagttccacgtagtacattatagacatgctggtatgccaaaagagaagccttacttggtctgtctagcctagtcgctacatatttgtgctgatctaaatcagtgattttcaaactattttatgtagaacccttaaataaaaccaaacagataaaacatactcaccataaccacccttgaactgaggtttttaagcaagaatactaaactttaattaaaatgtgaaataaaagtgttataatcaaacttatataggttttattttgtacatttaggcaataatcctaaacacataagttgttttgaacttctaccgtgtgacttctttttaaaattcattttgcaaatagagtgcctactatgtgcttattattatattagatattagtgatgtagtgataaaagacatgatttctgcccttgttgagcttacaatattgagagattgtctaaactttttggtctttatgttacagcatggtaagtactagattagggaaaatgcagagtgctatgagaacacttgggagggcatgtaactatgaaggactaaggaagacttcctggagaaaatgatggctgattgaaccttatctactatgcgaatatattatttttattctaacattaacatttcttttcaaaaacgtatatatcatatcagcaagatatacaaactgcaaacactggttgcgtttctttaattttttttaattcttaatttttgtgagtacatagtaggtatatctttatggggtacatgagatgtgctatgaaatactaggtttggccgggtgcggtggttcactccagtaatgtaaccccagcactttgcgaggctgaggccggtggatcacttgaggtcaggagttcaagaccagcctggccaacatggtgaaaccccatctctactaaaaattacaaaaattaattgagcgtggtggcacgtgtctgtaataccaactattcagaaggctgaggcaggagaattgcttgaacccaggaggtggaggttgcagtgagtcgaaatcgtgccattgcactccagcctgggcaacagagtgagactctgtctcaa

SEQ ID NO: 7753 - DNA, 1041 bp, Homo sapiens
ttctgtgagtcaaaattaagcaaataattatttggaaaaaatatttgtagcaattacaacctaaggttaatatcctgaatatctaaagtgtccatacatattaatgaaaaaaaaaaaagacagctaatagataaataagacaaacaataaataaaggaaattaatggaagttcctaaaagaagaaatttatattactaggaaacatgcaaaaattattaccctctttagtatcaaagaaatgcaaatttgaaaagcaagaggacagtaaataattgtaatagatcaagcattaatcctctctttcctgttataagataactatataatagggagaaactaatgcttcagctacaatatgaagtaatgctaacacttaatttttcaacctacagtgaatgagcatcaatgcctactaccaccacaaaaaagaactcagtgaaaattcttctcaaaggaattatgtgtttcctgatggaactactctcctgcctccatgtagtagttttactgaaataaccaaatggtgattgaaacctgtctagattcaaccaccaatttacagaacagaagaccaagccaaatgttaggagaaaccacaaagataaagtcagcaaaatccagtctgcataaagttgtacaggacaaatgactaggtttctcaaactttttcgagtagtgattaaaaggaaattaaggataggatgcagtggctcacacctgtaatcccagcactttgggaggctgaggtgggcagatcacttgaggtcaggagttcgagaccagcctgaccaaaatggtgaaaccccatctgtactaaatacaaaaattagatgtggtggtgggcgcctgtaatctcagttactcgggaggctgaggttgcagtaagccgagatcatgccactgcactccaacccgggcgacagagtgagacctgtctcaaaaaataaaaataaggccaggtgcagtggctcacacctgtaattctgacactttgggaggctgaggtgggcggatcacctgaggttgggagttcgagacca

SEQ ID NO: 7754 - DNA, 1191 bp, Homo sapiens
atacaaaattagtcgggcgtggtggcacatgcctgtaatcccagctacttgggaggctgaggcaggagaattgcttgaacccaggaggcggaggttgcagtgagccgagatcgcaccattgcactccagcctgggcaacaagagtgaaactccatctcaaaaaaaaaaaaaaaaaaaagaaagaatgctttggctgatgatgacctttattactttcatataaattttagcataggttgtgaagttctctcaaaaaaaaaaaaaaaaaaaagccttgtggggttttgattggtagtgcattgaatctctaggttaatttggggaaaagttgttatctttgtaatattaacttttctaataatcaacatccagacttctttaatgtcttataataaaatgttttaaaattttcatcatagaggtcatgcatatctcttcgtagttccattcctaggtgcgtctttaatggtattatatttttatttccactttctgaggaatcactggcatgtagaaatagttgatatttacatattgattttaaatacaaccaccttgctaaactcttattaataacttactcatgtacgtagtcataccatctgtgagtcaattcagttttgttatttctattatttatacttaacgtgtttatataattgttttaatgtgctgtttaggacaccattataatgtttactgtaacataatgtttcctttctgtgggaaaactttcagtatttcatagttaagtatcatgtttgctgttaagatttttatagataacctctatcagactaagtaatttccctttaattcctagttttttttattgtgaatggatgttaagtttttaatgttgttttttctgtatttattgaaatgatttatgatttttttttcctttaatctgttaacatggcatattgatggattttttttttctagttaacagctttgtgtttctggaataacttcagtttggtcaagtattatcctttttgtttggtgctgggtttgatttgtgaatattctgttgactcttacttatatttctgtttatcagtgaacttgatctataatttttttcttattattcttttcaccaggttttattatgaaggttttctagtctgataaaataacattgaggaatgtacctttgttttctaatttttggaaatagaacag

SEQ ID NO: 7755 - DNA, 1034 bp, Homo sapiens
gcttgctgaaatctgccttcaaatctctctagtgtattttttatttcaggtattgtactttccaactccaaactttttttttttttttttgagacggagtctcgctctgtcgcccaggctggagtgcagtggcgcgatctcagctcattgcaagctccgcctcccgggttcacgccattctcctgcctcagcctcccaagtagctgggactacaggcgcccgccactacgcccggctaattttttgtatttttagtagagacggggtttcaccgtttttttagccggggtggtctcgatctcctgacctcgtgatctgcccgcctcggcctcccaaagtgctgggattacaggcgtgagccaccgcgcccggcccaaactttttttttagtttttctttttgattgatatttccgttttgttcatacattttttttttctttttacacgtcttactctagttctttgagcatctttaggatgtttgatttagtctttgtcttttaggtctgccatttgacctttctcagggatagtttctattgttggcttatattttctttgaatgggccaccctttcctactactttgtatgtcttgtgatgttttttgaaaactggacatttaataatatggtaactggaaatcagattctccccctttgccagagtttgctgatttttggtttttgatcattgtaggttttatctgtgtcaggagtcaccctgaggtataaaaatgaggtcttttcttagcctatacctttccctgctaatgcacagtgacattctaaattcacccataaatgtggttgctttttaatgttgtagaccttaaatgcctggctccccaaagaaacaaggaaaaaatgaaaggtgggggtggaaggagagtagaagaaaaaaagagaaaggcatcagccctttgaattccttggaagtctctttagccagaatgggagagtatacaacagtgattgcctgcctttctgcaccttggtgatcagaagcaccaatcattgatcagggcaccagt

SEQ ID NO: 7756 - DNA, 1069 bp, Homo sapiens
tattaatattttacttaatagtgccatttattttctaagaaatattttcctacctgaaggcataaaagtaatcatctctgttatcttcaaaaacatagtgttgccttttacatggaggtctgtaagttatctgaagttgatttattttgtggaggacagtataatgttcaagtaaggaatcaactttttaaaaatataaatagtcaattaccctagcaccattaaaagtttttgtgggaaatacatacaacaaaatttaccaccttaactatttttaagtatacagtccatggtattaagtacattaatattgttgtgaaaccatcatcaccattcatctctagaattctttttatcttgcaaaactgaagctctatacccattaaacaatgactccctattctccatactctcttgtggcaaccaccattctacttcctgtctctgtgaatttaactcctgtaggtatctcatataggtagactcttacagtgtttgtcttttggtgactgacttatctcactcagcgtagtgtcatcaaggttcacccatgttgtagaatttccttctatatatgtcagaatttcctccctttaaaaggctgaacagcattccattgtgtgtatatgctaattttgcttgtgcattcatcttttgatggacacttgggttacttttgtgttttatcttattgtgaatattgttgctatgaacatgaatataaaaacatcccttcaggaccccactttcagttcttttgggcatatacccagaagtggaattggtggttcatatggcaattctgtttttaatttttgtaggaactgccatactgtttctcatagtaactgccctgttttatatttccaccaaaagtgtacagggtttcagtttctctacatcctcaccaacactgttattttctcattttgcctttttctttttttttttataatacctattttaatacgtgtaacatgttatctcctgtggttttgatttgcattttcccaatgattagtgagctgagcatatttttatatacttgttgaccatttgtacatcttta

SEQ ID NO: 7757 - DNA, 1076 bp, Homo sapiens
ttttatttaaaaaattgacccaaattttattatcgtagtttaatataagtggaaacacataactttgcacacagacttcagaaaaataattgttggcaataaagatgtagtttatcttttaaaagttctgcttcttggacatatacattaaaaaattatggcaagatagtataagattattatttttgtgagtacagcaatttctggactatacaaactaaacatatttgaattattagcttggtcaaaaatacaatttattttcttgttattcattttaagatatattacaattcctgcctaattttagcatctgaaaatttggaacattatagattaaaaagaaaaattaaagagtagtttttaatggtatagagtaggtcagtttttagtctaaatttttcatttttttaaaaatctactcccctattctgagataaatttttcaaaattgaaatgagttggtgttaagatttttcttaaattactaggaaagttgtggcttaactggaaaatagaaaattggtaattgtgtttaattgcaaaatatttaatactttagctcctcaaatgtttaattacataatataaactttttactaaacattagtggttggaattttgtcttcagaaacataactaacaatgcctgatttctgcctatattgccgctacacattaagttgggaaaacagaagaatacaacagtatacatattccataattgatatgctttagcagagtcccaaaggaagggtatataaatcttatctccaatgtgtgtgtgtgtatatatttttttaatttacaaaatttattctggcttctttttctttttttctttttctttcttttttttttttttgagacggaatttcactctgtcacccaggctggagtgcagtggcgcaatcttggctcactgcaacttccgcctcctgggttcaagccattctcctgcctcagcctcccaagtagctgggactacaggcgcctgtcaccatgcctagctaatttttgtatttttagtagagacggggtttcaccattttggccaggctggtcttgaactcctt

SEQ ID NO: 7758 - DNA, 1032 bp, Homo sapiens
tcttgtcatcctatcattttctgctacttcctttgaggattgttctggagagaacttgactttttctggagcctctgagataacagatcttttaaacatttacttcttcataattaagatttatgggaatgttttgatataaacaaatgatgcttctaagtattttttcttttttttttttggaacagtgtgtgtcatatcttgcttgccttttttgtttttgtatgtttctgtaaaatacttttttaaaagctatacaaaaaatgagatattagtgtaataaacttcatgtactggaagcttcaggagtaggtaagtacttaatacatcattagagttgtgcaggttcctagaggctatatagggctaacctccctctccaaaatgcaagatagtaatctagatacaatttgaatttctgtatagataggaatttcagcctctttggttcagtctgtttcattattgaacagctgcatttgtaaattgagctaaactatgcctctgaagaaaccctgattgatccagttttaaccactttcaacataagacttttagtttgttgaagacaatgattatagctttcttattaagctgaaagaaagttaattttaaatggtatcttttaaaaaacttgtgatactagtaaaaaaacctgacaaacacatcttgaggactaagagaaacaaattcactttccttattgatttgtcaattgatggctactggtagtagggccagtattttaagggccaatattttaagttaatttctgttttaaaaattgaacatattttaactacatgtatcttttgatattaagttggcagtccacaaatggaaaccctgtcagtcatggtttactgcctttcagttctctactcaccatatctaatagatgctttatttatgagatctttaaaaaatttgttttccattcagaaattgctaattcagattatttccttaatttcctttttttatcttgagacacggtctggctctgtcacccaggctggctggagtgcagtg

SEQ ID NO: 7759 - DNA, 1034 bp, Homo sapiens
tttcccaggaggtttttgttttgttttgttttgtttcgttttgtttgagacagagtctcactctgttgcccaggctggaatgcagtggcacgatctctgctcactgcaacctccgcctcccaggttcaagcgattctcctgcctcggcctcccgagtaggtgggactataggggcgtgccaccatgcccgggtaattttttatatttttagtagggacggggtttcaccgtgttagccaggatggtcttgatatcctgaccttgtgatctgcccgccttggcctcccagagtgctgggattacaggcgtgagccaccgtgcccagctgacttcacaagaactttaaacttgtgtcagaaagcacatggaatggagggaactaagaattgtttctttacataggttggctttataaatatacatattccataactaataaggaatgaaggagaaagaggtagccttattaaggataaattattctcgagattcataataacctactggaggacttggcctgacaatgtagtgaatagatttaacctgtggcctattgaaaagaggtgtttctgttctggactttttagggaccacacagaaagatttaactgaattcctttattatactaaaggtgcagattatgttcatgttcatctctgttgtcttgtatatgtatgtccttttctatcactactggcttttctgaattatttccagagaagtgaatgtctgtttcactttcatgtttttttcttcataagaactttaaaatactttttaagctaatgtctcaatttttaaatttatagctaacaaatatatttaatcttcagtgcgctagaccaatccatttaaatgaattgttgtttttttatactttcaaattcagttctgaagattttaagtatgggaagtatacttttctttacaagatccttttcttactgtgtatctaatcataggtataatttggtgaccatggttatgttttgcacattgatttccatttgtttcatgttagaaacagtactaa

SEQ ID NO: 7760 - DNA, 1149 bp, Homo sapiens
gggcttgggcgagttgtggccccagcgggttcgggggcgtgtgacggcgttagggaggggcaggccgggctgggcggatgcaggccggcccggcatagggcgctttctccgcgcttcctgggggtgaggggcgtggggcgagggcagggctgtggctccctggccccggggctggaatgtctcatctgcctggggatgggcttctctcaggttgaggccgcgcactgccaagcctcggccgccggcctctgaagctgttgcgagcggccggttgcggtagtcgtctgcttggctgcgaggttgggtgtgtgcagatgatttctctttcccagtccccatgagctgatctgggtgcacgttcagggaaagacgggactaaactgcttctcatttccctacctgttgctggcgagaggacgcctctgtgttttaaagaaaagggtggttaaacctcgcgcgctgaagtcggggtattttcctgtattactcttattttgtttttaaatatgggaagacaatgcagaactcttgggaattatcgagttctgataccccaaaagaatgaaatcaaacttctgttaatgggatgatgggtcgtggaatgggacaccttgggcacttgctaacaggaacataggaaaattggagttgaaacttcgcaggctctgtaagaatgtggatgactgctacagaataaggctgacttcctgtaattatgatatttagtaacgcgatgtgtttaaaagtctacgtatgtatagatgaagtggactctgttatttgtgtctttctttacaagtgaggaaatattcagtcagtgtgctggaaagttctacagatttcgccatcagactatccattcctattcttgaaaaatctgcagtgctggagttatttgcaattcccccccgccaatctttaaataattgtctcagagatatagatagatatagattgcccacgggtgatttttttaatcccggttaccacttgtaataaaagaggttgaattttggagagaattgatatttaaattgcatgtttttttttctgtattataattatgcacattgatttagttttaaaattagtgaggttggaatgttagtattttgatttgaaatctgggatctttggaggtgatttaag

SEQ ID NO: 7761 - DNA, 1049 bp, Homo sapiens
acagagtaagactccatctcaaaaaacaaaaacaaaacaaaacagaaaaatcaagtacattctataatgttggatgagctaaaaaaaaaatgcacgtacataaagtgaacctgtccctgactttcaagagcatacagatacattccattacatagataaattacattaaactgtagcaagtgacaaaatagggtaagcacagagtgtttggggagcacagaatctggccattcacacagtctagggcttcagagaaagctttctgaaggagacaactcatgagttaagtgttggaggataagtaaaatttagtggggcaatgaaaaataggaaaagcatttacagttgaggacgcagtaagatccaaggcatggatgtacaaaataacggcagaagtggaaactctaagcaggtgaaacattgtaaaataaggaagtaggtaggaaccagatcttggagaagtttgtgtgctaccctatggagcttggcttttaagattgatgatcaatgtagtgctttttgggtttttttgtattgtttttgagatgcagtctcactgtgtttcccaggcttgagggcagtggcgtgatctcagctcattgcaatctttgcctcccaggttcaggtgattctcctgccttagcctcctgagtagctgggactacaggcatacaccaccacgcctggctaatttttgtatttttaggtagacacggggtttcaccatgttggccaggctggtctcaaactcctcacctcaagtgatccacctctcttggccacacaaagtgctgggattacaggcatgagccgccattcccggccaatgtagtgggtttttgttttgttttgttgttttccctgagacggagtcttgttttgtcacccagtctggagtgcagtggcacagtctcagctcactgcaacttccgcctcccgggttcaagcaattctcctgcctcagcctcccgagtcgctgggattacaggtgcctgccaccgcacctggctactttttgtattttcagtagaaacagggtttcaccatgt

SEQ ID NO: 7762 - DNA, 1050 bp, Homo sapiens
tttaaggtttttttcatctttaaggttcttttcctgaagagaattcccatcagcaacagattatctctttaaagcatttttacatgttatatgttctaatatatacaattgtatagaaaagagcaaaatgaaccattacccatttcaatatttatcatgtgcagtcttgatttttcattttttcaatttttattttttaagagacagattctgtgttgcccagcttggtcttgaactccaggcctcaggcgatcctctcacctcagcctcccaagtagctggaattaccggtgtgagccattgtcgcctggctgcaatcttgttttttatacttaatccacatcccacctccccaacccagaatattttgaggctaattccatacatatttacatatatatacatctctcaaagaaaataacttattttccattcttcatatatctattcctataaataatgttcttgggggaaaaagttttcacatttaatttttagtgttaccaatttgagcattaatattttcttcctactagggactggtttggctgaaagacaaagaagcaacacattgtaaactttgtgaaaaggaattctcactctctaagagaaaggtaagggagataagaagtgagtccaaaaatttggagtgcaaaaatgctaattttatttaaagtgtttttttccctctgatttttctgtttaatagcaccactgtagaaattgtggggaaattttctgtaatgcctgctctgacaacgaactacctttgccttcttcaccaaaaccagtacgggtttgtgattcctgtcatgcactgctcattcagagatgctcatctaacttgccctgagactccagaactaaatccttatgtatgaaattacctacaatgaatgttatgatgttgtatacaaaggtaaccagacagctctccttaagcggctttcggtcagtatttggtaccagtttatcttctacatattcagctcatggaaattacaagttatatatttccttccccattgtttttcaaaatgtattttcaac

SEQ ID NO: 7763 - DNA, 1027 bp, Homo sapiens
caacagtagtttgcaaattagcactctgcaacagggctgattttgccgttactgaagttaaactgatttagcaattgctgtaattcttatattggaataaagtttgttgtaaaatttttcacatggcatagaagtgtaagacaattagaatcttacattcctcctcttagttccattcccaagatgtaaccagttttaatattatggtgtgtgcctttccaaggcattttctatgcttatgcaatatttatgtatatgaaattaattaatggtataaatggtttagcaaggattttttcgtggctggcaaatgagtcagtattttgtgactggaaaaccctgtgctgctgaacttgtttactgaaaaatatttgtgaaagaaaatgtctgaaaaatgcattacaaaggccaaagtaataaaccaaaagggtgattttagtaaagaatacataacaactgtcgtgtgagaaatagcactgagcttctgtgtgttatttgtcattcaagggtgcaactggaaactgacttgaagattgagaaggaatggaggcagactttgcaggaagatcttcaaaaggagaaagatgccttatctcatcttagaaatgagactcaacaaatcattagtcttaaaaaagtaaatagtggtaaaactttaaaaattctgtcttgacaaatgttaacttatttaaaaagataaatcataatttacattataccaaggaaatggatatactagtcatcttaaaaaatatcagtaaagagattaagtaaatggaaaatagttgatacagcagctaggaaagagctttggacacaatttgtttcttttaaaaagctaaaggatgtttgtttctaattaatggtatatgtacaatctggagtttcttgtttctttcttttaaatttcattttctgtcttttattgttctgaaggagttccttaacctccaggatgaaaatcagcagttgaaaaaaatatatcatgaacaagagcaagctcttcaagaactcggcaacaagctta

SEQ ID NO: 7764 - DNA, 1065 bp, Homo sapiens
tgcccattagtatttaatgggttgagggcttcatcaacacccaatatgagctatatatgagataaaaagaaacctgaggtaactcatcaccatgttgttctttgattcctggagttcctagctgatcaaacttcttctctttactttctggagtcttctcttgttgttgttgttttgagatggagttttgctcttgttgcccaggctggaatgcaatggcgcgatcttggctcactgcaacctccgcctcccgggttcaagcgattctcctgcctcagcctcccaagtagatgggattacaagcatgtgccaccactcttggctaattttgtatttttagtagagacagggtttctccatgttggtcaggctggtcttgaactcccgacctcaggtgacccgcctatctcggcctcccaaagtgctgggattacaggtgtgagccactgcacctgtaatttgagaaattaatatttctcaaatataataatttgagaaatttgaggaattaatatgtagaattccctggctttaggccaggaagtattactgtggttaaaaacctacaggctgggcctggtggctcacgcctgtaatcctagcacttttgggaggctgaggcaggcggatcatgaggtcaagagttcgagaccagcctgaccaacatggtgaaaccccatctctactaaaaattaaagaaaaattagctgggcatggtggcaggcgcctgtaatcccagctactcagaaggctgaggcaggagaattacttgaacccgggaggcggaggttgcagtgcgctgaggtcacgccacttcactccagcctgggcgacagagcgagactccgtctcaaaaaaaaaaaaaaaagacaacccacattatttctacattgtgaaaactgtgaaattgaaatccactcccaaagccaaaaacagggccaggtgtggtggcacatggttgtaatcccagcactttaggaggctaaggtgagaggattgcttgacgccaggagtttaagaccagcctgggcaacatagtgagaccctgtctctacaaaaagaaag

SEQ ID NO: 7765 - DNA, 1024 bp, Homo sapiens
cactgcagccttgatttcctgggcttagtaatcctcccatctcaggctcctgagtagctgagactacaggtgcatgtcaccatacctggctaatttttgtatttttgtatttatttatttgttttggtggacacggggtttcttcatgttgcccagaacgatctcgaactcctgggctcaagcgatctggccaccgtggcctcccaaagtgctgggattacagccgtgagccactgtgcctggcctcttttttttttttttttttttttaaagagagaggggtctcactctgtcactgaggctggaatacagtagtgtgatcatggctcactgcaacctcaagctcctgggctcaagcaatgctcttgcctttacctcccaagtagctgggactataggcatgtgccaccatgccagctaattaaaaaacttattttattttatttttttgagatagggacttgttcctctgtcgcccaggctggggtgtagtggcgtgatcataactcattgcagctttgaactcatgggctcaagggatcctctcacctcagcctcctgagtagctaggatgatagtagcataccaccacacctggctaatttttatagggacaggatcttgctatgttgcccaggctggtcttgaactcctggcctcaagcagttctcctgccatgatcttccaaagtgttaggattacaggcgtgagccactgcacctggccttaaatttttttttagaaatgaggtcttattatgttgctcaggctactcttgaatgcctggcctcaaataaacctactcagaaggtgggattacaggtgtgagccaccatgctcagctctttagccattcttttagggtaggtctgttggcaataaattctattttaccttcatttctgaaagatattttcactgggtatagaattctgggttggcagttcttttagcactggagaaatcttatgccactctctcttggcctttatggttttctgattaaaaatacactgtcatttga

SEQ ID NO: 7766 - DNA, 1034 bp, Homo sapiens
aaatgctttcattttaacaaaaactgcgtttgaaaatatttacttactttttgagacagagtcttactctcttgcccccgctggagtgcagtggtgtgatttcagctcactgcaacctttgcctcctgggttcgagtgattctttcacctcagcctctctggtagctgggactacaggcgtgtgccaccatgcctggctaagtttttgtatatttttggtagagacggagtttcaccatgttggtcaggctggtcttgaactcctgacctcaagtgatccacccaccttggcctcccaaagtgctgggattacaggtatgagccactgcgcctggccctgcatttcaaaatatttattgccttgttatagggcctggttgattccctttagtggacttaaaaggtgtagtctgcatattgaatggaaaatctttcttaaagtatatctaatttttacatcctgaagtggcatgtgaattgaggatacattgaaattgcaggatgtagagaatgagctagcagtacaagttagtatgaagcatgagattgaacttgccatgaagttgctggagaaagatatccatgagaaacaagatactctgataggccttcgacaacaactagaggaagttaaagcaattaacatagagatgtatcaaaagttgcaggtaaggattgttcttaaatttcattttatgtaaattgaaagtgaatatttgtagaaaggttttggtttttaagagatgagcccattttattttaactgtgcaatattataaaggccaatgtctttttttttctaaatgaaagcttaagaaatgtaatgaaaaaggtatcaacaaacaaaatatcacctgtctaaatttttaatgttgaaagattaagagtatgaagattaaatcttttgggaaaactctcaatttaaactgcaaaacgtttttgtgaacttccttttccagtgtagttctaagaaagatttaattttgattgaaatgctacactatcaaaatagtaaattttctttctttgttttt

SEQ ID NO: 7767 - DNA, 1022 bp, Homo sapiens
tgggataataacgagcgtgttttccttatgaacgtttctgtgaatgtgacagaccttttgctagttgtgagattttattttctgatgtttatggccatgcacataacctgcaaagcaagtataagggtgtttaaaatcttttttcttgcccgtttcttaatttttagttagcaatagcaaagaataacatcattaaactccaggaagaaaatcatcaattacgaagtgaaaataaattgattttaatgaaaacacagcagcacctagaggtaagtatagactgctttcaagcagacaatctcgtgtcagaaattaccatttttggggatttttggatgaagtaggtatttctatgctgtattaatagtagtgattatagaatgaaaaattttgttttcttcctaggttaccaaagtagatgtggaaactgagcttcaaacatataagcattctcgtcaggggctagatgaaatgtacaatgaagccagaaggcagcttcgagatgaatctcagttacgacaggtaggttatattaaaaattacattagcaagatcatcctgggagtaatttaccctcaagcaagcaccatttaaaatctttttcagccttatcctttttggtgtggtatgtagcaagctcaccccttaatcttctcaaattttctaagcttccactatatcaatgttttattgttgttttgagacagattctcactctgtggcccaggctggagtgcagtggtgtgatcttggctcactgcagcctctgcctcccgggttcaagtgattcttgtacctcagcctcccaagtaattgggagtacaaggcatgtgccaccacacccggctaatttttgtattttttgtagagatggggtttcaccatgttggccaggctggtcttgaactcctggcctcaagtgatctgcctatcttggcctcccaaagtgttgggattacaggcgtgagccactgcgcccagcctattgttgttttgagacagagtcttgctctgtcactcag

SEQ ID NO: 7768 - DNA, 1026 bp, Homo sapiens
taatttaaaatttctggtaactataataaaaatgtaaaaaaaaccccaaaaattaaaaatatattttattttacccagtattccccaaatattcttccaacatgcaatcaatataaaaattagggtacaggcacgatgtctcactcctgtaatcccagcactttgggaggccgaggcatgtggatcacttgagatcaggagttcgagaccagcctggccaacatggtaaaaccccatctctactaaaaaatacaaaaattagccaggcatggtggcatgtgcctgtagttccagctactcgggaggctgaggcaggagaattgctcgaacccaggaggtggagattgcagtgagccgagatcacgccattgcactccagcctgggcgacgtaacgagactccatctcaaaaaaaaaaaaaaaaaattaggccaggtgtgatggctcatgcatgtaatcccagcactttgggaggctaaggcaagaagatctcttgagcccaggacttcaaggctgtagtgaactatgatcgcatcactgcattccagcctcggtgacacagtgagaccttgtctcaaagaaaaaaaaaaaactattattagcctggcatggtggtacatgtctatagtcctagctactttgaggctgaggcgagaggatcacctgagcccaggagtttgagataagcctgggcaacataatgagacccccatctcttaaaaaacaattattattaatgacatattttatactctcttttttttggcactgtctacaaaatccaatatatattttacccttacagcacatttcaatttggactagccacatttttaagtgtttagtagccacatgtggctcatggcggccatactggacagcacaggtatagcgagtaatatttgctatgtaattagaaatgaagtgttttcattaatcacatttaataattagtaaaatattctctgggtgataggattatgaataatttttattttattctttgtacttttctatattttctgag

SEQ ID NO: 7769 - DNA, 1109 bp, Homo sapiens
tgctgagattacaggcgtgaaccaccacgcctggcccgagagtcaggtttttaatacagaatcttcatcagatttaaatagaacttaaaacttattgctgtacccttgacaaaaaaggctaaggtaaaagtttgtatcagtttgatggttcagaaattcatttttcctacttcaaagggcttcatatgtaaatgtggctgtctgtcatcttctgtggtggaaatttttgctttcttacattgtcaactggtcattgaagccatcagtgaatactcttgttgagaagaatttttgagacctgtatgtaaaatagcaaagtgcaattctaatagaaatatatgagatgtggccaggcgcagtggctcatgcctgtaattccactttggaaggccgaggcgggtggatcacctgaggtaaggagtttgagaccagcctgcccagtatggtgaaaccttgtctctactaaaaaaaacaaaaattagccaggggtggtggcggtcacctgtaatcccagctactcgggaggatgaggcaggagaatcacttgaacccaggaggtggaggttgcagtgagtcgagatcgtgccattgcactgcagcttgggcaacaaaagtgaaatgtgaaactccgtctcaaaaaaaaaaaagaaaagaaagaaatatatgagatgcatagtttttttgtttgtttgtttgtttgtttgtttttttgagacagagtctcactctgttgcccaggctggagtgcaatggcaccgtctcagctcactgcaacctctgcctgcccccagggttctagcgattctcctacctcagcctcccgagtagctgggattacaggtgcccaccaccacgcacagttaatttttttgtattcttagtagaaacggggtttcaccatgttgaccaggctggtctcgaactcttgacctcaggtgatccacttgcctctgcctcccaaagtcctaggattacaggcgtgagccaccacacctggccttttttttttttttttttttttttgagacagggtctcactctgttgcccaggctggagggtagagggcagtggcatgatcaagctcaccacagccttgacattgcaggct

SEQ ID NO: 7770 - DNA, 1027 bp, Homo sapiens
tgaaaccccgtctctactaaaaatacaaaaaattagccgggtgcggtggcgggcacctgtagtcccagctactcaggaggctgaggcaggaaaatggtgtgaacccgggaggcagagcttgcagtgagccaagatagtgccactgcagtccggcctgggtgaaagagcaagacttcgtctcaaaaaaaaaaaattaataaataaaaaataaaaaatataaaaagttattcacacgtataaaggctaatttgaaggcacctaactgagatggcttccatttctgtaaggtagaagattaggaagataatggtgattttaaattttagtttttgaaataaatttgtgatttaaagtccttattttttaaattttcacagtgagttttatgagtatcacgcactaatgatggaagaagaaggagcagtaattgttgggctgctggttggcctgaatgtgatcgatgctaatctgtgtgtgaagggagaggatttagactcacaagtaagtgaaagtgactagtgccaaatgcagagtgttttcagtttgcacagttcctccttgatcaggtgtcatttgaagttgtaaacaggactgttaaacactaaaggaatattaagagtaacattcagtaaaggtacttctgataaagtattttctcccctttaaattaaaaaaaactttatttacttcaggttggagtgattgatttttctatgtatttaaagaatgaagaagatattggaaataaagaaaggtatgattttcataagttatttcacatattgggttttttatatagctctttacaaatcattataagatccatctatttacagtgtggttttattttgttgttttcccccctgtgacttcttcatttcattttcacttccattacaagctttacaaagcagattatggaaaatcacttaggagaaggaggttttattaatagtatgaagtgggacctttggttatacctgtagttactgagacccattttaatagtggttttttggaataaaag

SEQ ID NO: 7771 - DNA, 1363 bp, Homo sapiens
gggaaggatcaagatggcagtgcaaatgcaaatgccaatgccattaactgtgatcaggaccagagaaggagcatcaggttcagcagggatgaggaggagttctgctttgaaagtactgtgctttcacagcctgggtttagctaagtggagagatctcactgcctactaaatatccaaacccaaagcttgggtgaggaaccaggtaggagaggagtgtgaggtcaggcctaaagatggaatttggaatttggaggcacgtgagggcctgggaccctggagcaaacaatgagaaagagtagtacaatgaaccagggaagggactctagggaataccagagcttaagggacagatagaagacagggagaaggtggcagaaaagaagcctgcactccaggttagaggaaggaagagccatgcattcaggatccctctggggatggtgaacccgtgttcgactgcaagggtaaatgaattttcagcaaatgttgcaggttcccaattattaattgctttgaccttggtgccttggaccttccccttccctctgccttttcccaccaatccagggcctcatgctgtccttgattggcaagtgtgactgagggctggtagctattttaatagctattctggcccattcattcttttagcagatagcagcatatttcttatacagactatgcgaaatggcgagcattcatgtatatttgttttgttgttttagaaacttgtcggtccttccagaatcaactttgttcagattagaccaagaagaaaaaaattgtgatatagataccccattaggaaatctttccaaattgatggaaaacacgtttgtcaggtttgtaacaatgagcaaatttgaatttcactccacttttctaaggaatattactaaaagtgctttttcacttttcagcaaaaaacttcgagatttaattattgactttcgtgaacctcagtttatatcctaccttagttctgttcttccacatgatgcaaaggatacagttgcctgcattctaaagggtatgctaaaatcaccatgtctgctttgattaatttttcttgtttctatttgatttatactgtagtctaatatcttgattagacttgcaactacaatgtttagaccaagactctttggaaatggttttgtattgaagaatagacttggatagagactgcttttcttatgaaataattaacttttcctttgaaattcaacactctttttcctgttatttttgaatttaaatgtaggtttgaataagcctcagaggcaagcgatgaaaaaggtacttctttcaaaagactacacactcatcgtgggtatgcctgggacaggaaaaacaactacga

SEQ ID NO: 7772 - DNA, 1048 bp, Homo sapiens
ctattaatatttttatttaggctggaccttgtgagccaccacgcctggcctaaataaaaatattaatagtagaataattgataggaaaatatgggcaggcaaggtggtgcacgcctgtaatcctagcacactgggaggctgaggtgggtatatcgcttgagaccaggagtttgagaccagcctgggcaacataagtaaaacctcgtctctaccaaaaatacaaaaattaggaggtggtgcatgtctttagtcccaggtactgtggaggccgaggtgggacgatcagttgagcccaggaggttgaggctgcagtgagctgagatcacacctctgcactgcatgtagcctgagtgacagagtgagaccctgtcttaaagaaaaaaaaaaaattgtggcagagaccaatatccatattcacgaataatccatattccctcctctttcacagtcagatggattgtgttttccagcatttcttacagttaatacgggcatgcccgaccatttcttaatggatagaggtcagcaattgggactcattgacatctgagtaactgtaatggaaatgtccaggcttgttccctactgatcagtaatcttagttgagtcataaccaccccttgtctagatgtcatgacatgggatggtgatccacaatattccagttgtctgcttggatttgtgtatcctttgcagtatttatttagtgtctaccatgtattaagcactttgcaaatccttgaggaatttatggtcttgcgtgtagacatacatattttctttttttttttgacacatggtctcactccagcccaggctggagtacagtggcatgatcacagttcactgcagcctggacttcctgggatcaagcagtccttctacctcagcctcttgcatagctgggaccacaggtgcatgccaccacacctggctaattttttaattttttgtagagatggggggggtctcactacgttgcccagcctggtcttgaactcatgggctcaagtgatcctcctgcttcagccttctgaagtgctagcat

SEQ ID NO: 7773 - DNA, 1070 bp, Homo sapiens
ctaacattttactgtaggttgtggaaaatgtaaaaatgacaggctcaatattagtctgttttgttttgtttttgtttttgtttttgtttttgagaggtggttttgctcttgttgtccaggttgttgagcaatggtgagatcttggctcactgcaactttcacctcccgggttcaagtgattctcctgcctcagcctcctgagtagctgggattacgggcgagcaccaccacacctggctaattttttatttttatttttttttttttagtagagatagggttttcaccatgttggccaggctggtcttgaacatctgacctcaggtaatccacccgcctcggcctcctggagtgttgggattacaggcgtgagccaccacacccggcctcaataataatttttaggagtcagatgaacaagtaagttgtaggaaaatgcagacacaatacttacgtatgtaatataaacagaagtttttttctctttggtcttttcatagggagaagagtggcagttgcattggaaacctgattagaatggaacatgtaaagatagtttgtgatgggcaatatttacataatttccaatgtaaacatggtgccatacctgtcacaaatctaatggcaggtgacagagttattgtaagtggagaagaaaggtcactgtttgctttgtctagaggatatgtgaaggagattaacatgacaacagtaacttgtttattagacaggtaatgaaatgttactttttttgataacagctttattgatatataattcacatctgtgtagttcatccatttaaaatgtacaattcgctggtttttagtatattcacagcgttgtgcagctatcaccacaatcaactttgagtattttcatcaccccaaaaagaaactcccaaggaagaagccctataccctttagtagtcacttttcattttcctccaatttccccagcccgtggcaaccactaacctgctttctgtctctgtagatttgcccattctggacatctcatgtaaatggaatcatgcaatatgtggtctttggtgactgggttttttcac

SEQ ID NO: 7774 - DNA, 1090 bp, Homo sapiens
tttcagcctttggtgtctaatgttaaccctggagtcacaatcgaaggataataaaaagaatcaccaaaatatctggctaatgcctgcttcggaaatgtaagtggtccatttagtacagtaagatttcagtagtttggattagtgaatgaggtggcctttggaatttatgacaaatacaagttatgaagcatgttatagataacgtgatttcatttattcatgacaactgcagatggctctctattgtttctaagaagagcaccattcctgtgtatcctatgtgctgcaatcattgctagttagtaatatagtttcagtagactaaatatacctcaagaaatcttgttttaaaaattacttttctttgggaggccgaggtgggtggatcacctgaggtcaagagtttgagaccagcctggccaacatggcaaaaccccgtctttactaaaaatacaaaaattagctgggcgtggtggcgggtgcctgtaatcccagctacttgggagactgaggcaggagaatcgcttgaacctgggaggcggaggctgcagtcaaccaagatcctgccattgcactccagcctgggcaacaagagcaaaactgtcacaaaaaaacaaaaacaaaaaattagccgggcgtggtggcaggcgcctttaatcccagctactcaggagactgaggcaggagaattgctggaacccgggaggtggaggttacagtaagccaacatcgcaccactgcacttcaacctgggtgacagagcgagactctgtctcaaaaaaaaaaaaaaaattacttttgtcagggcgtcgggtcatgcctgtaatcccagcactttgggatgccgaagcaggtggatcacttcagctcaccagtttgagacccgcctgggcaacatggcaaaaccctgtctctacaaaaaatacaaaaattacctaggtgtggtcgtgcatgtctgtagtcccaggatgaggtgggaggatggcttgagccagaggtgaaggttgcagtgagctgagatcacaccactgcactccagcctgggtgatagagccagaccttgactcaaaaaaaaaaaattattttaaat

SEQ ID NO: 7775 - DNA, 1033 bp, Homo sapiens
atgtttattaattcatttgaaattaacatgtatattcatttttgctgtggttgttattgagacagtcttgctctgtcacccaggctggattgcaatggcatgacctcggctcactgcaacctccacctcctgggtcaatcaattctcctgcctcagcctcctgagtagctgggattacaggtgcctgccaccacacccggctaatttttgtgtttgtgagtagagacagggtttcaccatattggccaggctggtcttgaactcctgacctcaagtgatccactcgtcttggcttcccaaagtgttgggattataggtatgagccactgcacctagcctaaaatgtatttcattcaaaaatatcaatctatgcttgttaacataacattttaatgaaaaaactattgtaaaaaaatgtaatgaatgtcattgttttacatttttttcagtttctttttgctttctttcttccttatttattttttttgaggtaaggtgtctctctgttgcccaggctggagtgcaatgatgaaattatcacccactgtagcctcaaacaatcctccagcctctattttttttttttttttttttttttgagacggagtttcactcttgtttcccaggctggagtgcagtggcatgatctcagctcaccgaaacctccgccttccgggttcaagcaattatcttgcctcagcctcccgagtagctgggattacaggcatgcaccaccatgcctggctaattttgtatttttagtagagatggggtttctccacgttggtcaggctgatctcaaactcccaacctcaggtgatctgcccatctctgcctcccaaagtgctgagattacaggcatgagccacagagcctggccattttttttctttctttcttaaagctacagcacccaatattcccaggtggtctcccatccaagtagtaaccaagctcaaccctgcttagcttctgagataagatgagatcggctgcgttctgggtggtatgggtgtagaccaagcctctattt

SEQ ID NO: 7776 - DNA, 1050 bp, Homo sapiens
ctttgtcgcccaggctagagtgcaatggtgtgatctcggctcactgcaacctcggcctcctgggttcaagggattctcctgccttaacctcccaaatagctgggactacaggcgcctgccaccatgccttgctaatttttttgtatatttgatagagacggggtttcaccatgttggccaggctggtgtcgagctcctgacctcaggagatctgcccgccccgagctgccaaagtgctgggattgcaggcatgaagcactgcgcccagccgattttaaaaaattttttgtagagatgaggtctcactgtgtttcccaggctggtctcaaactcctagtctcaagtaatttttctacctcagcctccgaaagtgctgggattacaggtgcgagctactgtgcctggcctgttattcacctttttataaaaggagcaacccattttttcaagtcattactagatgtacagtattgtagagaagtctatattattgctttagaagcatgccaagctcgaagggctggcctggactctgacctatgctaaagcccatgtatgcactttattctactttcatctatacttttccccagtggcacatggtagggtcgaaatacatatttgctgaatgtataaatggatgactaattttatgggtaaaagttggttgtttcaatgaaaaatgatccagaagaagaggagtttacttcaaacagaacctggcaatcggataaataccttcaagtgtctgtctccgtaaaaatgttccagaagaagaggaggttacttcaaacagaacctggcagttggattaataccttgaagtgtctgtctccataaccacattttagcaagattcccagccttcctcaggtattagatgacgatttacactactaaaatttgttttagtaagttttagcagtgtaatcatgctcacttattaagttacaggaaatggggaccagtcatctgcatatctatacgctgtgggcagatttactcatggagactgaattagagattagagggtttgctggctgaacaact

SEQ ID NO: 7777 - DNA, 1192 bp, Homo sapiens
cagccggccggttttaattagaaactgtcaaagtatttctaaagtgtctattccattttgtatccccactgccttgttggcacttgatattaaatgtgagtatgtgtgtgtctgtgtgttccttttttttttggagacggagtctcactttgtcaccaggctggagtgcagtggcgcgatctcggctcactgcaacctctgcctcccaagttcaagtgattctcctgcctcagcctcccgagtagctgggactgcaggcacgtgccaccatgccggctaattttttgtagttttagtggagacggggtttcaccatgttagccaggatggtctcgatctcctgaccttgcgatctgcccgcctcaacgtcccaaaatgctgggattacagatgtgaggcaccatgcctggcccttcgcctggctaatttttgtatttttttttttttttttttgagacagagttttgctcttgttgcccaggctggagtgtaatggtgcaattgtgaatcactgcaacctctgcctcctggattcaagcaattctcctgcctcagcctcccgtgtagctgggattacaggcatgtgccaccaggcctagctaatttttgtatttttagtagagatagtgtttctccatgttggtcaggctggtttcgaacttctgacctcaggtgatctgcctgcctcggacttccaaagtgctgggattacaggtgtgggccactgcgcctggcctaatttttgtatttttagtagagacggggtttcaccaagttggccaggctggtcttgaaatcctgacctcaagtgatcctcccacctaggcctcccaaaatgctgggattataggcatgagccattgtgcccgggtcaattgtttatttacagattgtctatctaatattttttgaacatggatgactggtggtaactaaaactgcagaaagtgaaattgcagataaggggggactatcgtagtgtgaaagcaagttaagatactattaaataggctgggtgcggtggctcatgcctgtaatcccagtactttgggaggtagaggcgggtggatgacgagatcaggagttcaagaacagtctggccaacatggtgaaaccctctctctactaaagactaaaaaaagaaaaaattagctgggcgaggtggtgggttcctgtaatcccacctactcgg

SEQ ID NO: 7778 - DNA, 1597 bp, Homo sapiens
taaatcagagaacaaaatatctatggccgggtgcactggttcaggcctctattctcagcactttgggaggctgagtagcggggatagcttgagctaatgagttggagaccagcctgggcaacatagtgacacccagtctgtacaaaaaatacaaaaattagctgggcatggtggcgcccacctgttgtagtcccagctactcaggaggctgaggcaggagaatcacttgaacgcgagaggcggaggtcgcagtaagcccagatcgcagcactgcactcaagcctgagcaacagagccagattccgtgaaagggggaataaaaagagctatcgttgttggctaagttaaatgcactttgacaaacatgttgtgtaatgaccaccatagtcaagatatagagtagttccaaaatatttccacttttattttttttttgagacattctcgctttgttgcctaggctggagtgcagtggcctgattatcactgcaacctccacctcccgtgttcaagtgatcctcctgtctcagcttccagagtagctgggactaccggtgggtgccaccacttctggctaattttttttttttttttttttttttgagaaggaatctcactctgttgcctaggctagagtgcagtggtgcaatcttggctcactacaacctccagctcccaggttcaagtgattctcctgcctcagcctcccgagtagctgggactataggcgtgtgtcaccacacctggctaattttttgtatttttagtagagacggggtttcaccgtgttagcaaggatggtcttgatctcctgacctcgtgatccgcctgcctcggcctccgaaagtgctgggattacaggcatgagccaccgtgcctggcctaatttttgtattttcagtggagaccgggtttcaccattctggccagactggtctcgaattcctgaccttaagtgatccacctgccttggcctcccaatgtgttagaattacaggcatgagccactgtgcctggctttatttccacttttctttgacaatcctctcctctcatctgcaacccttgtcaaccactgatctgtttttctatctctgtagtcttgacttttccagaatattatataaatcgggtcatatagtatgtagccttttgagtctgacttccatcacttaccttaatgcatttaagattcattcacattgcacgtataagtaatgtatttccttcttttcttttttcttttttttttttgagacagagtctctctctgttgtccaggctggagtgcagcagcatgatctcagctcactgcaacttctggctcccgagttcaagcgattttaccgcctcaacctcccgattagctgggactacaggtggtgtgcgccatcacgcccagctcatttttgtatttttagtagagacgggtttcactatgttggccagactggtctccaattcctgacctcaagtgatctgcccacctcagcatcccaaagtgttaagattacaggcatggccgggcgcggtggctcacgcctgtaatcccagcactttgggaggccgaggcgggcggatcacgaggtcaggagat

SEQ ID NO: 7779 - DNA, 1022 bp, Homo sapiens
tcatgcctgtaggtttaattgcaggtgccagtttgctgatggctgccaaagttggagttcgtatgttgatgacatctgattagcagaatcagatgttccagcttggactcatgaaggattaaaaatctgcatcttccactattttcaatgtattaagagaaataagtgcagcatttttgcatctgatattttacctaaaaaaaaaagaccaaatttggcggaggggtggaaaatcagttgttaccattataaccctacagaggtggcgagcatgtaacacgggcttattgagaccctcatagagatcgattcttgtatattgattttatctcttctttctgtatctataggtaaatctcaagggtaaaatgttaggtgttgacattgagaaccctgaaaccccattccctgctcagaggaacagtgtgaaaaaaatctcttgagagatttagaatatcttttcttttgctcatcttagaccacagactgactttgaaattatgttaagtgaaatatcaatgaaaataaagtttactataaataataaaaaaaataaaaaaatcaaaacaaaacaaaaacaaacaaaaacaaacaaaaaagatcgctaagattcaagacaatgcttattaaaatgtacaccatttcccccatttcataatatattggggtacatgtcaaatgagggaaagctttcaaagaaggctttttaggtagttattgttatatatggtctgtatggtaattttgtgttgtctgtattcaaaaaccatttgtcattttggggatgagaataactttatttgaaacgctaattcgctgactaaccctgagtctgggaatgcctccaaaatgtctaggtgatgtattactctttatataggatacctattcattgtaagtttcacctttccttcaaagcaacccttggtacatcataggtttaacacccatagccacctacacattccttccagagcacatttacctttctccaaggtctaagccttggacctgggcatttg

SEQ ID NO: 7780 - DNA, 1050 bp, Homo sapiens
gtagcttatttacacaagggtatgcattcaattaaatatgtattgagtttatgtcttaagtaaattacttatggatctcatctagttgaagttctatatttaataaatgaaattatcaacatgcagactgagtaacaaagatgttggaaagttatttaagatgtaaacatgttgcaataatttgcctacagctatgccttttcagatagcctcactttccaataagaatgtatttcaattatgtttatgacctggtctatttggtactttgtagatgaattggaaacaagaggtaggtgagacagacaagcacaagaaaaaaaagaaatttcaacaatggctgaagagccattagaaatggaatttcaggccaggtggagtggctcatgcctatcatccttgcactttaggaggctgaagcaggaggatctcttggggccaagagtttgagaccagcctgggcaacatagtgagacagtctctacaaaaaaaaaaaaaaaaagaagaaaaaagaaaaaagaaatggaatatcaagggcagcatgatattttgtacgattctgcaataggcaggaattattctctcattaaaattggtaagtttgtagcatattatgaactgagtgggctattaggaggtcatgtatcagtgaattcaatgatcatactatgaacaaacgcagatttaaaacccaatttaagtgttataagagaggtataagaaaaggtgatcattacagtaaaacataatagaggggtagaaataatgttagatgaccagttttatgagagaaaatgtcatttcaaacaaatttatttccttgcttcatgagaaagagcattctaaaagcagtgtagccagcatacaatcacaatgctgcagaacattgaataagcttttaaaaaaaatcacagggcagagaatgggatggtaaattgttaaaatcaggaaagagagtccaacaaagtaggaatccaatttggttcccacagtggggtaatcagcttaagaagtccattcatgatgttaactacaacaacggaatggaaa

SEQ ID NO: 7781 - DNA, 1077 bp, Homo sapiens
ctgctacctctggcacttggaatttcagagacaaaaccccttttttaggcagcgagccctgattttcagttccaaagctatgggcactgctgagtgggaccagaggagtggtgtgcagtgagctacctggaggggttgcatgagaccatgtcccctctcctggatggaggtgtcttctggttgccaagaaagtattgagtgataatcagaaaaattccttgattttcatggtttgttgctttgtagcaggtcttaaggaaaaaaaaaaagtttttcatggtttgggacaggtccttagagatgggccacaccagccctggcacacctgagcccagtgttgggccacctcacacctctctcgcctctcttccagctttatctttgtcctgctctttctggagtcctttccttgcatcctgccagctggcatccccttcatccttgcacgcctaccttctacacaaagccttccatgaccatcccaagcctcagggctgattccgtgcagtgggcaggctgtagcctctctgttcacctctctgtgtcacatcttactgggtacatgcccagtaaattccccacaactgagattctgctttgcctgagcagtgccctctggctccttagggatgatgcttgctgaggggtttcctggctttaaggtcatggttcaggctgggctcagtggctcacacctgtaatcccagcactttgggaggccgaggtgggcagatcacttgaggccaggagtttgagactagcctggccaacatggtgaaaccccgtttctactatagccgggtgtggtggcaggtgcctgtaattccagctgcttgggaggctgaggcatgagaatcgcttgagcctggaaggtggaggcttcagtgagccgagagcatgccactgcactccagcctaagcgacagagccagattcgtccccctaccccccaaaaaggggtcatggttcagacctccattgtaggcccacccccttgctttactagctgagggaccttgcctaaattctttagcctctaggagcctaaatttccttatctgcaaaatggagattaat

SEQ ID NO: 7782 - DNA, 1046 bp, Homo sapiens
tggtgcaatcacggctcactgtaacctccagacttctgggctcaagcgatattcctgcctcagcctcccaagtagctaggactacaggcatacaccaccacacccagctaattttttttaaaaaagtgtttttgtagagacagggtctcattatgttgcccaggcttgtctcagtctcctggcttcaggtgatcctctgcctcggcctcatgaggtgctgggattacaggcatgagccaccatgcatggtctccattctctttgtttaaactcctcttttcactcttgattttggagctacctctctggctgatacttctgtctctttgagaagcactagttcttctggttagtccttaaatgttggtgttctccagagtactttctcctaggctggtcccatctactcccttcatttggcacctacatgtcagtgactctcaaatgcatttctctcctctagacctctcctgagctctaatctcatacctaatcctgcctactctcgacaactcctactactgattctgttttcctagaatggaactatttgtctttcccacccaccacctacctggacatgcagtccacaaatctgtgaattaatataaatcctaccatgaccctgatatgcaccataatgctagaaggaactttctcagacttaattgccctacttaatatcctttgatagttctctatcattttcaggataaaatctataaatcttttgcatagcacataggatcattcatgatcctccctctgtttctttttactgcctaccttgaactatattccaaacaaacaacttagccatccttgaatatgcacaagtagctactgcctggctttttcacctgtacctctcctcaacccctcgctttgtcggcaaattttaaaatgttctataagagacctcagagttcagatatgactgcttctggtaagcctcccttgacctctgagactgtgttagactcccaccttaccaatgtctgttgtctttattgatttttttatagttctctctcatcagactatga

SEQ ID NO: 7783 - DNA, 1024 bp, Homo sapiens
gacaagtaatttgtatcctgatgttttaactcagaggttgcaaactagacttggccccaggggcaaggcaagtcatttaagtgagtaaaattggctgactgtaagacagcagggaaattttgtcaagcaaaagtgttcagacatcatctgaaggggcagccactgcttagttcctgctgataattgtcacgtggataagtaggcatgggattgccagatgttgcagtttttcaaaaaaagcggaaactctgattttcaaatttacaaaaatcaggttcagctcatggaccatcagtttgcatcctctgttctgaattaatactggccagaacttggagaaatccatagagtctaatcttactgaaacccgaccaagatttgtccattttatagaccattaggttattcattttcacaatgtatattttttactcatgcaactacaaactttgttttttagcacgtcgcgtttggaaaaattatctcccagcaattaatgggattgtctttctggtggactgtgcagatcattctcgcctcgtggaatccaaagttgagcttaatgtatgttttgtcctttaatgtgtattttaatgtatattttgttcttttttggcctctatttttttttaaggaatatagctcagtagtgccaataattagtcattccagttaacatttggcaaaaagacctagttgcaggaggaaaatgttttaaatctaagacattgcttttcaatgtcctgaggaaactcagctcaaacttaaataaattaactgttgtttctatcatacagtgattatatggccaagtttgctcaggatactcctcatttatgcctgttgtcccagcataattaatagtattctgtttcacgtgtcatgaacagtaattctgttttttttttttttttttttttttttttgacggagtcttgctctgttgcccaggttggagtgcagtggcgcaatcttggcttactgcaacctccacctcctgggttcgagggattcttctgcttca

SEQ ID NO: 7784 - DNA, 1085 bp, Homo sapiens
ttactggcttgggaacttactgctatatcctgaaaagtattctttttttgcttttttgtttcttgagacagggtcttgctctgccacccaggctggggtgcagtgacacaatcatagctcacggcagcctcaaattcctgggctcaagcaatcctcttgcctcagcctcccaagtagctggaactacaagcacgtgccaccatgcctgactaattttaattttttttttttttttttgtagagatgcaggtctctctatgttacccaggctggtcttgaactcctgaggtcagggaggaatcccccacctcagccttgcaaaatgctgggattacaggtgtgagccacgggggcccggcctgaataagtattcttattttaagaaaatctatttgtaaaatgagtttgggtgtgattattcatgtatgaaaagattctcttcttatcccttaatggttctctaaaatagtgatgtcatttctttttataaattgagacccgtgtctgcaaaaatgattaaatattgagataacattggtaaatggagcagggcaagtggtgctggccagtagaattttgggtgacttttgttttttagagttgtttacaggatagattaatatgtttttcattcaaatcaatgtgcttttcattcttattttctatttagtgcatctaagtggcattctgattcacattattgataagactgatttcctagagttgttcttcactggatgacagcagtcgtatgtctagggaatgtgaatgaaccgctgcctggaggagtaagtcacacagtaaaagaaagtgtaggcatacctcggatatactgtgagtttagttccagactactgaaataaaacaagtacagtaaagcaagtaacacgaatattttggtttcctagtgcacataaaagttacgtttacactatactgtagtctgttaagtgtacagtagcattacgtcttagaaaatacgtaccttatttaaaaaatactttatggctaaaaaatgctaacaagcatcggagccttctgcgagtcataacctctttgctggttggggatcttacctccatgtt

SEQ ID NO: 7785 - DNA, 1034 bp, Homo sapiens
ttctattaacatttgtttgaatcatttagccctggaattcgcaagttttcattttaggtacattaatagtgttttgttgatagtttagagacctaccttaaattttagattactcttaacttctcgtaaggtggtacaatggaccaagaatagaaaataaatagaatgctagttattaaaataccattcaaaagatgtgatgagttgtaaggaagagaacttcggaagatcatcctctgtgtagttggtgggttaaagaagttttagtttttttttttttccccagcaattttgtggtttgggtttgaattttatgtactgttaacaggaagagcttaggctttggtgttagagatgagggtttaagccctggcactattactttttcaactgagccgtcttaaaggactcagcaaaactaggagtatcctcatctttatcttgttaaatgaggccagtgatccttgcctggtagggttggtgtggggatgaaatgagatgtacaagtactgtgcagattgtaaaactactgatgagttggtacaaatcctaagatcttaaggagagaggagccaccaaggccattttcagctgctgaggaggctgaggtgggaggatctcttgagcctgggaggttgaggctgcagtgagccatgatggcaacactgcacttcagccttggagacagagtcttggtctgtcttaagaaaaggggggcgggggcattttcttaactttgggtagcagtgcaacccgactctttggatctagtaagggtttttattatttttagctcacctgaagagtttcttcagtcagcctccactctcatcactcctttacaacccaacacttctatatacatttgtactacactggttttcagtcaatactttacagacttgtaaaaaatgtttacatcactttagaaatttttctttctttcttttttttgagatggagtttttgctcttgttgtccagactggagtgcaatgtcatgacctcggctcactacaacctctgcctcccggg

SEQ ID NO: 7786 - DNA, 1034 bp, Homo sapiens
tatagttgtgatctcagcaactcttagtgtgatcaatgcatttttttttcccaggtaaggaaacttgatgccttggcctggttatttaaagggtctgaatgagaacccaaatcactcaccactgagcccaggcctacacgtgctactgctctgatggcaattattttcaatctgataagcatatttgctctacaagggcctaacttgtgcttttgcacatgacgttctttacatttagaaaaagctgctcctactgcttcctgggagtctcaaggcagaaaggaatttacttttgcattaataagaatgttgtgcaaattgccatggtggaaaagtttttatgagttataaatttgaatcaattgctatatagttcattgctacctctgtcgatctttgagatctttccctgattattacaaaacctttaaattaaggaaatacttgccaggaataaggttaagcaatgagaatcacaaggttatgtggcaatctgaacttgaagtctgagagcaatttggcaatatctatcaaaaatttaaattcatacttaatctttgactcagcaattctaggaattcattctgcagaacagtcaaccaaacacatagtatacagcagctttgtttgcaatagcaaaatctggaaaagtacttaactgccccacagaggaatggctgaatctgttactcatacccacagcacttaaagagtgaaatcactgcatggactgatatggaaaagatgttcaaaatatataagtgaggagagaaaattgtagtactctatagtggtaaactatgacttgtgggccaaatccagcctgctgcctgttttgtaaataaaattttattggaacatagccaacatcttttcatttgcaaattgtctgtggctgccttccgtctacagtggagtgttcagtagttaggacagtgaccatatggccccaaaagccaaaagtatttactgtttgtctgtttacagaaaacattttccaatccctgctctatcatatgatcctatttgtgttt

SEQ ID NO: 7787 - DNA, 1076 bp, Homo sapiens
tctatttatttatttagagacggagttttgctcttgttgcccaggctggagtgcagtggtgcgatatcagctcactgcaacttccacctccagtgttcaagtgattctcctgcctcagcctctcgagtagctgggattacaggcttgcgccaccatgcccagctaatgttgtatttttagtagagacggggtttctccacgttggttaggctggtctcgaactcccaacctcaagtgatctgcccgccttggcctcccaaaatgctgggattacaggtgtgagccaccatgcctggccggggattttctattttttaatttgtttctaccaaatttcgaattgacagtgcacttttaagacagttgctttaaaatccctatcaggattcacctcagtgctggcatctgttgattgccctttctcatatgaattgtgattttcttggctcttagtatgatgggtggtcgtcaataatattggagacattttgtctattaggttgggagactgtaggtcctatttaaatctttcattttagcaggcagcactctgtttagctttcgcacatgggtcttggtctacagttgtggtctgtggttccagtggcggtttaattttcagcagctttgcagggttatcttggtctgcatggtttatccagtgctactgggctcctgtttgttcctgctggtgctgcctgaaggggctcattgttgtctttcagtggtggaagggggcgtcccccaactggtcccccacccctgctgccctagtgtctgaattggggagagagtcttgggccacagaaattaagcttcctgaagctttaggccacttgctatagctcggtctttccttcagctcagcctgcccacctacctgcctctgtagctcttggtggaaaaggtgtctcagggcttgcagggaggagagtccctcccctggttgcctgattctggctgggctcccagttgatctcccttgccagtggtgtcagcctcaccagaacaaaccccgtttgatcaggggagaaatgagccttttgctaagtcaggaggctgggtgacaggatgca

SEQ ID NO: 7788 - DNA, 2736 bp, Homo sapiens
gcacgcagccacgtacatatttttaacatacacaggaagagagggaagaagggtgagaagagaagcatttttagaattctgtagtgtacgtgggaaggaagatgagctgctacataccacctttagtgccacactgtatcacagtggtttccaaaccatgacccattgtgcccctctgagttccatggaggtgcccgctggacactggaggggaccctgagtgggctgatctccacattcccacctggccacaggctgcttcacccagaaaacagttctctcctccttagatgtcagaattctctgtaagatttttctggtaagaaaatgattctgccacttaaaaaaacaagtttgaaggctgggtgtggtggctcacacctgtcatcccagcactttgggaggctgaggcgggcggatcacttgagcccaggagttcgagaccagcctggccaacatggagaaaccatgtctctacaaaaaaaaaatacaaaaatttgctagatgtggtggcacacgtctgtaataccagctgctggggagactgaggcacgagaattgcttgaacctggaagatggaggttgcagtgagccatgattgctgccactgcactgcaatctgggcaagagagtgagaccctgtctcgaaattaaaaaaaaaagtttgaaaatcacactatgcaattagcatgaagtgtaaggaagcccaaaagaaaacacctgcatttgctgtagagaaattttgtatgtatgcctgttaattttcaggtaattcatagtaggattcattaaagcaagtatattagtctttgttatatgttaggtgtatttttgattctcaacaggaattctaatttgtttttcttttctctgaatacagtggataagtggttccatcaccagaaaaactaatgagatttctctggaatacaagctgatattgctacatcgtgttcatctggatgtattagaagtaaaagtagtagcttttcaaagctttaaatttgtagaactcatctaactaaagtaaattctgctgtgactaatccaatatactcagaatgttatccatctaaagcatttttcatatctcaactaagataacttttagcacatgcttaaatatcaaagcagttgtcatttggaagtcacttgtgaatagatgtgcaaggggagcacatattggatgtatatgttaccatatgttaggaaataaaattattttgctgaaacttggcttaggatatttttattttaatctgaagccaacattaagtaggtatgggtattttttggtgtttgttttctgttgatagtcttataattcaaatttataattattagacgaagaaatcgcttatatttatagtactcttgatactatgctctagtacataagtcctagcataccattctaaagcaaaagtttttaaatttatatcatattagcagaaagcacaatgttgctcaccctttgaagttatatattaatagttatttttttacttcttcagtcaactaattggacgcttaagtcatttatattatattctaagttatcagctgaacaaaccagtttgaatgccagcccatcttcttactagctctgtaatcttaagtcagtttaccaaccactcaacttcagttccttcatctgtgaaacagacattattcatgtaatggcatgtagtatgcattcagattcttttttttttttttgaaacagggtctcactgtcgcccaggctggagtgcagtggtgtgatctcggcccacttcaacctctgcctcctgggttcaagtgattctcctgcctcagcctcccaagtagctgggagtacaggcatgcaccacaatgcctgactaattctggtatttttagtagagacggggttcaccacgttggccgggctgctctcgaactcctgtcctcaagtgatccacccacctcagcctcccaaagtgctgggattagaggtgtgagccactgtgcccagcccattcagatttttttaatgaaaattttattgagatgaatatagattcacatgtagttctaaaaaagtaattcagagataattcaaataattctgtataccttaccctgtttctcctaaaagtaagattttgtaaaactatagtataacaaccaggacattgactttgatataatccaccaatcatatacagactccaaatccaccaatcatattcagacttcctagtttcactgtattaatgaatatttgtatgatgtattctatataatttataattctatagtgtaatcacctaggtaagtttatgtatcctataagatattgaacagtttcaacaccacaagatctctcgtgttgcccttttataatcacacccacctcccccctgtcttctgcacaccaccatccgtaacccctggcaaccactaatctgtcctccatttttctatgattttgtcatttcaagaatattatataaatggaatcatacagtatgtaacctttcaggattggcttttcactcagtgtaattccccggtattccttcaagttgccacatatatcaatgtttcattctttttattcattcctttttattgctgagtactttccatgatatgttttgttttacctgttgaaggacatctgggctgatccagtgtttggctattacagatacagctgcaatgaacatatttgtacatgttttcacgtcaacataaaacattttcatttct

SEQ ID NO: 7789 - DNA, 1027 bp, Homo sapiens
taaacatttcccagtgcattctgtaaagtttccatacttttagtgatattatgataatagaatgcatgctattctttatgcagattataaattggattgaagcggccgggcgcggtggctcacgcctgtaatcccagcactttgggaggccgaggcaggcgaatcatgaggtcaggagatcgagaccgtcctagctaacacgaaaccccatctctactaaaaatacaaaaaaattagccaggcatggtggtgggcacctgtagtcccagttactcaggaggctgaggcaggagaatggcgtgaacccgggaggcagagcttgcagtgagccgagattgcgccactgcactccagcctgggagacagagcgagactccttctcaaaaaaaaaaaataaattggagtgaagcaatgttatcttatacaaatataaataagcttttgttattgttgaatgtatttctcttcctcataatacttttcctaactgactttttaggatgtgtatctctgtttgcttgcattgagcaggagtttgttatttgaagtgcagtttgataacattgaggctagccattgttgatggctatacagaaacttaaaatttttaaagcagtgcacttttctgtcagccagaactaaagtattgttatgtacagtgcctgtactatccagcaaagtctagtcacatttaatacgtaacccatcaatggatatcaatctaatctatttttcttatcttttagtatgtaatagtgttgtgatcctctgacatagcctctgcctctggaccagggatagtacctcaagcctgtaatcccagtgctttgggaagccaaggcaggaggattgcttgagcccaggagtttgagaccagcctgggcaacatgacgagaccccatttctacaaaaaatttaaaaattagctgggcgtgtgcatgcttatagtcccagctactcaggaggctgaggtgagaggatcgctgaactgtggaggtcaaggctgcagtgagccttgttcgggcca

SEQ ID NO: 7790 - DNA, 1071 bp, Homo sapiens
ctttatgtctctctcaggtgcagagaaatagtaaacaactaaaaacaaagttatcattttgttttttaagtcataaagtttttgagtcatcgtatgacttgcttaactcatgacttttataaaataaaaggtaaagcatattaagatacgtatttgagactatggaggacttattcttcagtataatcaatgacagtgcaaaaaacattgattaccctgagctatgtactggtttccctatgacctagaagaaaataggacctataagtcctgttttcaactttaataggactgatgaaacatttactcatttaggtttttaaaatttgcttaaaggaacaatcttcaggtaaattctcaagaacttggcctctttcttatttcctgttagccaagtaaaactgtcttctagagtgtggttctgtaatgttgtcctgactttggctattgactctcaggtatgtgcaagaggtgaaataattggcgtgaaagttctaggcatattggctatgattgacgaaggggaaaccgactggaaagtcattgccattaatgtggatgatcctgatgcagccaattataatggtaagaaaatttgaaaagtctgaagtctttctaattaattcataagcaccaccatacttaacctataatgacagaattgtaagcccttaccttcaaactgttaaaggatggaggaacaaagcactggacaagcattatttctatgactgcacttgtaattaactaagtaaactttctccttcattccaggaaagaaaaaatctggtaggttcttactgtttttttggtcctttccttccccacataccagcactcagttggtatgtttatttattttaaaacatttaattgagatattcacatatcaaagagtcaccattgtaaaatgtacaattcagtggtttttagtatattcactaagttgtacaaccatcaccactctctaattgcagaacatttcatcagcccagaggaaatcctgtatccatgggcaatcactccctgtcccccttccctcagtccctgatgactgcagatctactttgt

SEQ ID NO: 7791 - DNA, 1050 bp, Homo sapiens
ttttctgaaactgttaacagagagctgagagctctgatgccagagcaatgactgagactccaaagcatggtaggattggaggatggagttctgggaagtcctaacagtgggagtaacaagatagtaaatccaagatccagctaagtaaaagctgaaaccagttgggattaaagaagaaggaatgaatttgtaactgggtagtacgaaatttcttaaaatcagtattttttaagtgcgtgaatattggaatcattagaatgcataaaaacagtaatagtttttatagcaactctgttgctataaaattcattgaatttctcatatcagttgccctgaaaaatcctaaatatcactgttgttcacctagtagcaactctttgaattgtagccagatgtctagaagaaggttgttctttagtagtaattcctgctaaagtatgtggaacaccccctccttacaagtacagagctgggcaggatggcttgcacctgtagtcccagctactagggatgcataggcaggaggatcacttgaggctaggaattagagaccagcctgctcaacatagtgtgacttcatctccaaaaacataattaaaaaacaattagccaggtgtggtggtgcacacctgtaggcccagctacttaggaggctgaggcaggaggattgcttgagaccaggagttggaggctgcagtgagctatgattgcgtcactgtactccagtctggatgacagagtgagaccccgtctctctctctctctctctttaaaaaaatgttttttaagagacagggtcttgctatgttggtcaggttggtcttgaactcttggcctcaagcggtcctcctgcctctgcctcccaaagtgctaggattatagacgttagtcgccacgcctggctgagacaagtattactacagcatctacatgcatttgaaagtgtgctagtattccatgcataaaaaatgatgagttcatgtcctttgtagggacatggatgaagctggaaaccatcattctcagcaaactgttgcaaggacaaaaaac

SEQ ID NO: 7792 - DNA, 1026 bp, Homo sapiens
tgagttgtaagagttacataggttattgactttctttagctagatgtcaatatacaacacgaacatcactttgcagtgcacgtctagaataatagtaattttgttcttgtgtgtgctgtcttactgtttttctgggcctgactattagatagaaatagacacattcattgcacttctaccaggaagtttgctgcagttctgtactgcctgaaattccaatttttacattgcttcccaggagccttcctgggtaagactccaattagaggcaatggagcaaacagccctaggccaattatgtgccacaaatacaggagggacttctaattggcatgtgtttttcctgtgggagtgtcagagtggtatttattcagaaactcgaatttgttacatctgatttcctgggagttgatataaactgcagaatccttccctcttcaattggccccattgggttggcttgaattatctgcttgttgtataatagcatgtatatcatactgtagcatctcagaccattttgagcaatgaagaggtataaaatgatgaccctaagtttattgataataccctggcatacaggtatgctacaggtaggaaaacattttcttgacatagagctattttcccagtgttctaagtgactgtattcctaccaaggaccagaatgatcatagatgttttggtacctactcttattgctgcttcaggttactccaaaataggaaacaggctacattttggtgtcctgttaagtgtgttcacttagattactctcagacactgaagccttataagggactggttgtgtctataaagtggattactcaaaggaagactctgcccttggcacgccctgtcccagctcaaaagcacaagttcttatgactctggattttaccagtagtctagacctcagtggaccttgggcagaagccttcctgcctgagaggctggaaggaattcttttgttttgttttaaaggaagttacttgtttaaaacacaaataaaggtgtggtagacat

SEQ ID NO: 7793 - DNA, 1026 bp, Homo sapiens
gggagtggtcttcctgctccaagggccctacatgcctggtgcctgggggtgggtgtgggcagagggcatggagaagctaggttaaagcaactgagttcatcctaacaggccagggtggtgaggacggggtgggtccctctgttcctcaggccatgccatcaaagctgctgctgtccacgtgtggtcaggagtcttaggcggtatttgggggtgggaagggggtgtgccagtgaacagtgtatgtcagtgccccacaggagttactattttctggagttctgggaagggaggagacggggagtgtcccctgggcacattacatttccaaacccggggagcaagggaaccgtcctcagaaaggctgttggggtgttggggtcacagtgtgctgttcctccccagcttcctacttcacttcagcccactgggtttactttttctaatagctgatgttacttagtggacaaaagagaaaagaagagggggctcaggaatgtgcagggacagcagggcagacatggaagctttgtgcggtcaatgggatgcttaggtttggttgtagcatgggatcaggcagatctactctgtcagaaacacattttcttttttttttttttaagatggagtctcgctgtgtcacccagggtggagtgcagtggcactatctctgctcactgccacctccacctccccagttcaagcgattcttctgcctcagcctcccgagtagctgggattacaggcacttgccaccacgcctggctaatttttgtatttttagtagagacaggatttaaccatgttggtcaggctggtctcaaactcctggcctcagatgatccacccatcatgtcctcccaaagtgttgggataataggcctgagccacagcacccggccagaaacacattttctggttctttcagtgcaacccaccactggaatagtggggtctgggagagtccatctcccctgagttatgcacaaggggcagaccccaattgcagatgatcaagagttcctacct

SEQ ID NO: 7794 - DNA, 1028 bp, Homo sapiens
gagcttggcagggagtggcaaagaggggaggggcagcaagaaaggatctgaagagcaaccatcgaggcctctccccacacaaaatccaagggtgtggtcaggtctgcccctttttttttttttttttgaggcagagtcttactctatcacccaggcgggagtgcagtggtacgatcttggctcactgcaacctccgcctcctgggttcaagcgattctcctgtctcagcctcccaagtagctgggattacaggcacccgccaccatgcccagctaatttttgtatttttagtaaagagggggtttcaccacgttggccaggctggtctcgaacttctgacctccagtgatccacctgcctctgcctcccacagtgttcggtttacaggtgtgagccaccacacctggccaggtcggcagattttattctagaattcgggctgatgttattccataaagctcagagggagagccccaaagggaaaatgagaagaataggtgcaatataggacctcatttctcttccaattctgttaagggctcagtgggagggagagaggttagagagagtgacagagacaaagaaacagagtgagagtcagggtgggcaaagggtggcttgttctggggccaaaaatgacacttcttcagaatgaaggcttcctcaggtccccagacccctccctaaacctgctacagctactctgtcccctcttctgtggccacagccccctccccaccacccacagttgtgtcctggggacagagccatccacctagatccccattaggccttagggaaattctaaaaaggggctccccttggctgggcttttcccctctctgggcccatctgtacaatgtgggggctgaaccaggcctataagggacataccagctctgacattcattgaataatgacttaagagatatctcagcccctccccttccatgtgccctgataatctgtggctgtgggggaagggagcagtcatcctccatccctccacccatggcttcccagagccc

SEQ ID NO: 7795 - DNA, 2001 bp, Homo sapiens
gggcccccattctggccatgtccagctctttcctccagctaggctccagcccatctccaccgccagccccaccccacagctggttctgctgctgtcctggggaaatgtgggcctgcttctcaaggcccgagctggtgtgtagcctaactcaggcaaggaggttctgcctgggagttagtgtgcaggctgctagcaggacgctgggtgccgggtgcaggtagatgaagggtcctgagccctgcctgcgtgggtactcatctgcaaactgctgcaggcatctgctgctctggactcgtgccttagaagttcccaaaactctgatggccacgtgttccctgtttttaagtgagatcctgtcctgggtcttcagcatctggtgccatccagctgacctaggacaagagaacaggtcctgttttggggtgatatctgatacattgatgggccgggaacggagtttttcatccgaagactaaactcagcttcctctctcctaccaggctgtcgagcattgcaaacgccatgtgtggaactaggaggaggaatattccatcttggcagaaaccacagcattggtttttttctacttgtgtgtctgggggaatgaacgcacagatctgtttgactttgttataaaaatagggctcccccacctcccccatttctgtgtcctttattgtagcattgctgtctgcaagggagcccctagcccctggcagacatagctgcttcagtgccccttttctctctgctagatggatgttgatgcactggaggtcttttagcctgcccttgcatggcgcctgctggaggaggagagagctctgctggcatgagccacagtttcttgactggaggccatcaaccctcttggttgaggccttgttctgagccctgacatgtgcttgggcactggtgggcctgggcttctgaggtggcctcctgccctgatcagggaccctccccgctttcctgggcctctcagttgaacaaagcagcaaaacaaaggcagttttatatgaaagattagaagcctggaataatcaggctttttaaatgatgtaattcccactgtaatagcatagggattttggaagcagctgctggtggcttgggacatcagtggggccaagggttctctgtccctggttcaactgtgatttggctttcccgtgtctttcctggtgatgccttgtttggggttctgtgggtttgggtgggaagagggccatctgcctgaatgtaacctgctagctctccgaaggccctgcgggcctggcttgtgtgagcgtgtggacagtggtggccgcgctgtgcctgctcgtgttgcctacatgtccctggctgttgaggcgctgcttcagcctgcacccctcccttgtctcatagatgctccttttgaccttttcaaataaatatggatggcgagctcctaggcctctggcttcctggtagagggcggcatgccgaagggtctgctgggtgtggattggatgctggggtgtgggggttggaagctgtctgtggcccacttgggcacccacgcttctgtccacttctggttgccaggagacagcaagcaaagccagcaggacatgaagttgctattaaatggacttcgtgatttttgttttgcactaaagtttctgtgatttaacaataaaattctgttagccagatctgggcctaatgtttctgtgacccttcagctggaagagtttgttcctctctgatgagctctgagcccatgacacctttggggcccagcactcccatgacccatcttggccagagaatgaaagcaaagtggataaaggaagatcccacctcatcctccccaagactcagggccagcagtaggtcaggcgcacctgaaggtcggctctgctcttcacctgcccctgtccctgctccctagaggccagagtcagagcacgttgccagttccttgagagttgccttgatttttaaacaaaccattccagaaacttgtagtgagta

SEQ ID NO: 7796 - DNA, 1060 bp, Homo sapiens
cttttgtgccccactatgctcggacacccccagagctggacctgtgtccccactttcctttatagtgtgatcagtttgtggcagagtacgagcccgtgctgatcgagatcctggtggaggtgatggatccttccttcgtgtgcttggtgagcctcactgggtggtgtggtcctctcgggcagctgtaacctggggggctgcagagacccggaagggttgctctgagacttggccgtggggtggagtctctgggttctgctgcgggagagccaagaaggtagggagccagccccccaagccccatcgctttcctcagcaaccctgatgttctgaaagagcgtggtggagctgtgatcctagctccttctggaaactgttttcttagttttgaaagcgatacatcgggcagctctcattctccccctttcttctttccttttctcaccatatagaaaattggagcctgcccctcggcccataagcccttgttgggaactgagaagtgtatatggggcccaagctactggtgccagaacacagagacagcagcccagtgcaatgtgagtagctcagcagacagtgtcaccagcctgtcttgccctggggtagcctgtgtgagaatcctgctttaatgggaacccagtgatcaactctccaccctgcttttatgttatcagaaagctgaggcccagagaggtggttaggcttactcatggtcccctagaaaagacagggtgaactacactcttgtagtgaagggtggggtggattttatttatttattttttttagtatttttttgcttctgctttgttgcttttgtcttcatttcccttgtgacagtgtcagacttgtacaaggtcactccagggattgtacaaggtctgtgggattcattgcccagagctttgcccaggtcctgtcccccgggaacatgtttgcccttgctgaagccgggcccgagtcctcactcaaggccctgagaactggcccctgcccagcagccctagggcactgtggccctggcctggcctggcagccaccagttgggtgacttgtg

SEQ ID NO: 7797 - DNA, 1025 bp, Homo sapiens
agacctgaagtgtgttcaacattctgtcttctagatagtggaccgatagtgagcccctcactttgcttttggtccttcatcctcctccccaaaatgaaccctgaatgatgaaatgattgtaaccgaacacatcatcaggacagctcttcggggtggggaagggactttctgtctcctgaactgtgaattcctgggttttgttttggtggggttagggggaggtgggggtggtagaggattggggaagggggtgaatgtaaaaatagggaattaacttggatattagaagccacacgccatttggaattcaggaggcagtggcccttgatgtgctaacccaccctggtctctgtgtcccctttcctttaggggagcaagaccaagggctgtgagtcccagcattgaaagtactctccttctactctttccacagaagcacgaggtcccagcaaagtctgatgtttactgtgaggtgtgtgaattcctggtgaaggaggtgaccaagctgattgacaacaacaagactgaggtatgctgtcctcctggcagagggagggcctctcctgcccccccgagcctgaatgtcccagtgggaaagtcccacaggagagagggcttggcccagccttgacatgtgtacagccatgtccccatctcgtggaaggcaatcctcaccagtgggacctctaggctggcgggggtccggggaggtggacaccattgccctgctttgtagtttggtagttttttgtgggtggaaacggcacccaccattgactcatttcctggccatgttagtattttcagaatgtcccccaacccttgtccggcctcccgtcttctcacacgatcctctcgtgtgtttcagaaagaaatactcgacgcttttgacaaaatgtgctcgaagctgccgaagtccctgtcggaagagtgccaggaggtggtggacacgtacggcagctccatcctgtccatcctgctggaggaggtcagccctgagctggtgtgcagcatgctgcacctct

SEQ ID NO: 7798 - DNA, 1014 bp, Homo sapiens
cgttctgtcacccaagctggagtgcagtggtgtgatcatggttcactgcagcctcaacctctgaggcttaagtgatcctcccaccttagcctcctaagtagctgggagtacaaatgcacaccaccacacctggctaatttttgtattttttgttttgccatgttgctcagactggtctcaaactcctgggttcaagcgatctgcctgcctcggcttcccaaagtgctgggattacaggtgtgagccactgtgcctggccaacctttttatttatactaaaccccctttttataccatactgttactataatgaacacttaatcgattttaagcctatcagtaatttgagagcctgtaaagcatcttaggaactggtcagcaagtgccccctaatgctgcagccctgagtatataaggacgttttcctaggaatttgagtcctcttaagttgcaaacctaactgcctcttctgtaggataatggggacgtttgccaggactgcattcagatggtgactgacatccagactgctgtacggaccaactccacctttgtccaggccttggtggaacatgtcaaggaggagtgtgaccgcctgggccctggcatggccgacatagtgagccttgtgtccttgtgcattggggatgttctgggcctgggagttgggctgtggaggctggagtagggcgttcagacaacatccttctcttttttcccagaaagcagcttgaataggtagtgcagacttgaatctattttggttaatggcatctggatatgtaacaaaactgggaacaaaaagtaggagactgtttctgggaagattttgtttcctgccaggcaccctgtgtattaggaacactgtagaaatactttttgcccccattttttttttttttttttgagactgagtgttgctctgttgcccaggctggagtgcagtggcgtgatctcagctcactgcaacctctacctcatgggttccagggattctcctgccttagcctcccg

SEQ ID NO: 7799 - DNA, 1065 bp, Homo sapiens
aaggatcaaggagaaaagattttagggtatatgagccgtatactgtccctgtcacacagtctctttttaaaaatgtaaaaagaatgtaaacaccattccttgagttctgggttgtacagaaataagctgaagggcctactttgctgaccccgggactaaatgcccaaagttaattgagatgttgtattgcatgccactaatacctaggtccattttggccatctctgcttagaattccctgtgcctgcgagactgcaggtccagggattttcattttgaatgctcatgtctgcttttgcctgattgacctaatagagccataggtaacatggccaagtccttttccctgagggctggctgttttccaggcttggtttttctgggagctattgagggcctcttgccttcagcccatttatttccagggaggaaagcctatcgtgattctgaccctggtgtcctctcgtaggaggagatccttgtttacttggagaagacctgtgactggcttccgaaaccgaacatgtctgcttcatgcaaggagatagtggactcctacctccctgtcatcctggacatcattaaaggagaaatggtaagtgatggggaataggcttttccttgaaggtgcttctggggcccaggagaggcagtggcccagagtagattgattaaaatggaaagtctgttcttagctctggaattcctcaacagcattttgctacaatttgacatccagaatagctcctttggcacagcaggccactctgtatgtaacttgccctggggttagcgagggtgcggctgctggggactggtcggactgctgaaggaatgtaaaccggcataaccttcagagatgtgagttggatacatcatgtccaatctttaactgacccctttgagcaggcacaaaacctcacttctgtgaatttatttctgtgaacttataatcaaggaataattcagggaatgtattggggtctttcattcatcaagtatgtattgtacacagacacaaaccctgtgtcacagactgggtttttagcaaagaacacggagcta

SEQ ID NO: 7800 - DNA, 1044 bp, Homo sapiens
gatcatccgtgtccatttccctttctccctctccaatctctcacagattgaaaaacgtctcaggtccttctcctccgatcctgatacttatatcaaagaatttaaatatcttacccaatcttatgaactcacttggcatgatctctacattatcctctcttctatactctccttccagaagagaaggaaagagtgtggcttgtagcacaggcacacactgacgatcttcatgggcaagatcctgctaagcccataggagccactgctgttccccaggaagagccttcctgggagtaccaacccacagaccccagctgggcgtctgtaactatatgattacttgcctcattgcaggccttaacaaagctgccgggtaatggccaggcgctatggctcacacctgtaatcccaaaactttgggaggtcgaggtgggcggatcacgaggtcaggaaatcgagaccatcctggctaacaccgtgaaaccacgtctctggactcttcagaggactcttcccagagtcctctcttcctgctgtagctcatgatagattttcagatgtttggtgggcactcatacaggcacctgattgttacctgagagacacaagcaaatcctattccccatataattatccaccctttgattaaatttaaagggctatgtcactctcatatgagtgacatagaaaggggaatgcctttgttgtactgcttgctgtaaagaatgaaataaaagattaagttggtcattagtcacattttgaattaaggcacattcaatattttgtgtggcttgcactacataggctgaatcagaaacagtgtttattggctgtttaaaagtttttaacactgttatcacagccataagttcagcattttgagcagaagcaaagtcagtttgaaaaacttgttgttgaggtcccacaaatgaggcctttccattactagatccatcagtaaaaacagtaatggccccttcaataggggctttttgagtaatggaaggcaatatccatgatattaatttaagaaattggaat

SEQ ID NO: 7801 - DNA, 1031 bp, Homo sapiens
ggttttgactattctcagtatctcatataagtggaatcatacagtgacttgtctttttgtgactggcttatttcacttagcataatgtcctcaaggttcatccatgttgtgtcaggtgacaggatttccttcctgtattatacatataatggaatgttccgttacatgtgcgtaccacactctgttcctccatcagtgaacacttggcttgcttcctcttgactattgggagtagtgctaatacagacacgggggtgcaaatatctctttgagactctgcctttaattcctttaccacccagagttttatctttagcaaaataaccattaaagttgtttgccttttactttgcttggtctatcattttcctaccaaagtttgtcctcttaatatttgttggattcctgttccttcaccccatccccaccctcatcttcccatgcccctgatggagttgcagtgttgcagcccttttttgtttacttttcaaggcagcagcaaaagaaactgatgatatcagcaggactgtgcagagttccctggaagaatgtcagccacaggaggccctcactcctccctcaccacggaccagcagagggaggcgggaatgctggggagccccagcctcccacccctgcctcctcacattcttcctccctccatgtcctctccttcttctccttccttattcttgccttgattctttctctctttatattctttaactgcacttctgaactctgtgttaagttgctacattgtgaggactgtgtctaacagtgagatttattattgggactgcacaaatcacttgtgaataaaatgtttaacggtgtttctgttagtatgatcacatagttcacatagtttgaatttgaccccttcctgtgttgggatacaatgttgccctcacttatttaccagcatagctggatcattcatggaggacttacatattagtacctgcaaggttgattttttttttttttttttttttgagacggagtctcgctctgtcgcccaggctgga

SEQ ID NO: 7802 - DNA, 1016 bp, Homo sapiens
atttgaatgggaaaaaaatatcctgttaaacaattgaagacattttgatggttgcttgctaatcaactgaccaactgctaaccaactataccaatctttcagcaggcattttcaagtgagaacagccttgactggaattcggtaataatttggacagtatttgagggtttaaaaaagagcagcaggccgggcgcagtggctcacacctgtaatcccatcactttgggaggccaaggcaggtgaatcagttgaacccaagagtttgagatcagcctgggcaaccaaaacttgtgtctacaaaacatacaaaaattagccagcctggacaacaaggcaagatcctgtctcaggaaacaacaacaacaacaacaaaaacaagcagcagagctttccacttttgcttgggttattattcaaatcatatactcttcccgaattgttgaaaagaagtgtcatatggatcagatattatctaaggacacgttcattaagatgtctgccttcagtcctggttcaggacttaagaaggtgagactcttcatcttctgaaaaaaaaaattgatattattaatgtttatttctttttttgagaaggtaaatttatttttctttatagcttatgtcaaatacgtcaagtgcttttgggatctctgatatgaaagattctgttgaaatatcaggttatagtttaccctaccttatgagttttctattgctgtgtaaaaaattaccacaatcgtagcagcctaaaaccacacccatgtatcatctcacagttctctggtagtttcatagtactgcaggtcggaagacccagtgggctggactgggttgtctgcttagggtctcacaaggccaaaatcaagatgttgaccagactggtatctcatctggaggctcttgggaagaatcaacttccatgtgcattcaggttgttggcagaattcagatccttgtgtctatatgtctgaaagtgccgtttccttgacacgtgactgctctggcttcaccaaatc

SEQ ID NO: 7803 - DNA, 1032 bp, Homo sapiens
gctggaaccggcacacaccaccaagcctggctaattttttgaattatttgtagagatggggttttactatgtttcccaggctggtcttgaactcctggacaaaagtgatcctcccaccttggtctcccaaagtgttgggatgagccactgtgcccaactaccatatcccatattaccttttaaatatctcttttttttttttttaaagacagggctttgctttgttacccaggctgcagtgcagtggtgcgatctcggctcactgtagccttgacttcctgggctcaagtgatcctcccacttaaaccccccaaatagctgggactacaggtgtgtgccaccatgcctggctaattttttgtatttttggtagagacagggtttctccatattgcccaggccggtcttgaactctggaactcaagcagtccacccgccttggcctcccagtgggctggcattacaagtgtgttaaatatcttttgaatctaccagctgtctgtatcttcactgctacctctctgccttttctgtggattacttaaaatagcctgcttattggtctctacacacacacacacacaaacacacacacacacacattttttttgagatggagtcttactctgtcacccaggctggtgtgcagtggcatgatcttggctcactgcaacctcctcccctttggttcaaacgattttcttgcatcagcttcctgagtagctggaactacaggcctgcactactacacctggctaatttttgtatttttagtagaggtggggttttaccatgttggccaggctggtctcgacctcctgacctcaggtgatccacctgcctcggcctcccaaagtgttgggattacaggcgtgagccaccgcacccggccacaaatgttttcatttcatccaccttgatagcattctgaaacacctattaaagataaaattctcctggaatatgaccaaatcaggctctagtgacattttttcctaagaaacatgattttagaaagttgtggctcagttt

SEQ ID NO: 7804 - DNA, 1057 bp, Homo sapiens
taccttggacaaaggatacacctgaaccagaatagttttcttaccctcacattgaaatgaggattttgcttaaaacagcacttgccgccagtgggaggagggaggttttatttattcccacagtttctcctgggccttctggaatgaccatgttttcctgtggcggtgggtgtgtcattgcgcccgccgtcttccaaagccttacttccccaagctgccagccaggaggtgataaccaccctcccagagtttctctcggctctttttttaaaagtcccccaacaaataggattcttgctgggaaaggaagttcggtaaggaaatgtcaaatctggtttttaaacaaggtccaaccctgcaatgaagcagccacttcagcccagagagattataagaactgatgtggccagagtgcctacccactgtggccccggtgctctgcccccacgccccgaccatctggtcttggtagatgtccctagacgggctgagccatgtgcaataagaacatagatcctaaaggatcctctggaagctgtatttcttgaattagaattctcaaattgtacatctgttaatatatgtttattatgtgactggccgtggtgggtctgcattgagcagggaggcctaaggggtgggggggagggggcacaagcccctgctgctgctgacactgtccagcctgtgccacaaggagctctagatgatgagcctgaatttcccccgacccctggccctggctaacagccacttaagccacacatgctgttccagaactaactccatccaggcagaggggtgctcaggtgactggggggctgcaggacctgagcagtctgggtccctggggtccccagcgccagtcctggctgggcatctgggccacgaccatcaccctctgcttttccctctcccaatccctcccccccacaccctcaggcctgccatgtgcccgcagagcattcgaaattcccggccccagcctggagctcgatcccactcaggagccagatcctgggaaaagtgttgcgagtttgtttccatcgtccttccc

SEQ ID NO: 7805 - DNA, 1050 bp, Homo sapiens
tttatttagaccatgcttatttttaaaggttggtccagatattgatttgactttaattatctatcatgataggtgaattcatatttcattgtgagtttacacttaaaagcaataaggggcattggaggcatctcccttgaaggaagagtatttgagcattggcaggagttaatttaggatctgaagaccttgcaaaagagctctaaaatgaaaggacaaattttgtcagatgatgaaaatctgcggtgttaaattacttttggcccagaatttctagcctgtgttagcaacgagattaagattgattgtcctctcatgttgattaaatagtttgtgaacatagcaattaactaaagtgagtgtcaaggaagggcctttgctcctaaggttacgagtccatctctctaggaccatttcctataaaaggggaatcaccatctgctttctaattgcttcttttattccactttggatttgttaacatgaaaatgtaagttttcatttggctgacattaatcagtttctgtgtgaggttctgtatcaaggtatcaaacaagacctaagagattgaaggtcctagtggtggtattaaatttttgcatataaattaatgaccatgcaatgtttcacagccatttttctcttcctttctaacagccttgttagatactgtatttttgagaatatagagacagaaagagaagttaataacccattcagagtctggtctaaaatccaaggcttcctattccagatcttgtcttttccttaagaaagtgctgtttctcctaatcatactcttcctgtaaagcagtgcttctctactataggatcacttgaggaatttttaaggaatgtggttgtttgggccctcttcaaatcaattaaatcagaggctcagtaggtgggtccaggcatcagtgttctggggttttcttaaccctctgcatgagaaattccagaagtgtttcttaaagggtgatatggtttggctgtgtccccacccagatctcatgttgaattgtagttcccataatccccatatgtcct

SEQ ID NO: 7806 - DNA, 1101 bp, Homo sapiens
tgctatagagttgaaagcccactaacatactgcgtagaaggccgggcatggtggctcatgcctgtaatcccagcactttgggagtccaaggcgggcagatcacgaagtcaggagattgagaccatcctgtccaacatggtgaaaccccatctctactaacaatacaaaaaactagctgggcatggtggcgcgtgcctgtagtcccagctacttgggaggctgaggcaggggaatcgcttgaaccggggaggtggaggttgcagtaagccaagattgcgccactgcactccagcctggtgacagagtgagattctgtctcaaaaaaaaacatattgtgtagcatgcccatgagggaaaatattataaagcagattaggggtttcatgcatgtgttcctacacatagcctacacccaaatgcagaagaaaagagatgtaaaagacagttgtatctaagatacttactctagaaggctctcttttgtttgacattcatgtggaactatctgtaggctttggaccaagatgtgctaagactgttccttttgccagtcagcagttcctcatgtgaggagaccaatagactcttgtgaaagaatgcagcctaacatgtagtaagtgttctgtaagtggctagtaatactgaatccattcttcccatatcatggcataagtctagtgctatggtttcattatacaccacctcaccccccccgatcaaagttcatgtattggaaatttaattgctgttgtatcactgttaagaggcaggggctttaaggggtgattaggtcatgaggggtctgctatcataaatgcattaatgtcattttcatggaagtggctattgctgtggtagtgggctcctgattaaagagtaagtttggcccccatttaccctctgtcttacatgtttgcttgcccatccaccatgaaaggacccctgccagatattggtgccatgctcttggacttcccagcctccaaaaccatgagccaaataaacttctgttctttatcaattatccaatctgtggtattcttttataccagcagaaaatggacgaagacgtccagtagaataagtaccttcttattgatg

SEQ ID NO: 7807 - DNA, 1025 bp, Homo sapiens
gaggattaaatgggataatataagcaaattgtttagaatagtgcctgtcatagagcaattactttagtgtttattagaaatgttggtaggatcatcatcatcatcatcataactaccactagctaagagtgacatttctacttattgtccacaggatgtttcgtctgaactcactttctgctttggcagaactggctgtgggttctcgatggtaccatggaggatcacagcccatccagatccggcgaagactaatgatggtggctttcctgggagcatctgcagtaactgcaagtactggtcttttgtggaagaggtgagtgttatccaaccatcttgttcttgcgtatacttttattcttccagtcatctctgttgtcagaaaggagttgatttctggcttaactctgtatcagaatttcttgctcggatcatttggtattgttaatattcgtctatgaaataagatgtttcaaagaattcaacatgctaaggcaatacttaggaaacactgtgcttcaaggtctgcctgtctcctctgctgaacattttaaataatgggatagggatagcaatagcagctttagaaaatgaaggctttctggccaggcgcggtggcttacacctgtaatcccagcactttgggagcccaaggtggttggatcacttgaagtcaggagtttgagaccagcttggccaacatggcaaaaacccatctctacaaaaatacaaaaaatagccagacacagggcgtgagcctgtagtccctgctacttgggaggctgaggcaggagaattgtttgaacctgggaggcaggtggaggttgcagtgagccaagattgtgccattgtactccagcctgggtgacagagaaaaactgtctccaaaaaaaaaaaaaaaaaaaaaaagaaaatgaatgctttctgagacttcacaatttggtgaccctgtgaaattaacaaaggaaccttggtactttagtgtccctgataatttttttcactagttatggaaacttccttgg

SEQ ID NO: 7808 - DNA, 1140 bp, Homo sapiens
aatacaaaaggaattagccaggcatggtgtcaggtgcctgtaatttcaggtacttgggaggctgaggcaggagaatcgcttgaacccgggaggcagaggttgcagtgagccgagattgcgccattgctctccagcctgggcaacaagagtgaaactccatctcaaaaaaaaaaaaaaaagaaagaaaagtgtgtggaattttgggaaatgctctttctgcatgaattgagatgaccatgtagatttttcttcattctgttaatgttgtatattgcattaattagttttcatctgttgaaccatccttggattctaggaataaatcccactttgtcatggtgtctaagtgtttttttatgctgctgcatttggtttgccggtattttgtttaggatttttacaccagtattcataagggatattggtctatagttttcttgtagtgtctttgtctggctttgatattagtgtaatattggcctcaaagaatgagttaggaagtgtttcctcttcttcaatcttgtggaaatgttcttagtaggattggtgttagtttttctttaaatgtttagtagaattcaccagtgaaaccatctggaccaggaattttctttgttgggagaattcttttttttttccttgaaacagggtctcaggctgggcatggtggctccacacctgtaatcccagcactttgggaggctgtggcaggcagatcacgaggtcaggagtttgagaccagcctgaccaacatgtgaaaccccgtttgcactaaaaatacaaaaattagccaggcatgatggcaggtgcctgtaatcccagctactcaggaggctgaggcaggagaatcgcttgaacctgggaggtggaggttgcagtgagccaggatcgggccactgcattccggcctggatgacagagcgaggctctgtctcaaaaaaaaaaaaacaaaaaaaccagggcctcactttgtcgcccaggctggagtccagtgttgaatgttggctcactgcaacctctgcctcttgggttcaagcaatcctcctgcctcagcctctcgagtagctgagattccaggcgcacacaccacgcctggctaatgtttgtatttttggtagagatggggtttagccatgttgc

SEQ ID NO: 7809 - DNA, 1032 bp, Homo sapiens
aacttaagcagtaagcagaatttttttcttataaaatattagcattatgtagctcagactaaagaccccatgacttccaccatagtcagttcctataccttacctggaaagaacgttgttttgtttggtatggttttttaaagaattttttgaagttctcaatgtaggtggctttcaatatagcctccttacattaatccaactgttttcatataagcattataataaatttgattagttttttccttcccaacctctaacagtagaatgtgacatttaaaaaaaattacaatatccattaataaagatgatactaagcaagaaaatgaactaaatgccttcagtaaaggtttattgtcctatatattaaatattatggctttaaaaataacagctattagtctccatgtaatgaaacattatcaataaaactaatattcctcttattcttagtgcctggctctctggctatgaaaatcctgtggtgtctcgaattaatatgagaatacaagatctaacaggactagatgtttccacagcagaggaattacaggtaggtaatcacattatccttaagtcatttttacacttcaggagatgcttgagaggagatttcctgacactgaacaggcagtcctcaatttgcatgatagtttgggaccttaaaaagtgaccctgtaagctgcaaccatgcaaagtgattttaataatgggaaaaattgtgattgttctgtgacttttaaatttcttgtcaaaacatgaaaactcttatctagggaaatgaaaaatatagatcactaatacttactaagtacactgtaattttttttctatcccccaggcctcactttgcctgtcaagtggccagggtgggttttaaaaaatagtgggtttttttcctttttatttatttatttttaagcaaacagttttcctttatttgtaatagtgaaacataggacttttttcatcacttctctttttctgttacttttatgtctataaatcatttgtcatcaaaagtagctgtcc

SEQ ID NO: 7810 - DNA, 1058 bp, Homo sapiens
tttacacattttttgtcataaagtttgtaaatagctaaatcctctagatttgcatgcttctaggaagcatataaaacaaaattacggccaggagtggtggctcacgcctgtaatcccagcactttgggaggccaaggtgggtggatcacaaggtcaggagatcaagaccatcctcacaaacatggtaaaaccccatctctactaaaaatacaaaaattagctgggtgtggtggcgcgcctgtaatcccagctactcgggaggctgaggcaggagaatggcttgaacccgggaggtagagattgcagtgagccgagatcatgccactgcactccagcctggcgacagagagagatccatctcaaaaaaaaaaaaaaaaaaattcatgaattcgatgttttggaagactgtttgtttttggaaattttctatgtatgcaatgacccttttgaagaaatatccagcccacagtcaatggactgttgccaataaatcaaaataaatcactgtaggaaagtgatctatacacttaaaaaaaaaaactaaatattgctaaacatttcaaacctattttttaaatattctaactttgtagctcttaagcagttttattggatttttgagaaaggtacaaccatacttacatattataaatgatagcagaaggtatttagctactagcattagaaggccgggcatggtggctcatgcctgtaatatcagcactttgggaggctgaggtgagaggatggtttgagcccaggagcttgagaccagcctggatagtatagctagaccttgtctctatttacaaaaaattaagaaaaaaattagctgagagtgatggtgcacgtctgtagtcccagctacccaggaggcttaggtgggtagatcacttgagcctgggaagcagagattgcagtgagctgagattgcaccactgcactccaggctgggtgacagagcaaaaactctgtctcaaaaaaaaaaaaaaaaaaaaaaaaggccatctcagttgccaaatggaagaaaattcgtgttctgatgtcagttaatttaa

SEQ ID NO: 7811 - DNA, 1050 bp, Homo sapiens
gcacaatggtggctcactgcagctttgaactcctgggctcaagcaatcctcccacctcagcctcctcagtagctagcactacaagcatagaccaccacgccaggccaatttaaaaatttttctttcttagaaacaaggtcttgctatgttgcccaggctgatctcaaattcttggcctcatgtgatccttccacctcagcctcccacagcgctagggattacacgcgtgagccatggttcctggcccctgaaccattttttaaaggaaatcgatatatttattctcaagtaatgaactaagttgttttataatgtgaaccttggcactttgttgttttaatctgtagtagtcattctataatgctatgagagagtatatatattttaatttttcttagaattttgtttgtagcataagagatattatagccttctataaaacttataaaacttgcttgtaaaattccatatagagattgcaactgagagttggtcgtaaaactaaaaatattgttgggaacagagcaggtcaaaactcccatgattgatctaataatggaattatactggtaaaaagccactgcacttcagcctgggcaacatggcaagactctgtctctaaaaagagacaaaacagcataaaaatatgcttgatataaactctagccctcttctagttatttgttcatttgtacattttcatttcacgcctgtaatcctagtagtttgggaggctgaggctggcagatcacttgaggtcaggagttcgagaggagcttagtcaacatggtgaaaacccgtctctactaaaaatataaaagttagccgggcctggtggtgggcacctttaatcccagctagtcgggaggctgaggcaggagaattgcttgaaccgggagttggaggttgccatgagccaagattgcactgctgcattccagcctgggtgacagagcgagactccatctcaaaaaaaaaaaaaaaaaaaaaaaaaaaaaaaaaggcctggtctcttgctgttcaaaatacgtagctggctggacacagttg

SEQ ID NO: 7812 - DNA, 1030 bp, Homo sapiens
acagttgggcaaaatcatctaacaaagcctattttataataaagtgttgaatagctcatgtaatttattgaatattgtaccgaaagtgaaccacagaatggttgtggggtcaaagtatgttttgtttttgttttgagacggagtctcgctctgttgcccaggctagagtgtggtggtgccatcttggctcactgtaaactccacctcccaggttcaggcgattcttctgcctcagcctcctgagttactggaattggaggcacacgctaccacgcccatagtagagacagggtttcaccctgtttgtcaggctggtctcgaactcctgacctcgtgatccgccagcctccgcctcccaaagtgctgggattacaggcgtgagccactgtgcctggcccaaagtatgttttttattgaatggcatatcacttttgcaccatcataaagttgaaaaatcctaagtcaaactgtcctatgttggggatcatttgtatttactatatggtagaacttttaagatctgttcccaggtttgattgacctgttgagtctgtgggactggacttccctggaataagaactgtaggaaagttttgtgtttggatgaatgtaaacttcacatttatttttatccaggcctacctgaaaatgttttctggtaggatttcttccatactgctttttttcttatagtttaaaaaatgtaatatgctaccaaacattataagtaatatacatgtatgttacaaaaattatataataaacacttttgaacctatctaaccaataacctaaatattatcaataacttattcatactgttgcaacaccaagttttattccagtgtaagtttatctttggatctttgactcttcttgggttttcttttctttcttcctcctattcctcctccctccctcctctttgtctttttaaaaattaagacaagtcttttcagggatgctatctgagattagtctttcttttaaaggagattgcatccattttgacccattaatttctttttca

SEQ ID NO: 7813 - DNA, 1314 bp, Homo sapiens
ttggatttgaaaactcattcactttttcaatttttttaatgaggcataacatgcatatggttaagtgcacaaatcttaagtgtacagtcagtgaatttttgcatgtatgtatgtacctgaagcaagatatagaacttatttacttgtaaataacagctatattgatatgtcacataccaaaaaatttaccctttaaattatacaattcagtggtttttagtatatttacaaaattgtgcaaccatccctaccatctaattctagaatattagaaaccccatactcactaatagtctctcattcccttctactcccagcccctagaaaccactagtctactttctgtctctatggatttgcctattttggatatttcatacctgatactgtacttaattgttttaattaattaattggtttgatatttaatataactgatatatcttttgctaagatgaaatgtttatttcttaaaatgatgctcatattcctcctaaaataaatcaagtattatctatatatcataaaattcaccattaaaagcaaaaaaaaagtcttctttacagacagctccatatactgaccatgtttttataatctaggtctctggattcttctttattattgtatgcagcagagagatgcctttactatatcttaccctatccaagtaaaaacaatggaaatagtttcatactgttccctctccagtgaccaagggaggaattaggagaatggtgtagtagagttctcatctgagaacttactatcacgaactaataaaaactgaatatggccgggcatggtggtgggcgcctataatcccagctacttgggaggctgaggcaggagaatagcttgaacccgggagccggaggttgcagtgagccaagattgcgccattgcgctccagcctgagcgacaagagcgaaactccgtctcaaaaataaataaataaaaactaaatataccatatcccactccaatcctttgtcttcctagtgttcactgaaatgaactaaggaagaggataagtgttacacattgactaaagtaacacatcagatgatattgtgcaacattttaacattttaaataataattattttaaatatatttttattgtttgttttgaagctacatttctcatgttaaaaatggggccagaatgccgtcccagctcaactgtgagaaaaaggtttccccccatcgcacttgtggtacattaggtttatcttcattgaggattaaatattgggtagagaaagggtgataggcaaaaatataaatgaaatttttttttattctggttgc

SEQ ID NO: 7814 - DNA, 1033 bp, Homo sapiens
tgggattacatctctacaatatttttaaggtacatgataaacctatacacttttttgtcaattaaaaataaacaaataggccgggcacagtggctcacacctgtaatcccagcactttgggagaccgagatgggtgaatcacctgaggtcaggagtttgagaccaacctggccaacatggtgaaaccccatctctactacaaatacaaaaaattagccggatgaggtggtgggcacctgtaatcccagctactcaaattaaaaataaataaatagccaggcacagtggctaatgcctgtaatcccagctacttgctgagataggaagattgcttgatcccaagagtcaaggctgcagtgagctgtgatcatgccacgcactctagcctaggcgacagagtgagaccctgtcttagaaaaagaaaaaaaagaaactatgcacagagatacttatgtgttgagtgagtgacataatggtgacatgatttgttacataaattgatggcaccctgtctgaactattaagaatggatcaaatcaagttgtataaaggacttgctttaattggataaacatttgcataccttgcaaaatcacgtaggtgatggggaactgtctctactctgtattattaatatgtaaacgttactaggagagagaataaaccaaataatcataacaaaaggcaaaataaaaatcattctggaatatcaaatgctaaagagagtcatagtgagaaggtaataaactttcactaaggttgaagcagagatgttaaaaaaagaaagataatggaaggcttcagggaggaggtatttgagttaagtcttaaagaatgaggattttttttctttttatggagtctcttttttttttgagacggagtcttgctctgtgcccaggttggaggtgcagtggcgcgatcctggcttactgcaagctccacctcctgggttcacgccattcatctgcctcagcctcctgagtacctgggacaacaggtacccaccaccacgcccagctaattttttttt

SEQ ID NO: 7815 - DNA, 1028 bp, Homo sapiens
ggcgcctgtagtcccagctactcgggaggctgaggcaggagaatggcatgaacctggggggcggagcttgcagtgagcggagattgtgccactgcactccagcctgggcgacagagcgagactccatctcaacaacaacaacaacaacaacaacaacaacaacaacaaaaaaggataacagttatcttacctaatactgtgttgccctggtagttatagttatatttaaatagagatgtgttttcttgtgtgacagaactttattcttctcccacatgcatggaggataaaatgactttgctaggtttcttatttatacaaagagtttatatttggaaccagtccttccaggtgtaggcattaggaagtagagttccgcatctctaatgaaagtgattactgcaaggccctccaggatgattggaaggaacaagtggccaagagctacccttcctgcctaacatcttttcaggcacttgttggccatttgcatatctgtgtagaatcgtctattcaagtcctttgtccatttttcaattgaattattattattattttttgagatggagtttcactcttgccgcccaggctggagtgcaatggtgcgaactcgactcactgcaacctccgcctcctgggttcaagcaattctcctgcctcagcctcctgagtagctggaattacaggtgcacactgccacgccaagctaatttttgtatttttagtggagatggggtttcaccatgttagccaggctggtcttgaatacttgacctcaggtgatccaccagcctcggcctctcaaagtgttgggattacaggcatgagccaccacgcccagcctgaattactattttttgttgttgttaggttatagattattcttatatattctggatataaactcctcatcagatatgatttgcaaatattttctcccattccacatattgccttttcattcttttgcttcttttgatgttcagaagtgtttacctttgatatagtaccatttgtctgttcttgct

SEQ ID NO: 7816 - DNA, 1029 bp, Homo sapiens
actgcctgtttttcaaaataacggtgtggctgggtgtggtggctcacacctgtgatcccagcactttgggaggccgaggtgggcagatcacctgaggtcaggagttcgagaccagcctggccaacatagtgaaaccccatctctactaaaaatacaaaaaatagctgggtgtggtggcaggcacttgtaatcccagctactcgggaggctgaggcaggagaatcacttaaacccaggaggcggagcttgcagtgagccgagatcacaccactgcactccagcctgggccacggagcgagactgtctcaaaaaaaaaaaaaaaaaaaagttgtaataatcatttgtttattctcatagtggtatagtattccattgtatgaatatatcacattctactgttgatggacatgtgggtagtttctgatgtatgttttctagttatttatgaacattcttgcacctatcttttggtgaacatatgtactgagtatgtactagtgtacacagccaagctcattcatttacatcttatttatggctgctttcatgctacaagggcagagttgagtagttgcaacagagactggatggttgtcaaagactgaaatctttaccaccagcctctgcatagacagttgtttcctgacccctgttttaaggtatttcagtcaacctactaaatgccaattagagatcctccagctccatttcatgatgtcttgtttttagactttagtctcaaaattacagttacaatacaataaaataatcttaatttatgaatgcacagaaaaataaaaatattaattcacagcccaacactggtaaattgtgaaaggtgaaataagattttatctggtacgtggtggttgatacactgaaactggaaggagttcctttgtttattaccagggtttattattatgggagtctgggtatgactctggacttttaattaccacctgtcctgtgtctcaaaaaaattaacctcatataatataaactagttcattttaaagagagtgctag

SEQ ID NO: 7817 - DNA, 1048 bp, Homo sapiens
aggcattaaagaataggcatcagggactagttagaatttgaacaaaatgtatttataacactttttattgttggaaactcaacttttattctgggttaagcctctagataaaatcttaagtctgccaaactattattccccccaccttttctttccccaactatcaagaccattctaggaagtacgtcactctaccaaaaatgattgagttgtgttgggcctggggaaaaagtcgggcaaaaggagcctttcttgtggctgctgatagttaggttcatccaccaccgcactttgagctcgactagagtcgccatggggtttctgcagaggagacaaaagttacagaaacagtgaaaactatctgtaatgtggtatgtagttaaaaccctatcgaccatggcagatatggtaagtgcaggccaaacagctccaattccacgtcataaattagcactgtgtttgtacttttgacaaaacacagtataaatcaagatcagggcacagatcctgcagaattactgcccattaggttgtatggtaagtacatggagaggcaatatgaaagaaacataccatctgtctttgtggccccacagtgctcacatgttccacttcagctgtgccaataggtggtagcagattatttcgactcaggggcgtcggtgagggagaggagagcgagtcgggtgccactgggctgcagatcccaccaacaaacacgaaggtatgaaagcatgaagttataacaataccagcaaattgattagaaatcagataaatgaagcagatgagtttaatgtgcacagaaagctttaggctacctatgttttcaagtagagatctcaggatttttggaaaattagtttttaaaatagtgttttctgattttgttttgaagctctatactctgggtacacaacagaagctggccttttctctcccacagaactggaataaaacatttgtccctatctggtattgcacttctctgctgatttggatttgtaaattcccagctgatgatggaattcttgacagttctggacct

SEQ ID NO: 7818 - DNA, 1182 bp, Homo sapiens
tcatggagaaaaactcgttgccctcaacctagacaggatccgtcattggattggctgcggggcccacctctctaagcctatggaaaagcttctgggtaactcagctctggtcttaccttattgaggggattttaaactgaagtcagctccaggacagtaggtgtaagaatgattttcggctgggcacggtggctcacgcctgtaatctcagcgctttgggaggccgaggcgggcggatcacctgaggtcaagagtttgagaccagagtggccaacatggtgaaacgctgtctctactaaaaataaaaaaaaaaaattagttgggcgtggtgacacgcacctgtagtctcagctactggggaggctgaggcaggagaatcgcttgaacccaggaggcggaggttgcagtgagccaagatcgcgtcactgcactccagtctgggcaacagagggcgattccatctcaaagaaaaaaaaaaaagagttatttcattccctctaggctgttcaggactgaagtgggagctgaagttgtgatctaattggcattttgaatctggaggccccttttgtggactcctttgtaagactttgggtgactggtattttatgctaaaaataggaatagtatgttttgaatggccatctgtcagtttacgttttttaaagtaaggggaatattgttagggaagtagacatccactgtctccttgccggggagaagtagtacagagtttggcaagtgaggagcatggtttgcatccatgcactgggtcagatctcagacctcagttctgtgagacagagttcctagggaagcattggcttatactgtgttataataagtgaaaaatctgttacttttaggtcttgctggctttttccctctgcatcctatgatgatcacaaatgctgagagactgcgaaggaaacgggcacgtgaagtcctgttagcttctcagaaaacagatgcagaagctacagatacagaggctacagaaacataaatgagctgactttagtgagcatagcagtgggaacaaggtcaaggtccttttgaaacactgcagcgatcttaattttgttagatttggagttcaataaatggagtatcctgagttgcccttgctcttctggcctggcctgcacagggcccagggagagatttgttcttgtgtgactt

SEQ ID NO: 7819 - DNA, 1047 bp, Homo sapiens
gcgtatcagtctaagatcacattgggaataacgacagtagccctcagttttccactggacagtatgacaccaaattggcagggagtattattataagagaaatgaaccaaacaaaaattactagattttctctttagtgtaaatatcccaaatatcaacattttaaaaatacctgaggtctggctgggtgtagtggctcacgtttgtaaccccagcaatttgggaggctgaggcaggtggatcacttgagcccaggagttcaagaccagcctggggaacatggcaaaaccctgcctctacaaaaaattagccaggaatggtggggagcgcctgtggtcccagctactttcgagggttggggtgggaggatcacttgaacctgggaggcagaagttgcagggtgctgagattgtgccactgcactccaacctgggtgacagagtgagacctcgtctcaaaaaaaaagaaaaaaaagaagaaaaacaaataaaaagagttcttaccccagctctcccctaactagctctaggatctgaggcaagtcacctaactttattgggcctcaatttcctcatctttaaactaaaagggccagtatggaagaccataatatacttctcttagaaattgataagtcaaataggaaaaaaaataggatatatatacagatgtataacccattcaacaggtttgagttcaaacaccaatgtagaactcttcacttaacaatgagaggacacatattcttttcaagtacaaatgagttatgtataaaggttgaccacatgcaaaaccagaaagaggggttcaacaaatacatacagatcacatggcagtaaaattataaatcaacaaccaaaataaagcccaaaagactcatatacctttggaaactgaaaacatgcttgtaattaattaataagtcaatgaagaaaccttgtgacacttcaaatatgaaatcttttgtgctaggtagaattctaaagatggccccctcccctaagattaatctattaaacactaatgtaggtactgctgtaaaatgat
